United States Patent Application Publication US 2026/0092266 A1 - sequence listing, part 15

SEQ ID NO: 2399 - DNA, 15407 bp, synthetic construct
  misc_feature 1..15407: note = Synthetic
  source 1..15407: mol_type = other DNA
aattgcccgaaactttcttctttttcgggctcacactttgagttgttcaagacaacggattgaaaaagtcctttatagctttgcttgtggagatattgtttgtatagtagacaagtctttagtagacaagtaaacaagtttatagtaaacaagttaatagtttaatagttgactgtaaacaagtagacaagtaaacgagttgcttgataaataaaagcgacaataagacaaacaggagaatagacaagaaaacaaataacttgtcaacctgtcaactccaaactcgtcaacaaaataagacaaataacttgtcaacacgtcaacttaaaacttgtaaactaaaagaaatacatcaggtggttattgcggtggggtcccacctcttcccattccgaacagagaagttaagcccacttgcgccgatggtactgcaatgcaatgcgggagagtaggtagccgcctcctttttatcagagcgttcatttgagcaatcaaatggacgctttttttatttatgtcccttatgggcctcctgcaaatccctccgcaaaaggtttggagtatccgcgcatggcgaaagtcgtttcccgaatagtttggaatttccgcgcatggcgaaagtcatttcccgaatggtttggagtttccgcgcatggcgaaagtcatttcccaaatggtttggcgtttccgtgcatggcgaaagttgtttcccgaatggtttggagtttccgtgcttggcgaaagttatttcccaaatggtttgacgcttgcgggcttcccgcaaattactttttaaaggatttgacgcttgcgggcctcccgcaaatcactttttaaaggttttggtgcttgcgagctttccgcaaatctttccgcaaaaggtttgttacttttgcacatggcgaaagtcgtttcttgaaagttggatggttatgtatcttgtaatggaggaaggtgtggtaatacttgtggagttttatggtaaggaaatgtttctaaacttaagtcattaagaatttttgttagctaaaaatcaatcttattattctattagtttaaaaaaagatgccccgtatcggaggacgaggcaacctaatgttttcacaacggaataatccttattgtgaattgctttaaattagttgatgcaaagataagtatttataatataataaacaagttttcttgtatgatattttgatattattgttgttttttttacctttacggaataatatgaaacaattaatttatttattatatcatgaagaagatattaggattagatttagggactacaagcataggctgggccttagtaaatgagtgtgaaaatgaagatgaaaagtcctctataattagattaggtgtaagagtaaatcctttgactacagatgaaaaaggaaattttgaaagggggaaggcgattacaaccaattctgatagacaacaaactcatggtgccagaataaaccttcaaagatataagctgcgcagaaagtatctttgtgattgtttaaacaaacatggttggataggttctgaaccaatgtatgaagatggaaaatcttctacttttgagacctatatgttgcgtgcaaaagctgcggtggaggaagtgtcactgcatgagtttgcccgagttctgtttatgatgaataagaaacgcggctataaaagtaatcgaaaggctaatgataaagaagaaggaaagctttttgatggtatgagcgttgccaagaaactctatgaagcgcatttgacacctgccgaatactcccttcagttgctcaataaaggtaagaggtttacgcctgaatattatcgttctgatcttgttgaagagtttgagaagatatggaacgaacagaagaagtattacccagaaatacttacagacgagtttaaacggcagttggaagctaaaacaaagaccagtacgagcaagatatttcttggaaaatatggtatttattcagcagatttaaaaggtttggataggaagttgcagcccgttaaatggagagttgaagcattgcgacaacaggttgataaagatgtgttagcttttgttattagtgatttgaaaggacagatagctaatacaagtggattgcttggtgctattagtgataggagtaaagaactctatttcaataagcagacaattgggcaatatctatgggcttcattaaaggaaaacccacatgtgagtgtaaagaatcaacctttctatcgtcaggattatatagatgagtttgaaaaaatctgggagacgcaagcaagctttcataaggaactaactccagaattgaagcaagaaatcagagatatcatcattttttatcagcgaccattgaagagtaagaaggggctgatctcagtgtgtgagcttgaacaacgtaaggtaaaagtaactattgatggaaaagaaaaagaaataacgattggcccaaaggttgccccaaagtcctctcctatgttccaggagtttagaatttggcataatctaaataatatacaacttatagacaatgaaagaaatagtaagcgttctttatatgaagaagagagaaatctattatatgaagagttaagcattagagataggctcaataaggccgaggctttgagagtgttaggtaagaagaatagacaatgggatcttaattataaggaattagaaggcaatcgaacgcaggctactctcttcagctattataacaaaatcatcatgatgacgggacatgaagaatgtaacatcaaacagctaaaagctccagaaatccgtcattatattaagacgatatttaaaaacttagggtttaacacaggtatattagaattcgattcatcccttaacgggcatgagttggaacaacaacctatgtatcaactttggcatttgttatattcttatgaaagtgataaatctcggacaggtaacgaagcattattgaagaagttggaaactatttttgggttccccagagaatatgccagcgtacttgctgaggtcgcttttgaagatagctacgggaatcttagtgtgaaagcaatacgcgaaatcttaccacatttgcaggctgggttagattatagtcaagcatgtgaggaagccggatataaacattcgcgtcggtcgcttacaaaagaagaattagatgaaaaggaatataaagaaaagttagaactattatcaaagaatagtttacataaccccgttgttgagaagattctcaatcagatgattaatgtaatcaatgcagttattgatgaatatggaaagcccgatgaaataaggatcgaattagctcgtgaacttaagattggagcagcagagcgagagaatatgacacgaagtataagtcaaggtaatgccgagaacaagcgtattcgtgagattcttgaaaaagaatttgctctctcatatattagtcggaatgatatcataaaatataaattgtacgaagaacttaaaccgaatggctataagacactatattctgatacatacatacccaaagataaactcttttcaaaagattttgatatagagcatatcattccgaaagctcgtttgtttgatgattcactttcaaataaaactatcgaagcacgtgatgtaaatatagcaaagagtaataagactgcttttgattttatttctggaaagtatgggcagcaagggatagaggcttataagaagaaactctatattctgttgcagggtggttccattaataaggctaagtacaatagattattaatgaaagaagcagatataccatctgattttattaatcgcgatcttcaaaatactcgatatattacaagaaaggcttatgagatattaagtgatttggttagagttgttaccccgacttcaggagcagtgaccagtcgcctgcgtgaggactggcagttagtcgatattatgaaagaattgaactttgaaaagtatcagaagttaggtttaactgaagttattgaagataaagacggtaggaaaattaagcgaataaaggattggactaaacgcaatgatcatagacatcatgcgatggatgcactgactatcgcctttactaaaccatcattcattcagtatttaaacaatctaaatgcacgaagcaataaaggggatagtatttatgccatagaaaataaagaacttcatcgtgaagatggaaaactttgtttcaatgctcccttacctatcaatgagtttcgtgcagaagcgaaaaaacatcttaaagctgtgttggtgtctattaaggcaaagaataaagtgatgacgcagaatgtaaataagataaagacaaagcatggagtaataaagaaagtacaacttacaccacgtggagaactacataatgctacattctatggaacaaagaaacgccctataataaagatggtcaaagttggggctgcattagatgaagtaacaatcaagaaagtaagtagttcttttattcgtaaggcgttgcaggatagactctatgagtataatggtgatgcaaaaaaggcttttacaggaagaaattcaatagataagaatcctatttatatagatgaagagcgtaaaaggactgttcctgcattggttaaaacgatagagtgggagatgtatcaccctactcgaaagctgatattaccagatcttaaaatcgacaaagtaatagataaaggtatacgagatatcttaaaaactcggttggcaaaatttaatggtgatgtccagaaggcctttagcaatttagatgagaatcctatttataaggatgaagcaaagaagataattttgaaacgagttagccttgaaggagtttcaagtgtaattccgctacatacactaaaggataggtcaggtatgcctattacgggaaaggatagcgaacctgtattgggtgattatgttcaaacaagtaacaatcaccacgttgctttttatatagatgagaatggtaatctgcaagataatatagtctcattttttgaagctgctgaacgtaaatcacaaggagtacccattattgataaaaactttaatcacgatataggttggcgtttcctatttacaatgaagcaaaacgaatacttcgtttttccaaatgaagttacaggatttaatccttcagaagtggatttaatggatgaagctaattatgatattatcagcccaaatctatacagagttcagaaaatgtcgagagttgtatatggaaagagtataattcgggattatgtttttagacatcatttagaaacgactgtagaagtaaatgcaaatcttaaaggacttgcatataaacaattaaagtctttgtcatatttagaaggaatagtcaaagtacgtattaattgcatagggaaaatagttgcagtaggagaatatgattaatacaaatgatttatgataaagaaaacattgtgttttagcaatcctgcctatttgagtttaagaaattcgcaattggtgattcgtttgcctgaggtagaatgttgtaatgaacttcctgatagtttcaagcagcaaagtgagcgtacaattccaatagaagatattggagttgtactccttaataataagcgaataacaataacatcgtccgtattagaagccttgatagaaaataatgctgccgtggttacatgtgatagtaaaaatatgcctaatggacttttgttgtctttatgtgggaatacaacacagaacgaacggttccgtacacaaatagaagcatcactgccacttaagaaacaactctggcaacaaactataaggcaaaaaattaacaatcaagcgaagcttctaaatacatatactaatgcaaaggtgggatgcatgtatgcttgggcagataaggttaggagtggtgatcctgataatatagaagctcgagctgctgcttactattggaaaaatctcttttctgacatccccaattttgtaagaggacgggatggggcacctcctaataatctgcttaactatgggtatgcaatattaagagctgtcgtggcacgctcgttagtggcaagcggcttacttccaactttggggcttcatcatcacaataaatataatgcctattgtcttgcagacgatataatggaaccatatcgtccttatgttgatggattagtgttggatataatgtcatcaaccaatgattatactgagcttacaaaagatattaaaatgaaactcttagagattcctgtacttgatacaatgattggagataaaaagagccctttaatgatagctacacaacagacaacagcttcactttacaagtgttttagtggggaacaaaggaaaatgctttatcctgaattataaaaatcgattagtggatacttatagatttagtcaatataggagtatgtggttgatggtattcttcgatttacctacagatacaaagaaggagcagaaagcagctatgctctttcgtcaaaatctattgaaagatggatttacaatgtttcagttttcgatttatatacgtcattgtggtagtaaagaaaatatggaagtacatattaaaagagtttctacatttattcccacatatggaaaagttggaattatgagtataacagataagcaattcgaagggattaaacttttttatggaagaaaaccgcataagccaaatgctcctggagttcagttagaacttttctaaaaatgaaaaagttccacttctaaaagtggaactttaattctttatacttttttgttttcctaaagtaactcgtattcttctattagtcaatactttatgctacttgagttgtgtttgatagtacaaagatactaattttaaagcaattcacaacatatatgatgttaggacaagttaactctggttgtgtttgatagtacaaagatactaattttaaagcaattcacaacacagctatcaaatcacttttaatcatcgagttgtgtttgatagtacaaagatactaattttaaagcaattcacaacaaggaactattcgatgaaaatggtgagacagttgtgtttgatagtacaaagatactaattttaaagcaattcacaaccgtcttgccactgaagatgaaaaacaagcgttgtgtttgatagtacaaagatactaattttaaagcaattcacaacaccattctaccttgcctgcatgatggaatagttgtgtttgatagtacaaagatactaattttaaagcaattcacaacgccggctatcctttaattttgttgctgatgttgtgtttgatagtacaaagatactaattttaaagcaattcacaacacagggcttgaattaccctaaaacatcgagttgtgtttgatagtacaaagatactaattttaaagcaattcacaacacccgcacgttctgtctggcttctaaagggttgtgtttgatagtacaaagatactaattttaaagcaattcacaacacccgctcgttcttcctggctagtaaaaagttgtgtttgatagtacaaagatactaattttaaagcaattcacaacttcatgatgattattatttatattgattagttgtgtttgatagtacaaagatactaattttaaagcaattcacaacagctatcgggtataagtcttttagtccaggttgtgtttgatagtacaaagatactaattttaaagcaattcacaacacagctgtccaatcaagttaaaacatcgagttgtgtttgatagtacaaagatactaattttaaagcaattcacaacctgaagactgatgcaaatgaggcgttgatgttgtgtttgatagtacaaagatactaattttaaagcaattcacaacaagtttctgtatacggtaactcgacataacgttgtgtttgatagtacaaagatactaattttaaagcaattcacaacatcccatgtctcagattatctatgaaattgttgtgtttgatagtacaaagatactaattttaaagcaattcacaactccctgtgctgtaagcaaagaagtggcgcggttgtgtttgatagtacaaagatactaattttaaagcaattcacaactttgcggtcgtttacctttatttctttgcgttgtgtttgatagtacaaagatactaattttaaagcaattcacaacacggcatctaacatcattgctattcttgagttgtgtttgatagtacaaagatactaattttaaagcaattcacaaccttgccgactttcgaaaatagtccttaggggttgtgtttgatagtacaaagatactaattttaaagcaattcacaacaggtcaactcggtgttcttcataatcagcagttgtatctgatagtacaaaaatactaattttaaggtaatccacaatcaaaaggggctaattagttcgttggtacttatagtgttttcaagtataaagggggttctttttgagtatttcacccataatcctcactcaacaaaacagctgaaagatttgtttttaaagggaaaagctgctggtgattgcttggttgtgtgtgtcattcttttatatattttaatatttcatgtgagcttttgtttgcctgttaacctaaaatattgtatctttgcaggcgtagaataaaaaggatagtacatcttttatggtactatacttagtatttaacgggactgagattattggctttttgtttcttatatgccaaaatcgcgagtatatcatatttattttactcaggttccataaaaaaacaaatatggataaaagaaaaaagatcgtattgttgatttttagtgtttttatgtttttccctatgtactgctgtgcagcagaacaaacggagaatgcgaatgaagtagattggaatcctattatcaacgcaatcattcatgttgagagcaaaggaaatagtcgggcaaagagtggttcttctgtaggtgtattgcagataactcccgttttggttgctgagtgtaatcaaatcctgaaaaaacgtaagagcaaaaagcgctttaagttatccgatcgttttagtattgcgaagtcgaaagagatgtttctgttgattcaatcatatcataatccgctgaatgatattgaaaccgcgattagagcatggaatggtggcattcattttagcattaaaaagacgcaacgatactttgaaaaggtaatgagtttgctccattaatatggaatgtaaaaacgactgattgaggataaacaatcagtcgtttttatttcttttgaatttgaatatagtccttttactttccttttgttttctgaacttcctcaactgcttttctaactgagccgtacatcagtagcaatcgcttagcatggtcatagtcaaggcctaattcttcaataatcattcgagttcctctgtcgatgagtttcttatttgtgagttgcatgtttaccatgcggtttcctttcacacgacctaactttatcatgatacttgttgaaatcatgttcagaatcatcttttgtcctgtgcctgatttcattcttgaacttcccgtaacaaactctggtcctacaaccatttctatggggatgtcacatgcttcggccatgggcgagtctggattacttgtgatacagcctgtaagaatgcctttttcacgagcttgtttcaatgctcctacaacataaggagtggttcctgatgctgcaattcctaccactgtgtcgagtttattgatatgataagcttccagttcttcccatcctcggtattcatcatcctctgcattctcaactgcattgcgtagtgcggtgtcaccacccgcaattaatccaatgatatgcgttggcgaaacaccgaatgtgggtggtatttctgaagcatcaagcacacccaaccgaccgcttgttccggcacccatatagaataatcgacctcccttctgcatccgtgggactacggcttcaaccagtttctcaatctgtgggattgctgcttcaacggcaagtgccacctttttatcctcttggttgatgtcaactaataattcgtggacactctttttctctaaattgtcatagagagacggctgttctgaaatctttatgaatgccataagctttatactttagtagtgtgataggcaataagtccttccattggtgcctgaattgtcttgccaatggtcatgtgttctgcttctaaggcctcctttaaaggttgctggaaataatatgcaatagagccaacaaagcctataggcaggtgttcccagccctgatattgcttcacattgcgaattaagaagcggcggaagttctcctttaccaaatcaaaaatagctttattttcaatgtgtttagtcaggaaaggaacgaaacttgccaagaaacgattagggaatttctgccgatacacatggtcaatgatatcggcattgctaagtccatattctgcatgaaaggcttcgacaatgtctttcggcaattgattcttcagtacatcgcccactaatgtccttcccaatacagccccactgccttcatcccctaagataaagcctaatggagaaacgttctttgtgatgtcctttccatcataagcgcatgaattactccctgtacccatgatacaggcaatgcctggttggtgaccacataggcctcgtgctgctgccaacatgtctgtagccacctcacaagctctcgtgatttcaaattgcttttttaatgcttcagccactattgggcttttctctttcgtgcaaccagcaccatagaaatagacggagtcaagatgtgctgttggcaaatggggtactaagtgtgtagccaattcatttgctatttcttctgaactctggaagaatggattgattcctgccgttcttacctttgtcacactattcttttggtccaccaaacaccaatcggtcttggttgaaccgctatcagctaaaagtatcataatttgataaatatttgtttcttgtatagataatagccgctactccatgtgaggaatacgaacaataacgcccaagccagtgcagcattttgtgttcctatgcatggctgtagcatgtcggtgaatacccacgcctgtatcggtttaccgcaaataggtaggattgataacggaatcagcaacaagtctgcccatacataaagtgctaagggatttacaccaaagactctaaagaaggtgatggcactgtttttgtggccttctttgtcgatgacccagctcagcatggctaatgttgttgaagccaagccgcaagtaaccagtgcgaaagttggggtccaaagtttcttgctgattgggcaaccatagcttaaaaggaagcctgcaaatgtcagtaatgcaccaaaaaggaagagcttttcaattttttcattgattgatgtagcagacattaaactccgtccaacgcagaatcctatcaacacatgacctaaagcaggaaggttactcagtaatccttcggggtcgggaatatcccattgatataaatgttgacgtccgaaaacagcctcatctataacattgcagatgttcgatgcatcgtgggcaaatccatttccatagcataatatcaagtaatatcctacaaagagtgcaccaatgaaatagggaatatacttatgtttcatagagattgccacgaaagaagccagcatgtagcagaaggctaaacgtggaaacacaccaactaatcgtatgtgatcaaagacgtttgccgacactacaatgcgcgacagcaaggggagtgttgcgttttctgcattgaatagcccatgagaaaacatcataatccaactgatgccaataccaatcacatagagaagtatgccacgtttgatgatttttcgagtgcatgtccaagaccattcaaagttatatttgcgcaaggatagataggttgtgatgcccatgatgaacataaagaaagggaagaccaagtctgttggtgtcagccccagccactctgcatgctccaaaggcgtatagacgggttgaccgcccggattgtttacgagaatcattcctgctatggtgattcctcttaagatgtccaccgcttcaatacggcttgttttctttgtagtcatttgtttatttatataggtagtatttcttcgaaagtgccttgaaaggcatgatgtctttgtcccaatagcccactacatcctgccagttatgccgctgtaaaaagcgcgtgcggatgacttttgaaccacaaactttatcaaacatggtcgtacgttgtcccgattcacctaagatgtcgtgtgaaggatagcgctgattcaacacttgcaaggcatagaactgaacgtcacagagtcttgctttggcataatcggtgaaataaatctgaactccttgtaaggcttgtcctttctgtttaccatagaaagggacatagtggatggggcgaaacaacagtcctggcagctgcagtgcattcatatcgtctgcaaatttgtctgcatctatccacgaagcgcccaatagttggaacggaagtgtatagcctacgccgatatttagactgtctaattcacccacaatgcctgtcatggcatagaaaggtgctgcttctgcctgtggaatatgcggagaagcgggaacccatttcaactttgttgcactgtaatccatttttcgtttccaccccttcatcttcactacttcgagcatacagggcttgcctaacatgtgttcaccattcagtaacattgccaactcgcccacagtgagcccataaacataaggaatcttaaaggcactcacaaacgattggcaatcctcttctgtcagattgccttctattttcaagcctcccaaaggattagggcggtctaaaacaaccactttaatgttatgttttgcagcggctttcatgatgtttcccaacgtgcttatataggtaaacgaccgacatccgatgtcttgaatgtcatagactaagatgtctatatctttcaacatctcatcggttggttcacgttgtgtgccataaagtgagtagatgggtaggcctgtacgttcgtctttggtgttaccaaccttgtctccagcatgcgcgttgccacgcactccatgctcaggaccgaataatgccaccaatttcacattctttgcagcatgtaaaacgtcaatcgttgagcgcagttcgttgtctactcctgtagggtttgtaaccaagcccacacgctttcctgccaatatcttaaagtcttggcgtttcaaaacctcaattcctgtcaacaccttagcctgtaccacgcccatgaatagccagcatgaaagcaacaataaaactattttcttcatttattcaacctcgtttgtctttctgccatattgaacatcgacctgctttctcacaatgatagttactgcaatcgtagccaagcagcagaccattactaaccagaagaagccttcatagcctaacctctcctgcaaatatcctgcaaacatgcccggaatcatcatactcaaggccatgaaagtcgtacagatggcatagtgagctgtagtgaattcaccttctgaaaagtacatcatataaagcatatatgctgtaaaaccaaagccatatccaaactgttcgatggctacacacgtgctgatgacaacaacattctcggggtgtgtcatgctcatataaaggaaggttacacacggaagtgtaatgaatatcgccatcggccataatgatttctttagtccccagcgtgaagaagcaaagcctccgataattcctcctaatgtcaggaagcatgcgccaatcgttccatagatgattcctacctcagtagtggctaagtttaggccgcctttttcaatcggatctaataagaaaggattgaccattttgagtagaaaagcctctggaagtcgatagagtaacatgaaaacgatggctaatagcacaccgggtttgctgaaaaatgtaacaaaggttcgtacaaagtctgtccatatctcttgtgctgcatgtttctccgggttgtcgttgatatgtctttgatcggctttaggccttggaacaatgaagatatgataaagactgattagtgcaaacaataccgaagtgatggtcatggtaagcgtccaagagagtggaatgttttgtgttgtgcgctcaatatagccagctatatacaccaaaatcccttgaccaaagattgatgacaggcgatagaacgtgcttcggatgccaacaaagaaactctgttgttgctgattgagcgccaacatgtagaatccatctgcagcaatgtcatgtgttgccgaggcaaaggctgtgataacaaacaggattaaggtgaaggtgaacagtgaaattggggtagaacccgctgctattgtagctttgtcagggtgtggaatgctcaaagtggtgagcacaaagacggctgtcatgagcaactgcatacatagaatccaccatcgtttggttttcaagatatcaacaaacgggctccataatggtttgattgtccacggcagatagagtaaactcgtgaaaagtgccatctcaccattgggtactcccatcttcgtaaacatcgttacagagatactattgacgataaaatagggtataccttcagcaaaatataatgtcggaacccacaaccaaggggatgcatgattagttttcatgtgatgcagtgtattgaatgcttaacaaagtttagatagagggagcgctgtttaggctactccctccgtggtttatgaatggattaatctttttgttctttattctttttcagacgagccaatagttcccaggtgcggatgcggtctttataggtgttgtttctgttttctttctcaacacttaatgcggcatctgagttgtcatcccaacgtctacaatagtataaaacgtcatagattcggcctatctgatagttgcgagagatggctaaccccaaggcatagtcttcaccatagttgacatttggcagtttcacttcgcgcaaaataggagtaaagaaggcacgaggcgcacctaaaccattgatgcggagtgcattgtttcgaccattttctggtgtccattcacgatgatcaatcttgccaggaggcaacatttggcggttgatatcagtcaacatatacgtgcctattaccattgcacattgttgttcataaaaggcatcgacgaatttctgcagggtatgttcatcagaataaacgtcgtcgctatccaactgcacaataaaccggccgcattgtggatggtttgctgccatattccagctgccaccaacacctatatcgcggcggttagggatgagatgaactacgcgttcgtcgtctttatactcctcaatagcttctgttgtgccatcagttgagtgataatcagggccattttctacgataaagacattatatttgaa

SEQ ID NO: 2400 - DNA, 15380 bp, synthetic construct
  misc_feature 1..15380: note = Synthetic
  source 1..15380: mol_type = other DNA
aaaatctctatgtcgcggttgtagttgaccgtcgtcttgccgtatgcctcgaggtggaaatggtcgatcatgttcacgtcattgaggtcggccgtagcggcttcgtaagctacattgactgggtgtttcagggggatagaccagatggggaacgtctcgaacttggcatagccggccttgacgccacggcggttctcgccccagagttgcgagaggcagacggccatcttcccgctgccggggccgggggccgtcactacgaccagcgggcgcttcgtctcgacgaagtcgttcttgccaaagccgtcgtctgagtctatcagctcgacgttcgtgggatagccttctattaaataatgatagtacacgcgcacgcgcccgaggcgctccagctgctcgcggaaggccacggcggaggcctgaccgttgaaatgggttatgaccactgagctcaccagcaggcctcgctcggtgaagacgtcgcgcaggcgcagcacgtccttgtcgtaggtgatgccgaggtcgccacgaaccttgttgcgctcgatgtcttcggcagagattacgatgatgatctctgcctcgtccttcagctgcatcagcatgcgcagtttcgagtcgggctggaatccgggcagtacgcgcgaggcgtggtagtcgtcgtagagcttgccgccgaactccatatagagcttgtcgccaaactgtgctatgcgttccttgatgtgctccgactgtatgcggagatacttatcgttgtcaaaaccttgtttcatgggacgtattcttagttgagaacaaaatttcgccacaaaagtagtgctttttgctcatttcacaaagaaaatactgataaaatactgcttcgctacgacgtttttctgaacaggtagcgggagctttatgcaggacgccaaagggctacattcagaacccttaagggtttcaggggaatggattagggaataggtattagggattagggcgaatggcttaaggccttcggcaaaaaggcttaaggccttcggcaaaaaggcttaagggttttggcaaaaaggcttaagggtttcggcaaaaaggcttaagggttttgactggaaggcttgagggtttctttcaaccggcttaatccggtcctgaaacaacaaaagggccgcttcacagcgaccctattgcttcagtctttaggtattagtccgtttaaggtaaaaagattgtttatttcaggataacggccacaaagttaatcacgaatgcgatacgttgtagctcaaaatcgtatgttttacaacatgtttttaattttcttcaccaatcatcagacctcgtcaatcgtggaaagcggccatcagcgtgattggcgagcgttcgatacggcccacgattaagccctcagcctcagccgattgcagcagttcgtcggcaaattgcgatgctatgccgcccacgaaattgacgggcaaatcgtctcttccgtatttttttacatttctacggaaaaaagcgcggaaactgtctgtgatgagctcatgtatgcactcttcagcacgattttccaccaaaaatggcactaacgaggccaggaagcggttggcttgcggttggcggtagaccctgtcaataatatctgcctgcgaaagagcgaaacgcgcgagcagctgcgagcacaaagcatcgccaagctcgcccttcagggcatcgcccacaaggcggcgacccagcaccgcgccgctgccctcatcgcccaaaatccagcccaggggagggatgttggccacaatcttgtgtccgtcgtaaagacacgagttggagcccgtccccaggatgcaggcgatgccttcgccgtgcccgcacaaagcacgggctgcgcccagaaggtcgctctcaacggcgactatgctgccggcaaaactctgctccagagcgcgctctacagatgccttgaaaggttcgatgcagcccgcgccataaaagaaaatatccagcgtgctgcgccatcggccctgcagcccgcggtccggctctacgctcagataactctcgagcgtagcggctacgccgccgatgacggccgatatcgtcgagtccgcgtcgcgaacagggtttaagcctacgctctctacgcggacgtcatcatgcccgcgccgccgaagcagccacgatgttttggtggaaccgctgtcggccaccaaggtcatctttccatacatttgccttgctacattaattaaaaacaactatcagccctcaaaaatatataaaagattccacttacattcatttttcgtccgaaaacagacgaccttacgcgtattttcattatttttgccaccaaatatactataaacttatgagaaaacttcttttcaccatcgcacttgcaacggctgtcacggcggcggccgagccggcaataaaaaacagccgccagaaagcggccgctactgactccatcattgcgaactacaccgattcgctcgctctgattgttgacgcttacaccaacccgcaaccccacaaggtgacattctcgccattcctcttcccgctgatagggcaaggcacgctctacaacgcagccttgactcagcaaatggcacaacagcagatgccactgcccggctctaacctgccttcgctcggctcgaagaccgacgaccagctgctgctcgtagaagcatcaaacaaccaactcgcacgagcctacaccgccgtgcctcaatatttctcggccacacagcagcaactgactgaatccggagggctgcgcaacgacatcgccacacccatcgtcgaggaagtcaagctcgcacagaaagtcgtcgaggaaaagccggacgtcgaggtcgaagctgtagagccggaggtcaagaagcccaacttctggacctacaaaggcaacggaggcctccagttcacgcagagctacgtctcgaaaaactggtataaaggaggactcaacagctacacactgctcagcttactgaacatcgaagccaacttcaacaaccagcgtaaagtgcagctcaacaacaaattcgaggctcgactgggattccagacggcagagggcaacgtgccaaagttccgccccaccgacaacctgctgcgcttcacatccaacctcggaatcaaggccatcggcaactggaactacgccgcacagttgcagcttcagtcgcagccctacaggggctaccagggagctacgaggaacgtcatctctgacttcctgtcgccgctctacgtccgctcatctatcggtatggactacaacatcaagaagaagcgcttcgaaggttcgctgaagctggcaccgctctcatacgtcataacctacgtacacgtcgacagccgcgtcacacgctacggaatacatgaaggccacaactcaaagcacgattggggtcccaacgtacagttcaccttcaactacaagatggcgaaagacatttcgtggcaatcacgattctactggttctcaaacttcaagtcgacactcatcgagaacgagcacaccttcaacttcaccatcaacaagtacctcagcgccaagctcttcctttatccccgattcgacgacaccaagttctgggggctcagcttcaagaaggatgctgatggcaaagctaccgaccagctcgatgacaacagcgcacgccgaacccactggatgttccaggagtacctctcgctcggcctgaactacgacttctaacttttacgaactatgacaatcaagtctgcaacgtacctcgtaagcagtgcacgtgtgaaccagtgtccggagcacaacagacctgagtacgccttcatagggcgctcaaacgtgggcaagtcgagcctcatcaatatgctcaccggcttcaagaaactcgcaaaaacgtccgcaacgcccgggaaaacgttactcatcaaccacttcaacatcaacgacggcgaatggttccttgtcgacctcccgggctacggcttcgccaaacgcagcaagacggagcgccagaagctcgagcagatgatctcaggctacgtcctacaacgccgacagctcaccaacctcttcgtgctcatcgatagccgtcacgcaccgcagcaagtagacctcgaattcattgagtggctcggacagagcaatatccccttcagcatcgtcttcaccaaagccgacaaactgagcaagctggcgctgcaaaaaaacatcgacgcgtacctacaacgcctcgccgaggaatgggaacctctgccgccatacttcgtcacctcatctgagacccgcctcgggcgcgacgaactgctcaactacatcgaaaccataaacaaagatataatccaaaaataaaattccctgaacaccatccttaatcatttacaacatcaccaataatttaaccctcattgggtccagtcctcggcggtctgtccgccgagcaacaacgcccccaaaaacaaacagcaactcatggataaaaacactgttacaggattcatcctcatggccctcgtgcttatcctcttctcgtggtacagccgaccctctgaggcacaactcaaagccgcacgcgaacgcgactcaatagccgccgcacaactcgaagcacaacagaaagccgaagcgcagaaagcactcagcgattccgcagccaaggcatcgacacccctcgactccacatccgcactctttgccgcttcacaaggcaccgagcaactcataaccctcgagaacgacctcgtaagcataaccgtcaacacacacggcggcatgattgaggaagccgtcatcaaagactacaacgaccaacagaagcagcccgtacgcctcctcaccaaggaagacgcctccatggttctctccctcgccgccaagcaggagaatatcataacccgcgacctctacttccagcccgtcaccctcccggctaccacatccacatccccctctcaggccaaaagtcaagagcccggcgcttcatcagccaagggtcgagtgctcggcgcttcgtccgccgaggcccaatccctcaccctccgcctccccctcgcctccggctccctcgacatcgaatacacccttcgtcccgatgcctacatggtcgacatgattgtccgtgccaacggcatcgcaaacctcttcgcaccctcgatgcgcaccctcgacatccagtggaccgaccgtgcccgccagctcgagaaaggcttcgatttcgagcagcgctacgcctgcatacgataccaccgcaccgacggaaagaccaaaaacctctccgagacctccgacaaggaaacggatgtcgaagaggcgctcgactgggtcgccttcaagaaccagttcttctcagccgtgctcatcagccagcaggaactgaccggcgctcacctcaaatcgcaggtctataagaaaggacaaggctacctcaaaaactacgaggcaaccatgcagaccgccttcgaccccacgggcgcacaacccacacagctacagctctacctcgggcccaacgacttccatgcccttaaggctcacaacaaactcagcctcgccaacgacaaggacctcgaactcgaagacctcgtctacctcggatggcctatcgtacgttggatcaaccgctggttcatcatctacctcttcgattggctcaaaggcttcggccttcacatgggactcgtcctcttactcctaaccatcatcgtcaaggccctcgtctatcctgccaccaagaagagctacctcgccagcgcccgtatgcgcgtcctcaaacctaagatggacgcccttaatgccaaatatcccaagcaggaagacgccatgaagaagcagcaggagatgatgcaactctattcgcagtacggcgtatcacccatgggcggctgcctgccgatgctcatacagatgcctatctggattgccctcttcaacttcgtgcccaacgccatagagctacgtggccagagcttcctctgggccgacgacctctcagcctacgacgacgtcatccgttggggcaaggacgtatggctcatcggcgaccacctcagcatcttctgtgtgctcttctgcgtcatgcaaatcgccaacacatggatctccatgaagcagcagcagaacgccgtaatgtcgcccgagcaggagcagagcatgaagatgatgcgatggatgatgtacctcatgcccatcatgttcttcttcatgttcaacacctacagttccggcctcaactactactatttcctctctggcctcaccagcatactcatcatgtggttcctccgcaagaccaccgatgacaacaagctcctcgcacagatggaagcctacaaagcccgcaacgccagcaaccccaagaagcaatccggcatggccgcccgcctcgaagccctccaacgaatggccgaagagcagcagcgccagcaacaaaagaaatagcccgggtgccctcgccggtttcccctccgagcaccatcatcctaaatatttccccggggtgccctcggcggtttccccgccgagtcttccacttcccttccaaatcccccctgtactctccaacaatgaaaacagctttgaaaatcctctccgcctctgccatcctggcctccgtcgcccccctcgtctcctgcaccgagggcaccaacgacgacatcatcacacgtagcgacatcaccctcgcatccgacaccctcacccccgaagccctctgggctatgggccgcattggctcctatgccgtatcgcccgacggcaccaaggtcgcctatcaagtcacctactacagcgtcgaagaagaccgcagcaacaccctcctctacgtccaggaaatcccagcctctaagactgcgcccggcgactctgtcccccctgctcactccctcctcggcctcggctcttcccccgtctggctcgccgatgacaaactcgcctttgccagcaaaggcgaaatctggaccatgtccgcatcgggcaagagccgcaagcagctcacccacaccgatggcgccgtcgagggcttcctcttctcgcccgatcagaagcgcgtcatcctcatcaagtccatccccttccacgacatcatccaggagcgcccagccgacctgcccaagagcactggccgcgtcatcaccgacctgatgtatcgccactgggaccactacgtcgagagcatcccgcatcccttcgttctcgacctcgagagtggcgaggagttcgacatcctcgaaggacagcccttcgaatgtcccatggagcctttcggaggcatcgagcagctcgcctggtcgccagacagcaagagcatcgcctacacctgccgcaccaaaaccggccttgcctacagcatcagcaccgactccgacattttcctcttcgacgtcgagacgcgcgaggccaagaacctctgcaagcccgtaggttacgttgagcctcagatcgagccctctaagaccatgaagtttcaggaggtcaatgctgaagccaacttagccaacacccccggctacgaccagaaccccagcttctcccccgacggccgctacatcgcatggctcagcatggcacgcaacggctacgaagccgaccgccagcgcctctgcgtcctcgacctccagagcggcgagaaacgctacattacagaatccttcgacagcaatgtcgacgacttcgtctgggcagccgacagccgcaccatttattttataggtgtatggcacgccaccgtcaacctctaccgcaccaacctcgaaggacaagtcacccagctcaccaacgaccaagccgactggggcgccctccaattggtaaatagtctatcagatgacaaatccgattgcctcctcatggagcgccacgactacttccaccccgccgacctctacctcgtcaccatcaccacctcctctcccgctgaatccgcccccacatcgcccactgcatccaccacctcctcgcttagcgtaggcgacggcagtgccgtcgcaacagccaccccctcctcgcccagcgaagctacccccacatcgcccactgcatccaccccctcccagctcagcgtaggcgacggcagtgccgtcgcaacagccacctcatccaccgccatcacccgcctcaccgccgagaacgaccacatcctctcgcagctcgcccccggcagctcagagccccgctggtgcaagaccaccgacggccaggacctcctctactgggtcattaagcccccacatttcgaccccgccaagaagtaccccaccctcctcttctgcgaaggcggtcctcagtcgcccgtttcgcagttctggagctaccgctggaacttctacatcatggcctcgcaaggctacgtcatcatcgcccccaaccgccgcggcctccccggcttcggtcaggaatggcttgaagagatctcaggcgactggacaggccagtgcatgcgcgactacctctgcgccatcgacgacgcctgcgataaccttccgttcgtcgaccgcgaccgcctcggagccgtaggagcctcattcggaggttttagcgtctactacctcgccggtcaccacgacaagcgcttcaagtgcttcatcgcccacgacggagccttcaacctcgaagccatgtacaccgagaccgaggagaactggttctccaactgggagtacgacgatgcctattggaaccgcgaccgcacggccaatgccgaccgcacctaccgcaactcaccccacctcttcgttgaccagtgggacacccccatcctctgcatccatggcgagaaggactaccgcatcaacgcaacccaaggcatgagcgccttcaacgcagcccgcatgaagggcatcgaagccgaactcctcctctaccccgacgagaaccactgggtcctccatccacagaacggcatcctatggcagcgcacctacttcaactggctcgcccgctggctgaaataaaaaaaatgtcaggcctgcatcgacaacgatgcaggcctgacattttttcacccccacctcccactaataaccaccattcatcactcgttattcgtcattcgtcactaatcattaccccctggcacccttccaatacatcacgccacgtagcctcgaaatcaccagtgtaccacggatcagccacctcgcctggccgtgacgtaaactccatcagcaaatgcatcttacccagaggatcgcccccacaaatgcgacgcatattacgtaagttccattcatccataccaatgatgaggtcaaagcgctcgtagtccgagcgagtcatctgccgggcacgcttaccatcacaaccgatgccatactcagccagcttacgccgggctggcgggtaaacgccattgccaatctcctcagtcgacgttgccgccgactcaatataaaactccgactcacgcccagccttggcaaccagatctttcattacgaactcagccatcggactacggcaaatattaccgtgacatacaaacaatatccttttcataagctttcaaaaaacacacattacaagtctaagcctgaaaaggccctcccctcgcttaatcatacctgcaagcttcgagcctaattcagaaagcaagtgcaaaggtatacgttcagaacgaatggccaaattattatcctcgttttcgctttcgtcccctctctttttccaaattccactacccaaagcttaagaaacacaattcccatggatgaatactgaattaaaccagtcccccgacagcaagcagcgattccgtcgcccggtccctcccccctccccccatacagcaaagcccaaggccatcagccttgggctttctttgttgctgtaataagatgcaactcgtcacagagagatccgattataatatataaaaaagcccccgttaaaggacgagggcaggaacctgaatgttttcacaacggaataatccttattgtgaattgctgaaattcttaggcaaagttagatattatgaatgaatgagcaaacttttcgaaaaacttttattcttattcaatgtttttttcttatttttgccctcaaaacaaactgatttacctcatgagacacattgtaggattagatttaggcacaaccagcatcggttgggcattagtgaatgaagcagaaaacaacaacgagcaatcttctattacacgcctcggcgtaagagtcgtgcctctcactgttgatgagcaaactaatttcgaaaaaggcaagagtataacaaccaatgcagaccgtacgctcaaacgtagcatgcggcgcaatctgcaacgcttcaaacagcgtcgcacgaatcttattgattgtctaagggaagcaaacatcatccaagatgaaacgacccttgccgaaagcggtcctcggaccacttttgctacactacatgcacgtgcaaaagcggcaacggaagaagtatctttgctggagctcgcccgcatcttattgatgattaacaagaagcgagggtacaagagtagccgtaaagcccaatccacggaagaagggacgctcatcgatggcatggaaatagccaagcagctccacgaccaaagcctcacgcctggccaatacacctataggcttctgcaagcgggaaagaaatatattcccgacttctatcggtctgacttagttgctgagctggatgccgtttggaattaccaaaagaaattccataatgacatcctcactgatgacttctatcatcaacttcaaggaaaatccaagacgaatacgaccaagattttcttggggaagtatggtatctatacagctgacaacaaaggcgacgaccgccgtcttcaacagtatcgatggcgcgctgaagcattgcaacgccaactcacacccgaagaactggccttcgtcatagccgacatcaatggtgccatcaacaatagtagcggctacctcggggctatcagcgaccgctctaaggaactctatttcaaccgccaaaccatcggccaacacatcgttacaaagcttgaaaccaatccgcattatagcctgaagaacaagaccttctaccgacaggactatctcgatgaatttgagcagatatggaacactcaagcccatttccacaaggagcttacaccggaactgaagaaaacaatccgcgacgagattatcttttatcagcgacctctcaaaagcaagaaagcgatgctggacatttgtacctttgagcgccgtcaggtggaagtacaagaagatggaaagacacgcaacaaaaccataggcctcaaggtatgtcccaagtcctcgcctcttttccaggaattcaaggtttggcaggtactcaataacctgcaagtagaatacgaagatgctggcgaagacctcttcgctaccacagagaaaagacgtttcctcgacctcgaagaaaaagaattgctcgcgcgcgaactacaatataaagagaagctatccaagcgcgaagtgctcaccattctcttcggaaaagctgccaagaagtatgacctcaactacaaggacgtagagggcaaccgcactttgtttgcactttaccaagccttcttcagcatcatcgcactctccggacacgaagagtacgacatcaagaaattaaaggctgatgagatcgaggaagtgacgagctctgtcttaagggccattggcattaacacagatatccttcacttcaacgctgaacttgagggacacgcttttgacaagcagcctctctatcaactttggcatctattgtattcctacgaaggcgacaactccaagactggcacggattccttaatcgccaagcttcaagagctctgtctttgtgaccgcgaatatgctcaagtgctggctaacgtcacgttccaagaggattacggaagcctcagcgctaaggcaatgcgcaagattctgccattcatgaaagcaggcaacgattacagcgtagcttgcgaatacgctggctatcgccattccgaacgttcacgaaccaaggaggaactcgacaatcgtgattatttggaccgtctcgagctgttgcctcgcaatgccctccgcaatcccgttgtagagaaaattctcaatcagatgattaatgtcgtcaatgccattgttgaagaatatggtaagcccgatgagatacgcattgaactggcacgcgacttgaaacagagtgccaaggaacgcgagaaaacgacacaagatatcaacgaggcgaacctcttgaatgagaaatatcgtaaaatccttgaatcagagtttggcatccagcatgtcagtcgcaatgacatcatccgatataagctctatatggagctgaaagacaacggcttcaagacgctatactccaacacctacatacctcgcgaccaactcttcagcaagaacttcgacatcgaacacatcatcccacaggcacgtcttttcgatgattccttctctaataaaaccatagaggcacgcgacatcaatatcgaaaagagcaatgccaccgcctatgactacatccttggcaaatggggtgaagagaaagcggccgagtacaagacgaaaattgacaatctctacaaacaaggtattatcggcaaagccaagcacgataaactgctcatgcgcgaagccgacatacctgacggattcattgaccgcgacttgcgcaactcacagtacattgccaagaaagcacgtgagattctggaagacatggtaccgcaagtcattcccaccatcggaagtatcaccgaccgtctgcgtgaagactggcagctcgtggatgtcatgcaggaactcaactgggacaaacacaaccgcctcggactcacagaaacctataaagacaaggatggacgtgagatccgacgcatcaaggattggaccaagcgcaacgaccatcgccatcatgccatggatgccctaacaatcgctttcacacagcctgccttcatccagtatctcaacaacctcaacgcacgaagtgacaaaggcagcagcatctatggcatcgaacagaaatatctctaccgcgacagccacggcaagttgcgtttccgcgcccctatgccccttgacgtgttccgtgcagaagccgagcgccagctcgaagacatcctcatctccatcaaggccaagaacaaggtgatgacccagaatgtcaacaagtctaagacaaaaggtgggaccaataagaagactcaactgacacctcgcggacagctacacaacgagactatctatggccacacgctgcaccgcatctctgaagaggtgaaagtggatggcaagatgacgccagagcgtgctcagctcattgccaagaaagtctatcgcgaagccatacttgcacgactctcccaattcgacaacgaccccaagaaagcctttactggcaagaactctactgaaaagaatcccatctggctcaacgagcaacatgccgagcaagtaccgctacgcgtgaagcttgtctatttcaatgattactaccccatccgcaaacctgtctctccagaccttaagctggacaaagtcatcgacgctggtgtgcgacgcatcctgcaagcacgaattgacgagttcggtggcgacccgaagaaagcatttgctgacctcgacgagaatcccatctacctgaataaagaaaaaggcatcaccatcaagagcgttcgcatccgtggtgtcctcagcgccattcccttgcatgaagccaaagaccactttggcaaagctatcacagacagcaatggcaagaaacgacctgttgattttgtgcagacagccagcacccatcatattgccgtgtatcgtgatgccgcaggcaacctccaagacgttgccgtctccttcttggaggccactacgcgcaaagcagttggtatccctatcgttgatacggaatacaatgcttcagaaggttggcgcttcctcttctctatgaaacagaatgagtacttcatcttcccagacatcgaacatggttttgacccgaatgccattgacttgttcgacccgaagaacaagggagagattagtaagcatttatatagggtgcagaaattgtccagagtagattatggtaaacaagtagttagagaatatgtattcaggcatcacctagaaacaacggttaatgaagagaaagagcttaaaggtatagctttccgaaacatcaaatctcttgctccacttgaaggcatcgtcaaagtccgcgtcaatcaccttggtaatatattgcctgcgaaagagaactaattattcatcattcatagagcctgcacttgcaggctctatttataccctataaactatgattaagaaaaccctttgcttctctaatcctgcttaccttaacctgcgcaacaagcaattagtcattcagattcccgacgtggaaaagaatgataccttgacgcctgagttcaagcgcatgaacgagcgtaccatacctatagaggacatcggcgtggtagttctcgacaacaaacgtatcaccattaccacgggtgccatggaagcattgctagagaacaacgccgccgtcattacctgcgacagccgcagtatgcccgtgggactgatgcttcctctctatggcaacacactccagaacgaacgctttcgcgaacagctcgatgcttctctgccactgcgcaaacagctttggcagcagacaatccgtcagaaaattgccaatcaagaggttgtgctacgcacatacactgaagctgagacgcgttgcatgaaagcttgggtggatgaagtacgtagcggtgatgccgataatctcgaagcaagggcagctgcctactactggcgcaacctcttcccacagattcccaacttcgtgcgcggacgtgacggcgaaccgcctaacaacctcctgaattacggctatgccatccttcgtgccgtcatagcacgttctcttgtcggcagcgggttattgccaacattaggaatccaccaccacaaccgttataacgcttattgtctcgctgatgacattatggagccttataggccctacgtggatgagctcgtcatcaaaatcatccgcaagtatgcagattattctgaactcaccaaagagctgaaagcagaactactgagcatccccgtcttggatgtggttatcgacggaaaacgtagccctctgatgatagcagcgacgcagaccaccgcctcgctctataaatgtttcagtggggagctacgcaaagtgagttatccacaaatggaagaataaaggttatgttgatagacgattcttcacgtctcagccagtaccgtgttatgtggattctcgtattctttgaccttcccaccgacaccaagaaggaacgcaaggctgcagctaaattccgaaaggacatcatgggcgatggctttacgatgttccagttctccatctcct

SEQ ID NO: 2401 - DNA, 15304 bp, synthetic construct
  source 1..15304: mol_type = other DNA
  misc_feature 1..15304: note = Synthetic
gcagttcgaacaacagcgtgtcgaagaagtatttgttgagttgcttcacgccgagcttggccagttcggaggtcagcttgccggcgaggcagttgatgtgatgtgcgatttctatcaagccctctggaccatgatacaaggcgtagaagcccgacatgatggcgagcaaagcttgagcagtgcagatgttggacgtggctttttcgcgtttgatgtgttgttcgcgggtttgcagagccagacggaaagcaggattgccaagggcatccacgctgatgccgatgatacggccgggcatctcacgcttgtaggcctcggtagtggcgaagtaaccggcgtgcgggccaccgaatcccatcggcagaccgaaacgctggttggagcccaagacgacgtcggcaccccattcgccaggaggcgtgatgagggtgaggctgagcaagtcggcggcgacggccacttgcatgcctttctctttccatgcggcgaccttggcgcggttgtcgacaatctcaccgaattggttggggcattggatcaggatgccaaaatattcctcgctgcagtcgaacttgtcgatgtcgtcgatcacgacctcgatgccttggaagtgggcacgggtcttgatgacttcgatgctctgcgggaacacatcgttggcgacgaagaacttctttacgccggccttcacctgggcacggctgcgtgagtgccagaacatcagcatggcctcggcggcggcggtgccttcgtcgagcaggctggcgttggccaacggcagggcggtgaggtcgctgatgacggtctggtagttcacgagggcttcgagacggccttgcgaaatctcagcttggtagggggtataagaggtgtaccagcccgggttctcaaggatgttgcgcatgatgacgccaggggtgatggtgttgtagtagcccaagccgatgtagctgcggaactgcttgttcttggcacccaaggccttgaggtggctgatgacttcgtattcgctcatgccctcgccgatgttgaggtctttcggcagacggatttcgggagcgatgatttcgtcgacaagttgttcttgcgatttcacgccgatgaccttgagcatcttttcagcatccgatgcggtggggccgttgtggcgtttgatgaagttgtttctaatcattgttgaattgtttattgttgaaatgtttaattgttgtatttcttttttttgctatcagctatcagccttcagcagtcagcattgtgctgatagctgacggcttacagctgacggctcattctatctcacgtagtttgttcttcaagtcgttgacggtgttgatactttccagttcgctggccggtaccttgcgcagtttggtagaccattccttgaaatgcggggtgtctttcaagacttcgaaccttagatagtcgtattcttcgcctgaagccgtggctttattctctttgtaaagcaggtcatagggatccatctggatggtccgctggtggacgaggttccagaagtctttcttgaattgcgcactcggatcgtcagcggcgggctgcggctcttctggctgtgtcgtctcctctggctttacaacgggttgtttttcctcctctacttctttttctttaggttgtacggcggagatagtgtcgttttgagccacggtatccgtggtgaccacttccgtcttcgggtcgttggtgggttttggtttggggtccttgaaaacgctcaaggccaaaaacacgacgacggccacgacggcgacgatgcctacggccaacaaaaccttccaaaggtttgacttaagcatgtcgttgaaaggctccttttcgtattcggcgatcagcatgccgtcatagatctggttgctggcgtcggggtcgaagcggaatcctttgaaaatatagcccttgggagggatgatgtactctttgacgtcgcgcccgtcctcatagatggagtaggggcaaccgtccatcttcttgccctttccagggtcaatgctgaaacgcctttccttgaaaaaatccatttccttttgctttcagaaggttagttcagcactttgttcatcgtgatgtagtcgggataggcaagctgttggttgttgacgctaatgtatggcttcaccttgagtcccacgttgacaggctcgctgctggcaccggccaatttgaaggccaggttgacgatggcatcggccgattcgccactgaacagctggaacaagtcggtggtgatgggaatcgtcacgacactgcttgagttggcaggcacgctgacactgttgttcatcgtcgtgctgaccacctgcttgccgttaagactcaatatgtagtccatcttgctcatcgaagcggcaatactgttggggttcttcacgttgaggttgacattgaaggtcaccggcagctgcctgttggaaatggcgttggccaacgagagaagctgcatggcgttgaggtcgttcttcgacatgcctttgctcaagttgactcccagcatctggatctggttgacgctgttgaagtcaaaggtgcagttggcaaaattggccatttgggcgatttgggtcaggacatcacaagaggccaatcccatcgtgacgaaaaggataatgagggttttcttaaactttgacatattctaaatattttattatcaattaattaaaaagaaaaataccatgtaaggcaaggcaatagcctttactcgttttcaaagttgcaataatacaaaaaaagtcggacataatgcccgacttttaggaattatttttcaagggtcattcctcgccacggcgtgaggcgcgtttgcgctccagctcgtcgaggatgatcttgcgcagacgcaggctcttgggcgtgacctcaagatattcgtcatcgcggatgtattccatatattcctccaatgagaaacgcacaggcgggatgaggcggatggcctcgtcgctacccgatgcacgcacgttggtgaggtgcttggtcttgcacacattgatgacgatgtcgttgctgcgggtgttctcgccgatgacctcgccggcatagacgtcctcgttcgggttgacgaagaaggtgccacggtcctgcagcttccaaatggcgtaggggatggcttgtcccgtctccatcgagatcaaggcgccgacgttgcgtgacggcatctcgcccttccaaggctcgtagtccttgaagcggtgcgagacgatggcctcaccctcggtgacggtcagcaggatgttcctcaatccgatgagaccgcgcgacgggatgtcgaaatcgaggcacatgcggtcgcccttgggttccatctgggtcatctcacccttacgggcgctgacctgctcgatgacacggccggcaaagtcctcgggtaccaggacggtgagggcctcgataggttcgcacttcacgtcgtcgatgtatttgatgatgactttcggctggccaagttgcagttcatagccctcgcggcgcatggtctcgatgaggatgctgaggtgcaggatgccacggccatagaccatcagcgcgtcgggcgaatcggtgtcttccaccttcaaggcgaggttcttctcggtctccttgtaaaggcgttcgcgcaggtggcgcgaggtgacgtatttgccttccttgccgaagaaaggtgagttgttgatggtgaacagcatgctcatcgtcggctcgtccacgtggatgggcggcagcggctcgggattctcgtagtcggccacagtgtcgccaatctcgaagtcgtcgatacccatcagcgcgatgatgtcgccagcctcgacgggcttcttggtgcgttccttgcccagaccttcaaaggtgtagagctccttgatggtcgacttggtcacggagccgtcacgtttcaccagcgagacgttctgtccggcctgcaaggtgccgcgtttcagacggcccacggcgatacgtcccacgtaggagctgtagtccagcgaggtaatcagcatttgcggtgtgccttcctcgtatttcgcgggcgggatggtgtcgatgatgacgtccaagaggtaggagacgttgtcggtgacgttgttccagtcgtccgacatccagccttgctttgacgaaccataaacggtggggaagtccagctggtcttcggtcgcgccgaggttgaacatcaggtcgaagacggcctcttgcacctcgtccgggcgacagttgggcttgtcaactttgttgatgaccacgatgggcttcaaacctaattcgatggccttttgcagcacgaagcgggtctgcggcatggggccttcgaaagcgtcgacgagcagcagcacaccgtcagccatgttcaggacacgctccacctcgccaccgaagtcggcgtggccaggagtgtcgatgatattgattttgacgtctttatagcgaactgacacatttttcgaaaggatggtgatgccgcgttcgcgttcgaggtcgttgttgtcgagaatgagttggccaggggcttcgtccgattccttgaacagttgggattggtaaagaatacggtccacgagggtggttttgccgtggtcaacgtgagcgataattgctatatttctgatattctgcattttagtaaaaattgctgcgatatttgaaggtgcaaaaatacaaaaaatcaaaaatacagaatatagaaaaactctagtgcttggatttttctgcccaatcttcaatctgaaggtttgggatatggctgaaatgtttgatgtttgaggttactgtaacgcaattgttgtaaacagcgcaggcgcctatcagcaaatcaaattcatcaatcctatttccttgattttcaagcaaggccttgatagttccatatactctaagtgaaggaaaaattggcaataattcaaatgattggagaatgaaaccaatatcttggaattgcttaggattgttagacttcgcagcaccataaaacagttctgcaatggttatctcggtgataaaacaattctcttgtccaacctcattaattttttcaagcactttatgattgtgtttgaaaagttcaatgcaagtatcagtatcaagaatgtattttgacataatgcttaccagttttcaacgcttctgccaaagtattcgttattccttaaagcagtagcatcaatatcactccaatctccactaaaacaagtgtttaagtcgggccttttggaaacctctgacttctctttcattgaggcggatagcttggcaatcaagtcaagtttgtcatctggactcaatgaagccagaatcagcatatacaaatcggtgatacttgtggtttcgaacataatcagaccattttattttggttacagatgcaaaagtaattatttttttcaatttaattatgttttcgataaaaactacacaaatctttctattttgttgtctcttatttcatccaataaaactcttctttcgccacaatcggcttaaaatattcatcgataaccccttgctctaccaattctttcggcgtgccttggcgcaaaggctgctgcggcgcgacgacccacatcacatcggcatggcggagcaacaaatctaggtcgtggctgctgaagaggatggttttctttttctcgcgcgagagcttgtgcatgatgttgaccaactcaatcttgctcggatagtcgaggaaggcggcgggctcgtccatgaagatgaggggcgtgtcctgcaccaaggccttggcaatcattactttctgttgctcgccgtcgctcaaggaaacgaagttccggttgactagatggctgatgccgacggtttcgaggctgtcgtagatgatttgctcgtcttcggctttcagtttggccaagaggccgagatgggggtaacgaccggcggccacgatgtcgaagactttcaggaagaggtcgtcgggcttttcggtgagcacgaggctgaagagcgagctgcgctcggtgggggagtagtcgcgcaagtctttcccaaacaacttgacctcgccgccgacgggtttgaggctggccgacagcgtcttgaacagcgttgtcttgcccgagccgttaggacccgccaaggccacgatgtcgccttcgttgaggctcacgtcgatggcgggcatcagcgcttggcctttgtagccgattaacagttgatatgtatgaaggacttcgctcatggacaaggattgtttattaactacagatttgacagattaaaccgatttgagtccggaaattggtgggatgcaagcatccgatgattacagatggccaggagtagaagagaatctgtgccatttggacgcttgcgtccttataattatgtggcgtcattctgtacaatctgtataatctgtagtttaatatcattggagagggagagaatctgtgtcatttggacgcttgcgtccttgaaattatgtggcgacattctgtacaatctgtataatctgtagttaaatatcttcattgtatatgattgactttttgccggtgaaagatgacccaaagcacgatgggcgcgccaatcagtgccgtgaccgagttgatgggcaggttgccttcgaaggagggcaggcgtgcgatgaggttgcagaacagggccaggtccatgccgaggaaggccgtggccgggatgagcaacttgtggtcgctgctgcggaacaggaatcgggcgatgtgtggcacggccaagcccaagaaggcaatgggaccacaaaacgccgtgatgagggcggtgaggaagcccgaagccaggatgatgagcatactgctgcgacggatgttgacgccgaggttctcggcataacgctcgccgagcagcaagaggttcaaggtcttgaagagcaggaacgagcctatggtgccgaccgccaccgcgatggcgaagaagggcagttgtgccttgctcacgttggagaagctacccaggccccagatgacgaaggagtgcaagccttccttctggctgaagaacttcaggatgtcggtgaccgagccggcgatgtaggcgatcatgatgcccaccagcaccaggctgaccatgctgcggagcctcgaactaagggcgaggatgagcagcagcaccgcgaaggcgcccaggaaggccgctatggtgacgccgaaggtcgaccacagcgacagcgtgctgaccgacaggccagtagcggtgcccagcaagacgacgaaggccacgccgaggctcgcgccgctgctgatgcccaacagcgaagggtcggcaagggggttacggaagagggtctgcatcaggaggcccgacacagataggccgatgcccgccagcagcgccgtgatggcttgtggcaggcggtagtcgaggatgatggcgcggtaggtcgacgtgtcgccatgcagcagcgcgtcccagaattcattccacggaatcgacaccgagccatagcgcaggttcaggacgaacagcacgatgccgacggccaggatcgcgatggagaccagtgcgatggatggcgttttgtggcggagggtattatcggtgtcggatgccattatggggtcgttttgcgttgcaaagatagggtttaatttgattgggataggatatgggaaataaataatccgcaaatcttgcggttagttatccgcagattttgcggattattggccgcaaaggttatgtgtttccagaaagcaaactatttcctatatcgttttagtgcctttgtcaactcgtcatgaatggttttgcgcaacgattttggctctatgacctccaattcgttgccttctttgaggatggtttggatgaaatcatgggtgggggccacatggtactcaaagagagcgctttgtttttcggtggctatctctttttgggagtggtgcaagggcaaggtgcgcaggtagttgtccatgggtgagtaggcgcgtagcacgatgcgtcctgctttgacgttttggtcagggatgactccgaaataatcatggaaaaaggtctctgcgtcaaatgtcggatccattttgaagcagtggtcggtttcggtgagttccgtcatgcggtcgagggcgaagactccgagcttgcccttttttctttcggttttgccgagcaggtaccagcgttggtggaagagtttcaggcagtagggttcgatgagggtggagtagggctctgaatcgctgaatttcttgtatcccattcgtaaggtgtgatggtctttgatggcgttgataacggtttgtaggtgttccaacccggcggggatgtcctccaacaggagttggtccttgatggagaggccgtcgaggaggatattgttgacggtgagggtgcggagcatccagttttgtgtggagttgtcgcggagtgcttcggggttggctatatagtattggtgttggttgtcgcattcgatgcagatgccgaacatgtcgtcgatggcttggcggatgcggtagaaggtggtgcgggagaggggacggctttcgtttaggtcgttggagagccaaagttggcagatgtgttcgaaatcgatcttttcggcacgtagtatggtgttcactagccaggtgaattgtctaaatgtgttcgagcttttcattaggaaaatgatttttgtgcaaaaatagtaaaaaaacatcaccgtttcatgttttgaaacagatgtgctgtatttttggcgcgattatagaatttaagaaatgaacagcgataagatttgggcaaaaaaagacgaggcgaccgaaatcgccccgaacttgatgttttcacaacggaataatccttattgtgaattgctgcatatcttgtgctgcaaaaatagatattttttcaataccgcaagacttttttgaaaaaaatagtaattttgacgaaatttttttggattttgaatattgttaacaaaacgaacttgaaaagatgaagaaaatactaggactagatttaggaacaaacagcattggctgggctgtggtgaatgaagccgaaaatcagactgagaattcttctattattaaactaggtgttagggttaatcctttgactgttgacgaattgttgaattttgagaaaggaaagagcattacgactaatgcagatagaaccctaaagcgtagtatgcgtcgaaatcttcaacgctataaacttcgtcgttcccatctgattgaagtgttgaaagaacggggctttattgatgatagtactttgttgtcggaaaacggcaattggacgacctttgaaacctgccgtcttcgtgctaaagccgcgacggaagaaatctcattaacggagttggcacgcgttcttttgatgataaacaagaaaagaggatacaaaagtagtcgtaaggccaagtcgactgaagaaggcaagttgatagacggtatggaaattgccaaaaagttgtacgatgagatcctaactccaggccaactatcattacaacttcttcaagatggaaagcgccatttgccagatttctatcggtctgatttgcaaatagaatttgatagaatatggcaacagcagaagatttattatcctgagttgctcacagatcaattaaaagaagaattaaaaggtaggaacaaaacacaaacatgggcgatatgcgctaaaccattccaaattgttggtgtaaaaagttcaaagaaaggccaagaactccgaaaagagaattatcgtttgagggtggaagcccttacaaaaaagctgggtttggaggaattggccattgttcttcaagaagtcaatggacagatcagtaacgccagcggttatctaggagatatcagtgatcgaagcaaagctttgtattttaatcatcaaactgttggccaataccaaatggcccaattggagaataacccacattatagcttgaagaaccaagtgttctatcggcaagattatctcaatgaatttgagacaatttgggagacgcaagcaaaattccatacggaattgaccactgaactgaaaaaagaaatacgtgatattgtcatcttctatggagattgatggcaaaaagaaggccaagaccataggtttgcgtgtgtgccctaaatcttcaccattgttccaagaattcaagatttggcaggttttgaataatgttcaagtgtggggaaaaacaacaccaaagcgtttcttattccaagaagagaaagaaaaactatttgccgaactcaattattgcgagaaactctcaaaggcagaagctttgaaattattatttggcaatcaaaaggattacgatcttaattataaagatttggaaggcaatcagacacaagcaggtctgttggaagcctacaagactatcgttgaaatgatcggtcatgatgagtttgatttttcaaaactgtcatcggcaaaaaccatcgaaaaggttgacgaagtgttttctggattgggaatcaatacgggaatattatactttgattctggtcttgaaggacatgccttagagcagcagcctatgttcaaattatggcatttgttgtactcatttgaaggggataagtcagaactagggaatgcaaatctcattcaaaaacttcatgagcagttcggatttgataaagagtcagctactgttctggctggagtggttttctctgacgattatggcaatttaagcagtaaggctatccgtaagattttacctcatttgaaggatgggttggaatatagtgtggcatgtgaatatgcaggttatcgccattcgaagagttcgctcactaaagaggaagtagaaaacaaggtaatgaaagacaagttggaattgttgcctcgcaatagcctgagaaatccagttgtggagaagattttgaaccaaatggtcaatgtggtgaattccatcattgatgaatatggtaaacctgatgaaatacgcattgaattggctcgtgaactgaaaaagtctgccaaggaacgcgaagaaatgaccaagtctatcaatgaaacaaccagactgcacgaagaatatgtaaagatattgcagggcgatcctttcaaattggagcatgtgagccgcaatgacattataagatacaaactctatgaggaacttgaaatgaatggatataagaccttatattctaacacttacattcctcgtgagaaactgttcagcaaggaatttgacatcgaacatattatcccgcaagccaagttgtttgatgattcgttctcaaacaaaacgctcgaggtgcgccaggtcaatctcgataaaggtaatgccacggcaatggattttgtaaatgaacaatacggagcacaagttgcggaggagtatgtggctagaatagagaacctatatagcaaaaaggtcataagcaagacgaaacatgacaaacttttgatgaaagaagccgatattccgagtggtttcatcaatcgtgacttgcgcgattcacaatatattgcgaagaaagcccgcgagatattggaggagatagtgcgttttgttgtgcccaccacaggcagcattaccgatcgtttgcgtgaggattggcaattagttgatgtaatgcaggaactcaattgggacaaatacaaccaattgggacttacagaaatcattgaaggtcgtgacggccaacgaattcgccgaatcaaggattggacaaaacgtaatgaccatcgccatcatgccatggatgcactgacgattgcctttacaaaacgtagttttatccaatatctgaataatttgaatgcacgagtccaaaaaggagtagatgattattttgatttggatatggttgaattgtctttgttggacaaagaccagcgttcagcagcggtgtatggtattgaacgaaaagaattgcatcgtgatagccatggcaggcttcgattcaatgcacctatgcctttggaagagtttagggccgaagcgaaaagacaattggaagctattttggtttcaattaaagcgaaaaacaaggtggtgacacaaaatataaatgtttccaagaccaagaacggaagaaacaagaaagtacaactcacgccacgagggcagttgcatttggaaactgttttcggtagttgcaagagatatgttaccaaagaagaaaaggtgaatgcttcgtttgatgttgaaaaaatcaataccgtagcaaacaagcggtatcgagatgcacttctcgcgcgcttgcagcagtttgacggtgatgccaaaaaggcttttacaggaaagaattcattggataagaatcctatttggttggatgatttgcatacgattcaagttcccgaaaaggtgaggattgtgacttttgaaactatttatacgattcgtaaagacataacgccggatttgaagattgagaaagtggtcgatgttcatatccgtcggattcttcaagaacgactggccacttttggtggagatgccaagaaagctttctctaatctggatgaaaatcccatttggcttaataaagaaaaaggcattgccattaagcgtgtgaccattacgggcattagcaatgcggaatcgcttcacgacaagcgagacaaggaaggtcaattggtcttggatgaaaaaggcagcacgcaacccgttgactttgtgaatacgggcaataaccatcatgtagccgtttaccgtaaacctaaattggataagaatggacagcatttgttggatgaaaatggtgaactgcaatatgaattggatgaaagaatcgtgtcgttttatgaggcaacatcacgggccatgttgggattgcctattgttgataaggaatacaagaaagaggaaggctggcaattcatgtttaccatgaagcagaatgagtattttgtatttcctcgttatgacgcgcagggcattatggtcttcaatccattagattatgatgaggcttggtataagaatgctgataattatgcaacaataagtccgaatttgtttagagtgcagaagttctcgtttaagaattatgtgtttagacatcatttggaaaccacgattgataacagcgggtatagtcttagaggaatcacatggattgattttagaagttcaaaaggacttgacttgattatgaaagttagggttaatcacattggccaaattgtttcggtcggagagtattgaacaaagaattgcgtttatgctaacataaaaatgatctaatgcaaagatggtctgttcgtttgtaataaaggtgattatagtttgtatttgacaatgataaagcgcaccctcttcttcggaaatcccgcctacctctccatgcgcaatgcacaattggtcatcaaactgaacgatgcccaaacgcaagaagaggtaacgaagaccgttcctatcgaagacattggcgtggcggtgcttgaagaccgtcaaatcaccatcaccaacggggcgatggatgccttgctgcaaaacaattgtgccgtcgtcacctgtgatgagaagcatatgccggctggactgttgttgcccttggaagggcatacggtgcagagcgaacgcttccgttggcaaattgaggcttcattgccattgaagaaacaactttggcagcagactgtccaagccaaaatccgtaaccaagcttctgtactgaaacggttgagtggggcagaggtgggctgtatgatggcttgggctgccgatgtgaagagtggcgacagcgaaaacttggaaggtcgggcggctgcctattattggaagtctgttttccctgaaatggagcgctttgtccgcgaccgcgagggcgaggctcccaacaaccttttgaactatggctatgccattgttagggctgtgattgcccgatcgttggtggccagtggtttgttgcctacctttggcatccatcatcacaatcgctacaacgcctattgcttggcggatgacgtgatggagccctatcggccgtatgttgacgagttagtgatagatattttgcgtagtggcgttgattgtagcgaactgactacagacttgaagcgacaattgttggggctacctgtaaaagaagttgtcattgacggtcgccgtagtccgttgatggtggcggcatcgcaaaccacagcctctttagcgaaatgttttggcggtgaattacggaaagtggtatatccgatgatggaattgtaatggaccgatttagcgaatatcgtattatgtgggtgctggtgctttttgatttgcctaccgagacaaaaaaggagcgcaaggcttatgccacctttcgaaagcgcatcatggccgacggctttacgatgttccagttctccatttatctgcggcattgtcccagctatgagaacgcagaagtgcatatcaagcgggtaaaatcattcatgcctgagtttggcgatattggcatcttgtgtattaccgacaaacaatttggtgacatggagattttcagcaactgcaagccgaagacggtagacacgccttgccagcaattggaactattttgaatcgggaaaaatagtcataacaaagaaaaatccaactcaaatgagctggatttttcttttctgaaacaacttctaaattgttgtggctctttgctttacacatatcgtgttgtttcaaagagcaaagatacaagataaatgcaagcaattcacaactatacaatctagatttaattttgttatatagttgtttcaaagagcaaagatacaagataaatgcaagcaattcacaactcggcgttagcaagccattatcgtgcgcaagttgtttcaaagagcaaagatacaagataaatgcaagcaattcacaactattgttctgttgttgcggttgctgcgtttgttgtttcaaagagcaaagatacaagataaatgcaagcaattcacaactgtaggcttgtgtggctgctttgtgtgtcgttgtttcaaagagcaaagatacaagataaatgcaagcaattcacaactgtctaggtctgtttgtgcgatgtcatacgttgtttcaaagagcaaagatacaagataaatgcaagcaattcacaactacggtattatgcagtttcttaaaggtaagttgtttcaaagagcaaagatacaagataaatgcaagcaattcacaacttgcatgttctttgacgtatggattccgtgttgtttcaaagagcaaagatacaagataaatgcaagcaattcacaactatgccgatgttgcatttgatagcgatatggttgtttcaaagagcaaagatacaagataaatgcaagcaattcacaactctgccggatctggtcttctaggatctcttgttgtttcaaagagcaaagatacaagataaatgcaagcaattcacaactggta

SEQ ID NO: 2402 - DNA, 15262 bp, synthetic construct
  source 1..15262: mol_type = other DNA
  misc_feature 1..15262: note = Synthetic
cggacctctccagctggagccccgccagttctgaaatctccgccggcgggacagccggtgcgtactgggccgctgaaattgcctcctccggggtggccagccgccgcccgcagatgctttatatgctcgccggggattcttcttcgtgcagaatcagtttcggggattccgcttcatcggagagcataaccatctcacccacacgctcctgcaacgtgttcagcacccctgccggactggcggttcgccccatttatctgtccaccacccagccggagccgcaaccggagccggaacccgagcccgagccctctggcaacggattcccggcaatctgggaaatcacttcttccacctacgggaccgaaagcagccccacagcggcgggaagacaatggctggaaaagggcattgcagtagccaccaacaattcatccacttccggcgtcgcatacatagctacgagcagcccccggggcgcttcagcgctcacgcatacgttcagttcgaacggatgccccgctgtcggaggcctcgacgagggcgactgcatagagttctgctcccccgtcgagaatctccctgccggaacagatttcgaccttatgctcaccgtgaacgccaacaacaaggcactgccaaaatactggctgctggagtactgggagaacggcggttggaaggcgggagacgctccctacaccgccgtcgaagacccatcggtcaggtattcctgcaccatcctgcggccttccacatcgtgctaccgcaccctggtgctaagtttcacgctgggtgaagcggtcggcaagggattcgtgcgggcccgccttcgcgccgtcggaaagatcaacggaaacggcgccagactcactccttcctcaggcgcgttgctgtactttgccccaatgacctacgtggcagcccgcttcatctgctacgcgggggcccctgcagtccgggacacgaagaaaatcctggtgctcggcaactctttcacctactactatggctccgcattcatgctgaaggagcttgcccgccgggaaggccaccagctggaaatgaggataagcctgaagggctcgaaccatttctacaaccacctctacgacatcgattattccaaggaggccgtggctgaaggcggtttcgactatgcgatgctgcaggacggcacctatttcgccgccgaatatgcatacggagatgcttccgtcatttccggcggtgctgcatacactcctgagcaggtgctgcagtacaccaaggagatggacgcctcgatccgggcatcttcgccgaatgcgcagataatgtatgaaatctgcaaaacgtcgcccaccaagaccggagacttcagcggattcggcagttacgacgccttcgacgaataccagcggagcggcgcctttgcactcgccggggccgatcccaacatcaactggatcaaccccgtgggggtggcggccaggaacgcccgcgccaattatggtttcacctccggctacaactacctcaactacaccgacaattcccatcccacccgcgagtgccagtacctcaaggcctgcaccacgtacctcattatgttcggcgaagacttcggctcctgtccggccgaatgcgggattgcctcgtcagacgctgcaaaattgcgccaggcagcaaaggacatcgccctgaccgacagaacaagctacaaaatcagataatatatcgccatgaagaaaaaaacaccatcctacaaatccccgcagatatgcgtggaacagctttgcagcgacgatctgctttgccaggcaagcggcgcctccttcaatgagccgcaggaactcgacaactttaactggtcttaattcgatgattatgaaaaagtttgtcaagcttaccctcatagctgccgccgcagttgccgccgcagcctgcaataaggaagccggaatcgaaactcctgccggcaccaacgtgattgtcttcaccgctaccctcgaacagcccaccaaggcagacctgacccagtacgacgtggtctggagcgcaggagaccagattgccgtcagcaacggctccacctgggccgtatccaccgccctgaccgacgccgacatcgccgaaggaggccgcagcgccagcttcagcgttgccatcgatccggcagcttcctacaccgccgtgtatcctgcaagcgcaaaatccgacgccgcccttcccgacggcgcccctgcagatgccataatgctgaaccttccagccgcccaggtgattcccgccggcaagaagatagatcccgcggcactcgtgcagatcgcaaccacggatgaaccgaccaaacttgcattcaagaatgccacttccttgctggaaatcaccattcccgaagacggcatcgaagccgtgactttcgaattcatgaacgcggcgggctccaaactcaaggtcgccggagacgcacccgtggtgcccgttcctgcggctaccagcggcaaggaatccagcgtgaccatttccggatccttcgctgccggggaggtttattatgctaccgccctgccgcagacgggagtcaagagcgtcaacctcatattctccaagtccggcacggactgcaaggtccttgcgagccgcaccggcacgggagctgcagagttcgagctgcctgtgaacggaggttggaaggtgcgtaacttcggcactctcagctggttcgacggcaccatctccaccaaggccgaccttgacctctgggcccggcttgccccctactacagcaaggacgacgtcataaaactggctgccagcatcgactacgaaggcggctcctggacccccgtcagggcaaatgccaagagcggccagttcggcggagtcttcgacggacagggcaactgtatctacaacatcataatcgatccgaccgaggaatacagcggattcttctccaccctggcttcggtcgaccctatggaaagggtacgcgacgtctgcttcggcaagaatcctttcaccggcgagtacgacggggtgagcaagctgaacgcggcttctgacgtggtcaagaggctgggcgtcgtggccggatatatctccaactgcgatgtgatcagggtggacaactacatccccgtcacagatgccaccacggccaatgacgtgctgctcggctccatcaccggccgcacgggcagccttgtgaatatcatagggtgcaacaactacggcactgtggagtgcgtatccaccacccagacggcacactacatcggcggcctcgtcggcgttctcgacggagaaggcagcacgatcgacaaatgcgtcaattatggcgttgtccggaagacaaagtccgccaacggaaagggcaacaccttcatcggaggcatagtgagccgtaccggttccggagtccacggactcacgatccgcggctgcgtcaacaacggcaagctgggcaacaccggaaatgtgcaggccaagcagatctacgtcggaggcatcctcggcatggacaacagttcagacagcgaaaccgtgcccaacatcaagatccttggctgcaccaatgaaaccgaggccatcgtggaatccagcagcctgtccaagtccaccaacggcgccgctttcggcggcatcatcggcaaggccagcggctattcggtaatcagcggctgctccaactacggcaccatcctgaaatccaacaaccacaacggcatcaccagcaaattcggcggcatcgccggcatggtcagcggcgagaaggtcctgatcgagggctgcgacaacggtaccgtgtacaacttcgactacggaaaggtgaccagcacagtcgagaccaagtcagacagttccactgagtactacggaggaattgccggaggattcgacgccggagtcatcaggggatgctccaactatgccaacatcaagacggaaagtaccgagaccggcatcgtggaaattgccggcggtatagcaggacaggtttcgggcggcacgcttgagggttgcgtgcaccagggcatggtgtccgtggccgcgccccattcgacctgcgcagccggcggaataatcggtatcatgaacaacgccgccgcatacgcatcaggtacaggctgcaaggcctccggaagcatcctgtgcggctatgcgggcaacaccggactcgtggtcggtctctatgacaacaccgccgcgtccagtgtgggcagttccgagtctcccgtgaccgtccgctcaagcacgatcaacggtaatccggttgattcatccaacttcggttccaagcttgcgggaagcgacgccggcattaccgcctccggcgttgcctccggcctcaacaccatctgggccgtattccaatagcagcagccgtgccgcccatttagctgtatatcagcacgttacaacttttgcctgcacgttccttcgtgcaggcatttgctttaatgtactaacattcaaacggttactcgccacgcattttacggtgccgacgcttcgtgattcttttggttccaatccataagaacttgtccaactgctcctggcttgcctgtgtgtatccatacagcgtttcagcaaggtcgcgcttctcctcgaggtgcagggatatcacccttttgcttctcacgggtagttccagcgcccttaaggtattagccatttgcgcatatatcttatcgtctccttttgttgtgatctcattaatctcatactcgcttccagtgttagaatgaatcgccatcagcatgttttcgaacccggaaaaatactcacttgcgccttcatagtcgatacagttgtaggcagtgatgatataatccgtcaattggttgcattctactttattcaggtctttcatcagtctgcccaacatggcataagacaacggaatgtcctgctttcttgacgcatcaacctcagcaagtgcccttctgaagactttacgggctgttttcctgtcaatgggcggtgaaaacgggttgggattgtttcgataggcaagaaagttccatctgtactcttccgcttttctgcatagtttcttctccaccggattattgtacaaataggcgattgctgtcctgattttctttccgccaatcttgattgcagagccaaatgacttgtcaaaaacctggccggtccttcctgcggacagattgaaggctcttgcatacctggatgatgactctctgatcaagccggtcaattgactgtgtctttgtatctctgccagatcatgaatatgatccggcatcaagcataacccgtacactttaacaggatacttcctcgagatggtacagaataacgtgaagtagacaagacaatccttcactgaataaaaaatcaaccctccagtacgcgttctttgatacgcatgttttacaatttttttcatagtcataagttttgctgtaaagctcgcattttttcaaataaaaagcaaatccattcgtacggcgcccaataattcgctatcctccaacgacttacgctttttgcctgcatgataaaacatgcaggcaaaatcagcaagttactgaaaataaaaatgttagcgggcaggaggaatgcggacgggggagacacacgacacacgacacacggcacaggtcccgcgacctgccggctttgatatttggaggtggatttgtatctttgaggttgtgatgaagaaaaagattctgttgctgctactgctgctggcggcgtgcaagccggaaataaagcccgggggcgatttcttcggcaccattgccgaagagagcatcgcatccggctgggagcaggatgccagaatttccgtattcgacggcaattccggcaattccgagtacatctatgagggcgaagcatccgccaggagcgggaagttcaccgcgaagaaactgaactccgacggcatcacgctgcctgggcgctacggggtttacccctatatgtcctcgaccatagtgaccaactccgggctgatgtatgtcgaactgccgcaggtgcaggaaggcgctccgggaaagcccggccgcggaagcgcggtgatggtcgccagcagcagcgacaacaacctggaattcaaagacatatgcggagcgctagtgctccgtttcaccggcggcgaggagacgatatcccgggtgacgataagcggcctcggcaatgaagtcctgaccgggaaaggaacggtgagcatagatgccgacggcatcccgtcgccaaaattcacctccggcggcagcaccgtcagcttcaaatgcaccaacatcgtagaaatcggcgccggcaaggaaatatggttcatggtgccacccgtgacattcagcaacggcctgagcgtgaaggtggagaacggttacggaaaggaatgcgacctctccataagcactcccgtcagcgtggcccggggcgaaatcaaacatatcacggccggcgaggtgaaatactcctcccctgataaggcaaccgtgggcgagcccctgcccctctggcaggaaggctggctggacatccactccatcaacggcgggcgcggggaatcgttctactacatattcccggacggcacgaccatgctcgtggatgcggccggcggcaacgatttcgaaatcgaaggccccgacggatccggcatcttttcgcggccatcgcagcagtattccagcggcaacgtcatcgtacgctaccttggccgcttcgccccggaaatcgccggcggcaagatagactacatgatggtttcccactaccactccgaccacatgggcggctacaccagcggtttcgccaaatacggctggcgcgtagtggaccgcaacggcaccatcaccccggccatcaacctcgatgccggcggcttcctgctcaacggcctgccggaagtcggaatgtcctgtcccatcgtcaagctcatcgaccgcggcgactgggacaaccgtgcctcctcagcgtgggagagcggcaaaggcaggcgtcagaattactacaacttcatcgactggaccacccgggtcaacggcaccgtgcgcgagaaactggccatagggcacaccgaccagatagtgctgaagcacgacgcggcggcatatcccaagttcacggtgcgcggcatcgctgccggcggcgacgtctggaccggcactgggaccaacgtcaacaccacctacgtgccatccgcagccgaatgcctcgcaaatctcagcacatacgacatcaacgagaacatcttctcctgcgtgttcaccctcagctacggcaagttcgactggttcgcgggcggcgacatccagtacaacgactacaccaaatacagctggaaggacatcgagaagccgatttccaaggtcgtcggcaaggtggaggcgatgaaggccaaccaccattgcaccaacaacaccaacagcacggccctggtctcagcgctgaagcccgacaacctgatagtaggcgtgtggacccagaaccacccgacagaagccactttgaaacgcttcttcacggccagtcctgacctgcgtgtgttcacgaccaacatgtcggagaatctcaagaccacgctcaaatacgccggctactacccctcgcgcttcgacgccacaggcggccacatcgtgctccgggtgcagcccgggggcgattcctactggatctacgtgctggacgactccgatttcgaataccgtgtggcgtctatccacgggcccttcgaatgcaagtgaggtcttgcgcatttcgcgaaagaaaactatctttgaaagatattaacgctcaaagaccatgaagaagaatagaaccgctacaatcataggcctcacagtggcggccttagtggtgctgatcatcagctgcaccaagatggtggacaactccgaaatcggcatcaagttcaagaagttctccctgaccgaccagggccagctcatcgccacggaggtgacgggtctgatattctacaaccccatcacgacccgcgtcttcacctatcccgtttacatccagagagttgactaccagccctttaccgtcaccacaaaagacgcggccgaattcaccatggaccctatgctcgcctaccagctggagcgtgacaaggcatcctacgtgttcaacaaataccgccgcgacctgagggagatcgaaaacggctacatgcgcacctgcatctacgacgcctaccgcatcagcgccaacaactacacctccgacgaactgatggccaaccgcgccaagttcgagcaggaggtgcgccagatgctgatccactcgctcggctccgagggcttcaacgtgcaggaattcacctcccgcatcacccctcccaagtcgctgagcgccgccatcgaagccaagaaccaggctatccaggaggccctcaaggccgaaaacctcgtcaagcaggcggaggccaatgcccagatagccatcgcgaaggcgaagggtgaggccgaggccaccaaggtcaaggccgacgccgaagcctactacaaccgcaccatctccgcctccctgagcaccctcatcgtgcaggaagactggatcgagaaatgggacggcaagctccccgaggtcatgagccagggcaacggcctgatgatgaacctccccgccctgaacaaataatatgcgccgttttctgctcacgctgctcgccttagcgacctgcgtcgttaccgttcaggcccaggacaggcccgaccgccaggaactcagcgtcccgggcggttcgacgatgatcctgctgggggacccacagggctacgagaaatacgacatcaaccagggcatcttcgaaatctgcaccgcatggatacgcgacaacgtggagcatctcggcatcaaggcagtgctctgcaccggcgaccttgtggagcagaacgacaacaacgccctggaccgccgtatgctgaaccagacctcccgccagatgtgggagtcggtgtcccgggctttcgaacggcttgacggggtggtgccctacatcacggccccaggcaaccacgactacggcttcaaggcatccgaagacacacatactttcttccccgactatttcaccgccgaacgtcaggggcgcgtcctgctcgaccgcctcgtcagcgagcacccgaaccgcgaaggccgggcttccattgaaaacagcgcaacccgctacgaacttcccggatgggagcataagatactggtaatcagcgctgagttctcgccttctgatgccgtgctcgcctgggcgaagaagctctgcgagaaatacccggacgactacgtgatctttatcacccactcctatatgaagtgcgccggccgctgcggaaatgcccgctactccaagccggagaagtatcctctctgccaggatccgtccaacaactacggccagcagatatgggacaaactcgtcaatgaggtgcccaacctaaggctggtgctctgcggacaccacggccacagcgacttccgcaaaacgcacgtggacgactatgcagccaatatgggctggcgggtggataagaacaaggccggcaagaacgtggggcagctgatggtcaacgtgcagactctcggcggcggatgggaaggcaacggaggagacggctggctccgcattctggagttcctgcccgacggcaggactatgcgcgtccgcacctactctcccctcttcggcatctcccccctgacccgccacctctcgcacctgaccgacgaattgaaccagtttgactttatcttcgaataaaccagctgcacggctctgtcagaacgaccggtatttctgataattgggaccaatttagctgattttgttcccgaaactgccgcttcaaggaaaacggtatagtcccgcctataaagaaagagcgagtccgcagacccgcccttaatgttttcacaacggaataatccttattgtgaatggcttcgtttttgttccacaaatatatgtatttatttttatactgcaaattattatctttgttgtcagcataattaatactatatgaaaaagattttggggctcgaccttggcaccgcaagtatcggttgggcaatggtcaccgaagcagaaaatgaaagagaaaaagccgctattcttggatgcggatccagggtaatacctatcagtgccgaagagaaggacagttttgagaaggggaaagcaataaccaccaatgctgaccgcacacttaaacgcggaatgcggcgaaatctggaaaggaagaagcaaagacgggacaaccttcgtgatctcctgacgcaagaaaactggatctgcgaaggagacgcactatcggaaaatgggtcgggaagcacttatgacactctccgactcagggcgagtgcggcagagaaagaaatatccttaagtgagttagccagggtattgctgtccatcaacaagaaaaggggatacaagagttccagaaagacagactccggagaggatggccagttgattgacggaatgggaatagcaaaggacctcgccatcagcggcaagactcccgcagaatatgcccttgctgcttcaaaggacggcaagttggcaagattggatttctatcgatctgatcttgagaatgaatacaataagatttgggaagtgcaaaagtcttttttcccagaaatcttgacggaccagttcaaggcgcaactatccaggcagggtaaatcgggagcctcaaaagtgttttttgccaaatatggcatcaacactgcggacaacaaaggcaaggacaggaaagttatcggactcgagtggcgggtcaaagcactcacaaatagactcgacaaagaacagatggcatatgtgatatgtgatttgaggggtgagatccagaatacaagtggctatcttggtgagatcagcgaccgaagcaaggaattgttcttcaatggtgagaccgtaggtcagtatctctatcgcaacatctgcaacaactccggattcagcacaaaaaacaaagtcttctaccgccaggactatattgacgagttcaacaagatttgggaagtccagatgaagtttcatcctgaattgactgaggccatgcggcagcaaatcgcaaatagaatcatattttatcagcgccctttgaaatcacagaaaggactggtttctttttgcgagttcgaaagccgcccgataaaagtcttgattgacgggaaggaaaagacgcgcactactggcagcaaagttgcgccaaagtcatccccgatgttccaggagttcaaggtccttcagatacttaacaatttgattatcaaggacaggcgcacagacgaaaccagacggctcaccgacggagaaagacacttgctttcctttgccctatccgtgagggataagatgaaagcgaccgaggctcttaaatcgatacaactcgaccctcgcagatttgaactgaactataaagagctggaaggcaacacgactttgttcgccttgttctccaagttcatagaaattgtcaatttagcgacaggcggagactatgacttatccaaattgtcttacgacagcacactgtctctagttaaggatgttttcaataaaatcggagggaaaaccgatctcctctcgtttgattcaagcctgccaaaagaggcctacgagcagcaacctttattcaagctttggcatttactatactcatatgaaggggacaattcagtcacaggcacggcctcgctcataaggatcatctctgaactcacaggcctgaatgaagattattcaaaaatcattgccggaatctcgttcaaggacgattatgcgtcgctcagccataaagccatcaagaaaatcctactgttcttgaaacaaggtctcagatatgatgaagcctgtgcaaaagcaggttataaccattctcactctcagacaaaggaggaggttgataacaaaatcctgcaagacaccctactccaactgcctaagggtgcgctgcggaatcccgtagtggaaaaggtcatcaatcagatgataaatgttgtgaacgctgcggcacaggaatatggtaaaccggatgaaatccacatagagttggctcgagagcttaagtcaagcgccaaggaacgagagaaggcaacaagtgatatccaggcgaacaacaaacgcaatcaagatatcgagcaaatccttaaaacagaattcaatatccagaatgtaaggaaaaatgacatcctgcgatacaggctttatgaagagctaaagaacaatggattcaagacgctttattccaataaatatattccaaaaacggcattgttttcaaaggatatcgatatcgaacatataatacctcaggcattaatgtttgacgactctttctcaaacaagacgctggagtataaagacatcaatattgaaaaagggcgaaaaactgcaaatgactacgtaaaggataaatacggagatgagtattattcccagtactgccagagggtgaatgaccttatggaacggggcataatcagcaagacaaaaagaaagtaccttctgatgcccgaggctgatattccgtccggattcgtggaccgggacctcaggaactctcagtatattgccgtcaaggcgcgtgaaatacttgaggactacgtcggcgtcgtgcttcccaccacgggctccgtcacggcccgcctcagggaagaatggcagttggtcaacgtgctggaggaaatcaattttgacaagtatgacaagattgggaaaacatacaccgctgtcaactctgacggcagttccaaaaccagaataaaggactggacaaagcgctgcgaccacaggcaccacgcgatggatgccatcactattgcgttcacgaaacctcagcatattcagattctaaacaatctgcgggctaaatgcgacaatgatgacgagttccgcagattattggacagccagaccacagattcgggcagaaaacgcattttcacccctccgatgcctctcgaccatttgagggccgaagcccggcaacaccttgaagcggctttagtgtcgatcaaggcgaagaataaagtagtgacccggaatgtcaacaaaacaaggaaagcagacggcacaaacgccgctatagaactgacccccagaggtgccctgcataaggaacaggtctacggcaagcgccggatatatgaagtgttctacgcccccgtcaatgccaagatgactcttgatactattgatcaagtcgcatcgaagcgagtgaggggagcgttgctcgccaggttgaatgaattcggcggggattccaaaatggctttctccggcaagaattcattggaaaagaatccgatatacctggattctgcccacatcagcaaagttcaggataaggttaagtgcgtgcggttcaaggatgtatttagcattcgaaaagaattgtcgccggatttgagtttagacaaggttcttgataaaagagtccgcgcccgcatcgaagatcggataaaagaattcgacggtgatatcaaggcagcgcttgccaatctggacatcaatcctatctggttggacgacaacaagacaatccctatcaaaagggttactatcggagagaatttcgatttgtgtgcaatccgcaataaacgggataaagatggtaagtcactccttgatgcggcagggcagccgattccaaacgattacgttaatctgcgcaacaaccaccacgtagcgctttatattgatgctgacggtaatgtccaagaaagcgtagttcctctgtttgaagccctcaacagagtaagtatggggctccctgttgtcgacaagagcttccattccgatcttggctggaagttcctgttcagcttgaaagtcaatgagatgtttgttttccccgatgaagcaagtggctttaatcccaaggaaatcgatcttctcgacgaaaagaacgccgctgcaatcagcccgcatcttttcagggttcagaagcttagcaaaaaagattattggtttaggcaccatctggaaaccacaatcaataatgatgataaagaattacgggacataacttggaaaaggatccagactatccagcaaatggcaaatgcagtcaaggtccggatcaaccacatcggcaaaatagtggcagtcggagaatatgattaaacgtacgctgtattttggcaaccctgcctatctgtcaatcaggaacgcacagcttgtaatccgaaagcccgatgacggagatttgccgcctgacaatatgtccgcaataatcaagaccatcccggtggaagacatcggggtggtcattttggataataagcagatcaccatcactgcgtccgtcttttcctgcctgctggacaacaacgttgcagtgattacctgcgatgagaattcaatgcccgtcgggatgctgctccccctgcactccaacaccttgcaaagcgaacggttccaggatcaattggaagcatcgctcccgcttcgcaagcaattatggcagcaaaccgtggaagccaaaatcaggaatcaggcagccgttttgaaatatgtccatggttcagaccctcgcaatatgctcgcgtgggcgaatgacgtaaaaagcggagacagcgagaatatggaggcaagggctgcagcgtactattggaaaaacattttccccgagttggatttttttacacgggatcgttatggcgcggcaccaaacaatctgctcaactatggatatgccatcttaagagcagtcattgcccgttcgttggttggttcagggcttcttcccacattgggcatccaccaccataaccgatataatgcctactgtcttgcagatgacattatggagccatacaggccctttgtagaccaacttgtcgttgacattgtcaaggaagacccctgcccggctctcacgaaggatatcaagacaaagttattgagcattcctgtgctcgatgtcgtaatagacggccacaggagcccactgattattgcagcgacgaccacatcggcatcattgtacaagtgcttctgcggttcaagcagaaagattctatatccggagttatgacagacaggttaagtgagtatcgagttatgtgggtgcttgtgttcttcgacttgcctaccgacacgaaacgggagcgcaaagcagctgcaaaattccggaaggacttaatcggcgacggtttttctatggtaagcatccgataaacgacgtctatcagggctgcccaggagtggctacctttgcatcaaagactaagagccatgatgacaaaggaagaagtcgcccag

SEQ ID NO: 2403 - DNA, 15231 bp, synthetic construct
  misc_feature 1..15231: note = Synthetic
  source 1..15231: mol_type = other DNA
tggtattcaagcacatggctccgcagagcttttccgccgcagatcttgcatatgcccaggaccaccttcggataacatcgtttctgtacgggctgctcaggccgctggatgcgataagtccgtatcgtcttgaaggcggaatggagcctgcccccggcagcggaaaatcaatcttcaatcattggcagaagctccttacggaaaacttcatagccgaaatcaaagcaaacggcggaatacttgtcaatctggccagtgacgagatgaaaaagctctttgactggaaaaagattgagtctgaggtaagggtaatacatccggagtttctcgtaaaaggcaaaaacgacaagacaaaaacgatagtagtgtatgcaaagatatgcaggggcgaaatgaccagacacatcctgctgaaccgcattgaaaaccccgaagccctgaaagaattcagcaacggtggcttcacttttgccccggatctcagcacatgcagcaagtatgtctttgtcaaggagcaggaataggtgcgttgcccgtaatgattttaatattcagtgagcctgccgcaatcgttccactcgcctatcatctcccctttgcggctggcctcaatcaatttggcaagccggctgcaaaacagttcctcagacggcttcaccctttggatattgtcaatcctcaccctctgatagagcggatggaatgactttaaattcgcccacgccaagggattctccttgaatgcatcaagaatctccggaattatttcaaattcagcagaaagatccgggcatacatcacgtccgctgtccgtcatcaatccgagagcctcaaggcggcggcatctttccttgttcagctcagtccatgtgctttttttagagcgcctgctgaaacgctggagagccaccccgtcaacatttttcaccgtcgaatcaatccagccgaaacataaagcctcttccacggcgtcaagataccacaatgcatcagagggaggagttttaccgcgcttcacggcaagccagcattccgcttccttgtcatggttttcagagagccatctgcggaaatccgcacggcaatttatctggagtatattctcaggtatcatgatcttagtaatcatttaatcaaaaacgccttcgtgctcatctctgaagttcataataaaccatatccttcagctgcaccccatcctcaattatggcatggtcataattgtccctaaaaaagtcaggcacacgggaagaataggcaaatccgcatgccttgtaaaaaccgacagtggaaggcacctcgcctgtccctgccttcagcttatgcccgggatacatgtccgcaatcattccgaggacggctcttccgtatccttttctccggaatccctcaataatcgcaatgttctttatctccacatatccttcgccggactcatccacggcacatactcctatttcaagtcctccggcagaaaccgcatacaaggaacacgacggaagataccttcttaccatgctctcctgctcatccccgacaagaagcatatccatatatctctccttatcctcatggacacgcctcaatttaacgtccggtacataagcggtgcgctccaaacgcatgaaatgctctgtacggcattctccgtcaaacacctgcttcccggattcggaatgatgatacgtaaagccgcatttctcagcgactctgcttgacttccggttgccgtcataataccctatccataaggccgacagtccgaacacattgaagcttctggcaatcaaggcattgacagcctcctggatatatccgtttccccaatgtggcacccctatccaatagccgatttctccttcaccgtccacaatctcagcggaatgcgtcccgtccgcaaacatgattccgcagcttccgacaggctcaccagtctgcttcaggacaacggcataggtctccggagcagaaaaaacagtccgtatgatttccaggctttcttccacagaagtatgcggtggccagccggcagccggtccgacagccggatctttcgcatatttgaacaatatttcaacatcactttcacgccacggacgcagaagcaacctttcggtttccattacaatgctcatatgtgtacctccatttgctgcaaatttactatttttgtcctaacggacatatatacgcttgggcttcggcaaaacttacaagtaaactttgcttctgctcccagcttttagctatatttgcacttcgcacatatatatgctggcgtctcggcataatcaaagcaagctttgcttctgctctcaacttttgctatatttgttccgatttatatgccatcgctcccgatgactgccgacgggctgcagatgaaccacatccgctcactgccggcaccatgcaacaccgaataatgatgaggaagacaataactgcaatatgctgcatcatgtgcagcctgatgaacatcggcgcttatgcgcactccggatttgaactgcacaaggcggacttctatgctgttctcggatttgaagacaacgctaaagtgacggcatggatgcgtcagataagctcgaaaatgattgacggatacaaaggaacggagctcccgcaatatggaggaatggatttctacaactatctcaaagccgaatttcccggattcaaatgcaagcacaggctgctcttccattggggatataactcgcgaccatggaatgagggtctgcaggcaaaagcagatgccctgccatggggacgcaacccggacgaattgcaacggttcaagcaaacgatcgcggacgaacagcaaaggcgcaacagggaagccaatgcaatgacggaaaaactgttcggattcgcatcctcaggaaaagacgcctcctatgcaaacgccatgatttccattgtctatgacgtccatttgctcggagactatactccggacaacaaagacttcgacggcgtacaggacttctcttccgttgtcggtgacctgataaatgccatacgcaagattgacgaggcgcagggaaaagctcttgtaaaatccattcagacggcaagcaggcagcagctgcccgtgcagcagaaagcggacgccatgctggaaatcctgcgacgggaaatgccggagttcttgcagaaagcccagggaggctccctcaaaaggcgtttcgcaaagcaaggaatcatttttaaagacaatctccgatgaaaacttttgcagacagcatattcctccggaaaatgcgcatggccgcacctataagcgatgaaacggcctcaattcttgccggccatcttgaagaatgccattttcacaaaaaagaactcattttaagagagggcatattctgcagatatgtttggcttctggaaaaaggctttgtgagacattactgggtagtcaacggcgaggaggccacgacctctttctcaacggagggcacgccgatattcagcatggacgaaatgtattacgggaagcccagcgaagaatatgcccaggcaatggaacccgtgcgagcatggcgcataaaggtcggcgaactggaacagttccttagggacaatctggagttggccacatgggcacgcataattcaccagaacgaatacagacgcgtccacaagtctttcaaagagagacttactttgccggcacgggaacgctaccgcatattcaccgaagaatttccagaagtatgcagacgcgccaatctcggacacatagcatcgtaccttggaatcactctgcccacactaagccacatacgttcggaggaaagaatttaatgtgggacaacttttttctcatcggtaattccgaaatttgccgctcaaatcacaaaaaagcaaatggaaaacaatctgactgagaaaaaacagggccgcgaagcctggattgactggatgagaattgcggcctgcctcatggtattcatcgtacacagtaccgagccattctaccttggcggagacggtgccctcatacttacaaagacggatgcgttttgggcgtcattcttcgattcattcgtgcgtgcctgcgtaccgctgttcatcgtagcctccagctacctgcagttccctctgcactactccgccggagaatttttcaggaaaagggcagtgcgcatccttatcccgttcataatctggagccttgtatatgctttcgctttcggagagccggtgtccaatctcaaggacctgctcctgaacttcaactatgcggccggacatctgtggttcgtctatatgttgtgcggaatataccttctgatgccgctgctctctccgtgggctgaaaaagtcgggaaaagagagcttcaattctacttgggcatctggcttttcacgacactcatccctatcatacgcgactgggcctcacaatcgcccctcgccataacctatggcccgacaggcattccgagacaggcactgttccctctttggggagaggccagctggaacgcatacggcctgttctattatttcagcggcttcataggctacctgcttttaggattgtatttccgcaaattcgttggcatcatgtcatgggcaaggacactgtccatatccgtcccgtgttatctgcttggctttgcgatttccttcggcggtttcctccaccgggcatttgaaagcgctcaaggcatattcccggtcggaggcgctgtcgatatggccgtatggtgggaaaccacatggtgcaacgacacgatcggagtggctctgatgaccatagcatggctgctgattttccggaaagcgaacgctcacgggaccttttactcaaaagtcctgttgcctgtatcaaaagcaagctacggcatgtatttatgccacatgctgattcttgcccccatatgcggccttttccgcggttggctcgggtccggcagcgaaggcatgctcggattctggactactcccctcgagatactgctgtccgcatttacagctttcgcatgcgttgcagccatatcagtgcttctgcaaaggattcctaaaataggcaaatacataataggttaggataatgtggaaaatccggttatctttgcagcgctttggctgattttgccatcgcctcaaactaaccggaccgcaggcaatgcggccattttaacacaaaacaaacatgacaaacaacgtttatttggcatccaaaccgagatacgagattctggacggtctcagaggcgtagccgccgtactggtggtcctgtttcacgttttcgaggcctattctccaggccctgcaggccagatcatcaaccacggctatcttgcagtggacttcttcttcatgctttccggcttcgtcataggatatgcttatgatgaccgctggaacaaaatgagcacatggggattcttcaagagacgtcttgtacgcctgcatccgatggtggtcatgggcaccgtggtaggagcctgcctgtatttcttcggacagggagacggctttccgataatcggaaacatcccaggctggaaactgctcctggcctttgtcatgggatgcctgatgattccgtgcggtccgaagatggacatacgcggatggggcgagatgaactccttcaacggccctaactggtctctcacatgggaatatgcggcaaacattctttatgcccttgtccttagaaggcttcctaaggctatacttggagtcctgactgcagctgccgcattctgcacgcttgacctgtgcctgaattggaatgttttcggcctgcttacagaaggacgtgtcgcaagtgcatccgcctacaccgtgataggcggatggagcattacccccgaacagatgtatatcggattcacaaggctcgcatatcctttcctgagcggacttctcttgtcacgcatcggcaaatccatcacagtcaaaggcgcattctggtggtgctcactgattcttgccgccatattctcaattccgtgcataggaggcgaaggcaatgtcgctaacggcatctataatgccgcgtgcatcctggtcctcttccctgtcgttgtcgccatgggagcaggaagcaggatcaagggagaaaaaagcacaagaatctgcactttcctcggagaattgtcatatccgctctacatcacgcactaccctgtcatgtatgtacagatgaactgggcgtggtcacatccggatgctccggcctatgcccacatcacggtagcggcgggaagcatcatattgtcaataggcattgcatacgcctgcctgaaattgtacgatatgccggtccgcaaatatctcacagagcgctggctgaaaaacaagaggtaatggaaggagttcaccatataggcctgttcgtgaaagaactcgagcaggccaaaaaactctggtgcacctattctatcctgaagcctaaagttccgcgacttcctgcacggacagtcctgtcatctcacttatctgccggaattgcattccggcatttttcattgcaagagccatcttgcggattccctttgcctctcctttgatttctccttcttccatccccgcagcaaacccttcttcgcggccgttcttgaattcctgccgcttaccgtataagatatccaattcgtttatcatgtttgcttcaaatctaagtctatgctcctttgtgagtgccgcatattcacatgcaccggccaactggctgacaaatgtcctattcttgattgcatccggaatgacatcggcatttcctccgtttatgaaccaatagaacaggtaatcctgctcagaactgcattcgtcaagtgtctttgcgaatcgcgccaactctgcaaaggtaatagaaattgtcataggtgcaacttcttttgtacggatttccataaattcataatgtgacaccacacagtccgtatcccattgtctttcatcatgatgcctgagcttatggttcaaaatgctcaccacatatacaggatgaaggtccgcataatcctccccttgcccaagctgcagatggaacgtccccgcgccatagaacacaacacgcttgaaaaaatcattataaggcctgttctgcacctccacaatgaattgggagccgtcatcacccctgcatatgaggtcaagcaccgttttcttcgacacaatcgtgtcctgacactgttcccggtcacaatactccacgatatccttgacaatcaccccttccggaagcaggttattaagcagcctgatcagcagcggcttgttggccctgtcggcaaacacagccttgaagccggcatccgtcgtaagcggaacgtaacgtttctgataaattcccatattattatcttccaaatgtttacggatgcaaaattcgggattgccatccgcgtaacgaaaaagtacacggatatttgtaaaaatcggcactacactaatgccaaatgccattttatgttcagaaatttgtttgattttttaataaatgcagacaaatttctcctgtttccactgcctgtacaatataaaatcttaactttgcctgacttacaggggccggaaaaggctggcatattatgaaacaggatattatggaacataaattaagcgacaaatcagtttgcgccgtaatcggacacggcagctgggccacggcaatcgtaagccttctggccgggaacgaaaaagaagtatggtggtatatcaagaatcctgaagtgctcggaactcttgtttctgaaggccggaatcccaaatatctgaatgacctcgaatttgacatgagcaggatacgtccaagcggtgacattgatgaagtcgtttcaaatgccgacataatcataatggcagccccgtcagcctacctgaaagattttcttgaaggaatgaccgtccctctaaaagacaaattcatagtctcggccataaaaggcataatccccggcgactacaagaccgcagttgaatatatccacgaccgatacggtctcacatacaggcaaatcggcatcatatcaggcccgtcacatgcggaagaagtgtcacggagaaaactgtcatacttgaccatagtatgcactgattcagataattccgccataatcggaaacaagatttccactgactatataaaactgagctactcgaccgacctgtacggggtagaatatgcggccatactgaaaaacatctacgccctttcggtaggcttggctgtcggcctgggctatggtgacaatttccttgctgtccttatatcaaattgcgcgaaagaaatgacaagattcctgtcggaaagctatcctgacgcacgggacactatgaactcggcctatctcggagacctgcttgtgacatgctactccagctacagccggaaccgccgcctgggccttctgataggacgcggccacacagtcaaaagcgcgctgaacgagatgacaatggtagcggagggctattttgccagcgattgcataaggcacatcaacttcaggcacaagatagacatgccgatagccgacatggtatatgaagtcctgtacaaaaaggcatctgcaaggaaaaaaatgaaagaactggaaaatctgctgtaatcattttcccggtcccgccaaaaactgcaccgccatatccgtcacctcatcgcacctggcagaaaagccgtggtcctcaccttctataagatgcagcacggcatccttgtatccatccttgtacctttccgaatagctataaggaacaatatcgtcagacattccatgaattatgcagacaggcccgccatacagcgcggccgtttcatatatcggcaatgcctgggccaccttgacatattcacgtcccacacgatgtccagacacaggcacatattccggtatatcatgaggatcatacctgacaccgaacatgactccgttcaaagcatcatccctgagaaccgcagcaggagccatcaaaacaagcgacgcgaccttctccgcccccaattctccagccagcatgcttgcgacgaccccgccctgcgaatgccccagcaaagcgacagaccccacaaaatccagcgacctcacatattcataaactttcgcggcatcctcaatctcattggccacagtcatattcccgaactccccatcgctctccccatgcccgttgaaatcaaaccggatactcgcaatccccttctccatcagcttttccgcaatgtcaccaataacccgcgactgcttgtcagacatgaatccatgcataagaataaccatcgggacagtctccccttccgccactccgggccgacaaacaatcccggccaacttaccgacagccccgtcaatctccacctcaatcacctccggctcccttccgcattgcctgtccccgtcattttcacgactaaccgcaagaaaagccaaagacaacaacacggctcccataaaccccgcctttttagctgcatcatataacgttttcatctctttaatatttcatttgattgttatcagcaggtcaaagatacaatgtttgatagcaattcacaacaatttaacccttaaatacttacacaactatgaatatgtaaccggcacacccgtcaagacacaaacaatttatagcgaggacattatgcccaagcaggattcaaaataatccatgaatataatgtaaccaccccaaacatgcctccatttcctgataaagagcaatctttccggttccatatttgctttttacagaaaactgcgtatttttgcaaaagtttgaagcaattcacaataaggattattccgttgtgcaaacatttaaagcggggcctcttggtctcgctttctatttggttcttttacacaatggcgcaagaagtctcgtttaaaatttaattgacaatcaatcacttactattaccgacaccaacattgcattctattgcagacattattatttgattttcacacgagatttctctaaatttacaagcaaactgcataagtataacagaacacattttacatcatgaaaaatatcctcggccttgatcttggaaccacatctataggttgggcatttgtaaaagaagctgaaacgtcagaagaaaagtcatccatcgtcaagataggagtcagagtcaacccgcttacagtcgatgagcaggcaaatttcaataaaggaaagcctatcaccaccaatgcagaacgcacactcaaacgtggagccagaagaaacctgcaacgctacaaactgcgtagagcataccttataaacgaactaaagaatgcaggcctgataagtgacacggcaattctttcggaacaaggcccgggaagcacatttgaaaccctaagactgagggcacaatcggctacagacgaggtttctcttgaagaatttgcacgcatcctcttgatgataaacaaaaagcggggatataagagcagccgcaaagtgaataatgatgaagacgggcagttcatagacggaatgacggttgcgaaagccctatatgaaaacggcctaactcccggacaatatgtatatcaactcatcaagtccgggaagaagtatattccggatttctacaggtcagacttgcaggccgaatttgacaaagtatggaactgccagaaaaagttttatcctgaaatattcactgacgctctgaaaagcgagctggaaggcaagaacgagaaacagacatgggcaatatgtgaaaagcatttccggataaacggaataagccgcacgaccaaaggagaggaactcaagaaagaaaattatttctggagggcaaaagccgttgaggaacagatggatcttgaatccctggccgtagtctttcagaagataaactcccagataaacggttcaagcggatatctcggagcaatcagcgaccgcagcaaagaattgtatttcaacaatcagactgtgggccaatatcttgctcaaaagataagcggagattctcatttcagcctgaagaacacggtcttctacaggcaggactatatggacgagttcgaaagaatctggtctgtgcaagcgaagcatcatccggaacttacggatgagcttaaaaaacgtgtacgggacatcatcatattttaccagcgccctctcaaaagtcagaaagggcttgtaagcatatgtgaacttgaaggacgtgagattgaggtcacctgtgacggaaagacaaagaaaaagctggtcggcccgaaagtctgtccaaaatcttctccactgttccaggagttcaagatttggcaggtgctcaacaaccttacagctaacaagagatatctgtcacaagaggagaaagaacgtctgtttgacaggctttgtacatgcgacaaactttccaaagcagaaatcatcaaatgcctttctccggaaaaatccgtcagggaacgcagtcaggattcattgtttgcccctgaggagatatacgaggatgaagttctcgtgcgccttgaaaacaagaaaaaggaaatcgtcctgaattataaggagattgacgggaacaggacaatggctgcattattcagggcatacgcgaaaatcatcatgttgaccgggcacgatgaatatgacttcagcaaaatgcctttttcaaaagcagcaggcatcatttcagatatatttgcaggtcttggctacaggactgatttcctgcattttgactcttcgcttgagggcaaggcatttgaagagcaggcgtcatacaggctgtggcacctcctgtactcatacgagggtgacaaatccgtttccgggaatgaaaagcttatttccaagatatctgaaatcacaggctttgaaccggaatatgcaaaagttcttgcaaatgtcacctttgcgccagactatggcagcctaagcacaaaggcaatgaggagaatacttacttttatgaaagagggcaatgagtatagtcttgcatgtgcatatgccgggtataatcattcaaagaattcattgaccaaggagcagattgaatcgaaaatactcaaagagcatctcgaaatattgccgaagaacagcctgcggaatcctgtggtcgaaaagattctgaatcagatggtcaacgttgtcaatgcggtgattgatgaatacggcaggccggacgagataaggatagagcttgcccgcgaactgaagaaaagtgctgcagaacgtgaggagctgagcaaggctgtaaatgatgctgacaaaaagcataaagcaataaaagaaatgttgcagaaagacttcggtattgccagtccgagcaggaatgatgtcatcagatacaggctttacgaggagctgaaggataacggatacaagtcattgtattcagacacttatattccgcgtgaaaaaatcttttccaaagaatttgacatagaacatattatacctcagtcacggcttttcgatgattcattctccaataagacgctggaggccaggcaggtgaacttagacaagggaaatgccactgcatacgattatgtgaacaacaaatatggggagactgaagttgagaaatacgtagcccgcgtagagcaattgtataaagctggcggtatcagcaaagccaagcggaacaagctgctgatgcaaatggcggatatcccttcagacttcattgcacgcgacctccgcgattctcagtatattgcacgtaaggccaagtccatgctgaaggaaattgcaaggcatgtcgtttccactaccggctctgttacagacaggttgagggaagactggcagcttgtcgatgtcatgaaagaacttaactgggacaaatatgacaggctcggccttactgaaattgttcaggaccatgacggaaggagaataaagaaaatcaaggattggacaaagaggaatgaccataggcaccatgcaatggatgccttgacgatagcattcaccaagctttcgtacatccaatatctgaacaacttgaatgccagaatccagaaagaagcaggcaaggaatatatggcggacttgtcgcagtacagcgtactggacatacataagtccgaccgcaccgatgtcatcatggccattgagcgtacgcaactttatcgtgacaaggtcgggggcagattgcgtttcatgcctccgatgccgcttgacgaattccgcagagaggcacgcaggcatcttgaaaatacccttgtgtcaattaaggcgaagaataaggttgtcacgagaaatgtaaaccgcacaaagtgcattggaggcacacgacagaaagtccagcttacgccaagaggacagctgcataatgagacagtttatggccagattcagagatatgccaccaagttggaaaaggtcggtccgacatttacttccgacaaaatttcaaaagtagccagcccgacataccgcacggcacttatggaacgtctgaaacagttcggaggcgacccgaagaaggcattttccggaaagaacagcattgacaagtctccagtctatgttgacgcgatgcatacgcggacggttccggagaaggtcgccttgctgtctatggagaagatgtttacggtgaggaaaagtatttcatatgataattttggcaaatccggaaataagaaattaaataaagaagaggttattaaaaaattgcactctattattgatgttaaaataagagagttgatgattaagagattcgaagaatctggttttgatgcccaaattgcttttagtaaccttgatgaaaatccaatatggttaaataaagaaaaaggaattaaggttaaaagtgtaaaaatcaagggtgtaaattgtgcaatacctattcatgataaacgtaataatatcgggcaaatattgtatgatgattgtggagatatgataccgactgattatgtgcagactggagggaatcatcatgtcgctatattccgtgatgctgaaggcaatcttcaggaacagattgtgtctttctatgatgctgttgcacgtatcacactcgggattccggtcatagatagggaatataaaaaggatgagggctgggagtttctgttcactatgaaacaaaatgagtatttcgtattccctaatccggagactggttttgacccaaatgagtatgatctgctgaatcctgacaattatgctgttatcagtcctaatttgtttagggtgcagaagttggcgacgaagaactattgttttaggcatcatttagaaaccaatgttgacgaaaagaatgaactaagacatattgcatgggaacgcatccaaaatacgaatggtttacgtggaatcgtcaaagtccgcataaaccacatcgggcagattgtccagacaggagaatactaacttaaagattttgtgtcatgatcaagcgcaccttgtatttcggcaatccggcctacctgtccctgaaactgggacagcttgtgatacgcctgccggagcagtctcaggcacacgtccacgctatgagcaaccaggaaagccataacgatggagaaggaaccacatcggcagaatgcatgaaaaagccggcaaagacagttcctatcgaagacataggcatgatcatacttgaccatcggcagataacgcttacacaaggcctgatggagacacttatagataacaattgcgctatagtgacatgcggaagcaatcaccttccggtcgggcttatgctgccgctatattgcaacaccatacagaacgaacgtttcaggcagcagctggactcctcactaccgcttaagaaacaattgtggcaacagaccatccaggccaagatacacaatcaggccgccgtgctcagacacaccacaggagaaatccacaataacatgaatgtatgggaaggacaggtcagaagcggtgatactgagaatatggaagcacgcgcagccgcttattattggaaaaccatatttccagggcatccggaattcattaggggacaattcgaggatttcccgaacaacatgctcaattacggctatgccatactcagggcaataatagcccgtgcacttgtcggcagcggtctgttgcccacactcgggattcatcatcataacagatacaacgcatactgccttgcggacgacattatggaaccatatcgtccatacattgacaaacttgtatatgaaatcgtgtcttcagaaggtccgcaggagctgacaaaagaagtcaagaccaaattattgtaagcctccgaagaaatgcatattgtagccgggattgatcctggctacttttgc

SEQ ID NO: 2404 - DNA, 15114 bp, synthetic construct
  misc_feature 1..15114: note = Synthetic
  source 1..15114: mol_type = other DNA
tgcaacaaacctatattattgctactaccccaacaggctttttattggtccaccaacaattagcacacgaaagagtattatacgaacagtatagtcaagcagtacattccaaacaagcccctactcaaaaaagtttgttccctattccattagatttggctgcatcagacagtgttttactggaagagctattacccgatcttcaattaattggctaccaaattgagaaagatgaacagcatcaatttgtaattcaaggaacaccagcagatattgtggtgggtaatgaaaaacatgctatcgaaatgttgattgaacaatttaagcatttcaacagcgatatcaattttagcaaaaaagaaaagctagtgcgctgtatggcaaagcaacaatccatcaaaactggagttacccttgatctaaaagaaatggcaggtcttgtgaatgctttgttcgaatgcaatacgcccaatattactcctaccggtaagcctacctatattgaatacaagggaaactatttagagcaattatttgagcgttaattagttttcgttaattacagttgttagaaattgttccatatattttctaatggtacctgctgcagattggtgtccgtttaccatgatagaaaaaattaattctttccctcgattagtaataataaaaccacttaatgctacatgactagtaagtgtgccagttttggcaaaaattttattttcataccccttatataaaccacctaaagttcctgcattgccagttggaaaaattgtttttattcgttcccaagattgttcttgtttcattttatttaaaacccaaataaaatcttgaggtgtcatcatattgtatctactcaatccacttccatctacccatcttggcttatgtggcatgcccatcatatccgattttaataaggtatcgatgattttagaatcatccatcaccccaattttttcattgcccaccatcagtaatatttgttccgcaaaaaaattatcactacgatgcatcatgatttttagcagactatcagtaggctgagagtagaattttttccaattaggttgatctatagctactgcattagcatagttgagcaccctatttaaagtatcttctaataatggaatcatcaattgatccatttcttttttcactacaaatggaattgccgtgctattgaataggcgattgctttttactacggtaaagctattttgatctttctctctttcaattgtataacggccgtcttcggtacttgaaaaaataactagagaatctttaaatgctttgggtgttaccgtaattcgatttcccttttttccaaagtaaaccaaattgccataaattggcatcggagatctttcaggagaataatctgcatcataatcattccaagcccagccatttccaaaagctgttgcattataccttggcgctacaatagttattttaggcgcattggcttttaaaaaatcatatgctaattgatcattaaaatcaggatgtaaaaaactaggatctccagtaaatcgtatagtgaaattctcttcgtcaggcaagtattcaaatgctacaatactatctctcagatttttcattgctgcataacaggtgaaaatcttggtattacttgcaggaataaaatatttatctgattgataattaaataaatactttttagaagtaggatcgtacaagctaataccaacatgagcgggcaataattcaggcttatctaaaatcaatgctttagcctgctgttctatagaattgtttgattgtaaaattgaggactgtgcagcatttgaagattgttgcgcagtcttttgtactttacaagaactggcaaaaaatagtaaacaagcgaaatagaaaagcttttgcataaggcatttattaactacgttcaactgctcgcaaccacctttcaggaatatcgttgttacaagctatcatataatctttataactgcaagctacatatttgccgtcatgtaattgcatccaccatctgccggttcttttactttgcaaaaaagccgtttctacctcggcaaatgccatagtaaattcattgaattctgatttattttctatggaggcttcttgcttccccctatgtattccgtcaatcaaataccaaatcatatgtgcttgttgtatggctgtcatttgatgtacatcattggcaacaagatagccatacaagccgatgctattacaaatagtgctcatacctgcatattgcattaaagtacatgcttcttcgccatttaaaccatttggcgtcactctatttgttggtgcatgagaatattgaatggcttcgatatcaaaactgaagagctcactatttcggatagccggttccatttcttcgatggcttcctttactttacctacacggtaacaatcaaagcccaatttgttaatcgtttccaacatatttggatgcatgaaatagctttggaaagccatatgcgtatagtgccttaagtgattaggaatacccgtaaacatatccactaaaaacatatcagcaggctctaagctatccatgtctagattaattctagcatctacagataccgcatcaataattttattttgtaacccataggcagcatattgaggtgttgtaatatcatgagagccgcctagaattaatacctttttacccatctgcaatagttctgatacaaccatttttactactgcataactatctgggagtgtagcgccaattttaatgttacctaaatctgctatggaaacttcagtatgccaataatatagtttataaaactgctctcgtatagcattgggggctcctgtatgagtatattgcatgcccattccccgcatttctccgcagccaacaattactaaatcggctgctgaaatatctggtaattcttcttcgtgaactagaatatgtttaccaatctgggtatctttaaatccctcatcattggaaatttcagcaaggttaatgggttcaagaaaatcaagtaaagaggctaaagacatgaatacgtttttgtacccttcttaacgaagaagtagatgggattattgcagaactagcttagtcagtatatttatatccaacccctcttacagaatgaaaataaataggattacgactatcctcttcaaaatattttctaaagcttaaaataaaattatcaatggttcgagtagttgggtaaacattataaccccaaactacttgcaaaattttttctcttgttactacctcccctttattctcaatcagaagctttaatagcatagcttcttttttactcaaatctatccttaatccattagatgtaatggcatcctgcgccttaaaatcaattacattctttccaaaatgatattgatcaccaatggattcccttacttgtaaacgtttatttttttcaatcagtttagcaacccgtatcagcaattcatctaggttaaaaggtttggttaaataatcatcagcacctttttttaaccccaatactttatctgcaggagcgttttttgcactaagcatcaaaataggcacttcattattgtgtacacgaatgctctctgttacactaataccatctagctctggaagcatgatatccataatgattaaatcgaaataagcattttcaacttttttaagtgcatcatttccatcgtaggcagaagtaacttcgtagccttccatttcgagattcaacttgagtgcttcatgcaaattaagttcatcttccactactagtatattggctttctctgcggtcattattaattattaaataatacagtaaaagtacttccgtttggttgattatctgtcacagaaatgtatccattatgcgtttcagcaatttttttacataaataaagtcctaggcctgtaccctgtgcttttctagtgttttcgttaccgcttcggtaaaatttatcaaatacttttttcttttcttgattatcaatcccttgacctaaatctgaaattgagatagctattttagtacctgaagtaagcagggaaacatgaataggtaaatttttaggagaatattttaaggcgttctccaataagttattaaccaacatctgtagtaaaaaagggtctcctttcatcaagcgattttcttctattgcttcggtaataatcctttctggaaacctacttttacagtcatcaacacaggtttcaactatatctgttaagttcagttcttgaaagttgactgaatagccccctgcatctaattgagaagtaaacagtatattattacaaagtgtatttaaccgattagcttcttgcaaagtgttcgcaattaatttctgctgtttgtcttcggctaattttcttttttgaagtgtttctaaattgagttgagctactgcaattggcgtttttaattcgtgcgttatagccatcataaaattctgttgttgcgcagaaaattttaattggcgccttgttgccctatatacatatactgctccaactaaaattaaagccagaaaagtgataccctctccaatatactgagctgtttttctattactgatttcttgaatggcatcaaattttttgagataatcagggtcgtcttttagcagttctgcaattcttatagacgtcatgatactgttctgcttttctaaagcaataaaccaccatgccaaagccgcaatcatataaagcagtaaaaaccaatatacaaaagtaacaactgctaactttggcggtttaagggtactcattttgcaattttttctatacgaatacccgcatttaaaacatgcgaaagtgggtcttctctcattgcctgttgaagaccaaaaatataattccctgcttttagttttactggagtttgggttattctgattctgtgatcaaaaatatcatccataccagcccctaaccacccttttttattatcggcaagacgcaaatcgagcagctgattttttgcagtatccccaggagactgtgtagaaatattcatccacaaattattgtaacgatatgcatctttatgacgaacaactgcataaatatgataaagcgatacggtatctgaaatagtgaatttgaaaaaaagtttatcagaagacttccaactatgtgaggggaaaaactggctcttttcaaaaacaccattagattcacagcttgataaaagcaacagaatgaataaagcacttaagtaaattctcacatgaattattttttcaaagatacataagaagaaaataatcagagtacatttagaatttgctctttggctttctccaactcatctttcatcaaaataacggctttttgcatatttgcatcataggctttagagccagttgtattgatttctctcccaaattcttgtaatataaaagagagttttttccctttagaaatgccatcttcagccaaaatagatctaaaataagcacaatgattgttcaatcgaacctgctcttcactaatatcaattttttctatgtaataaatcaattcttgttccaatctattgggatcatagctttcttttcctacgttttcttctaaaaccttcattaaaccttccctgatcttagttcttcttagcggctcaagcgtagttattaattgttgttgaacttcaatattattcaaccttactaacaagtctgcttcaattgatttgccctcttcttgtctgtgtttattcaattgggcaattgcttctttcaacaatttttcgaaactaacccattcagcttccgtaagcatttcagttgagggggtgataacatctggtaactttaaaatagtacttaaaatatcgccagtttctaagcccaattcatttgccaactgcgcaacgggttgaaaataagctttagccaaatctgtattaattgttacaggcttattagccccattcattttgatgctgatattacattcaacactacccctttgtaatccctcattaaggttatttcggacttcaaattcatatggctttaataaagctggaatattcagtcttaaatcaaattgcttcccattcaatgatttgatttcaattaaaaaatttttgtcaccaatcgtttgttcagccctgccgtaaccagtcattgaataaagcatacagatgtgtttgagtaaaagtaaaggaacattagcagaaatactaaaaatcaattcctatccatttctgctttttctttttgtacttatcaaaattaaattgatacaacttacctggtctatgagacacatcttgttccatttcattagtgtctatcaacaaatccattgaagcaaattttttcctaaagtttcttctatctaaggaaacgcctaatatagcttcatataaattttggagttctcttaatgaaaatttatctggcaacaagttaaaaccaagtgggtgttcctgaattcttttttgcaaccagccatggcattcctgaacaacttcaagatgatcaaatgccatttcttttaatgcattataatcgtaccagtccaattcattatcatgaattttaagcgcgtggtgctgaatatttaataaagagcagtatgcaatcgttataactcgcccacctgggtgtcgatctggttttccaaatacttttacttgatctaaaaacacattattcattccagtgcgtgcttttaagatacgataagcagcatcgtctaagtcttcattatttttaacaaagtctcctagtaatgaaagttttccttgaaaaaaggctaaatcgctcttgattaacaagactttaagcttgttctcttcaaagccaaaaatgacacagtccacagttagcggtactttgggataggtatccactaaatgatggaccgcttgagcggaatttttcttcatatggtgttgcatttggagtatactccggcaattgcgtcgttaatacacaaagttaagggttgtgtggtaatttctatctttacagcacaagaaccgattatgtataccgtagaacagctagatgaattaaaagatttattaaaatttcatgaacaccgttattacgttttaaatgatccgcttatatcggactatgagtatgaccaattatatcagcagttaattgcaattgaacaagcgaatcctgaacgaattaccccagactctccatcgcaaagggttggcaatagcttaaaccaaggttttgaaactactcctcacttggttcctatgctcagcctagacaatagctacaatgcagcagacttgattgattttgatagaaaagcaagggaattaacaggagaacaagagatagaatattgtgttgagcctaaatttgacggagcaagtatttcgttgatttatgaaaacgacttattggttaaagcaatcactcgtggagatggtgttgcaggtgaaaatattacccctaatattcgacaaatcaaatcaatcccattatctgctccattttcaactcaaggcattcagcaaattgaaataaggggagaagtcattttaagcaaagcatcatttgaaaaatacaatcagaaattaatagaacaaggattagctccattagcgaatccaagaaatgcagcatccggtagtcttagaatgaaagaccccaaagaagtggctgaacgaaatttagatgcatttttatatcatgtaagctatgttacccataaaacagcaacgcatacctcaactttaaatagtcatgccaaaagcctagacctcttatgggacatgggttttagatcccctaaggaagagaaaaaagttgttaaaggaattcagggtgttatagactattgtcttgcctacgaagcaaaaagagacgagcttccttatgaaattgacggcatggttattaaagtaaatgatattcaacaacaagaaaaaatggggatgacttctcatcatcctagatgggctattgcatttaaatttaaagcaaggcaagcaaccacaactcttttagatgtagagttccaagttggaaggactggggcagtaacccctgttgctaaattaaagcctgtttttttaggcggcgttacggtatcaagtatttccatacataatgaagattatatacagcaaaaagatcttaaaaaaggagaccaagtgttgatagagagagctggtgatgtaattcctcagattgtaaaaagcttacctgatttaagaaatgggaatgaacaaaaaattgtattcccaagaaactgccctgtttgcaatagtgaattatttaaagaagaaggagaagcagtttggagatgcattaatatagaatgtaccgcacaagtagtagaaaaaatgatccattttgtaagcaaagacgcaatggatataaaaagctttggcgaagcgaatattagaaagttttatgagtttggtttactcaaagatattccaagcatttatcgtttaaattttaatggcctaactcaactggaaggttttgggaaaaaatctattgagaatttacaaggggctattgaagccagtaaacaacaaccactctacagattaatttatgctttaggtatccgatttgtgggtgaaacaacagctaaaaccttagcaaacgctgtgtcaaatttattagaatttagcaacaaaacagaagaagaactgttgcagttagaagatgtgggaaccaaggttgcaaagagtattcaaggattttttgggaatcctcagaatattgcaatgctacaagaattagctgaactaggtcttcaattagaaaacagtaaaaaagaaattaatacaagtgggaatttaataggtcaaagttttttgtttactggaaccttagaacaactaaaaagatcacaagcagaagccatggttgaaaatgctggcggctctatcttaggtggcgtaagcagtaaattaaactatctagtcgtgggtgcagacgctggaagcaaactagaaaaggctaaaaaaataaattccattaaaatcattacagaacaagaattcataaacctgattaatccataaaaatgctccatcctaaaacacttcagtttttgattaaactcaaaaaaaataattcccgtgaatggtttaatgagcatcgtgctgactacgaaactgctaaagaaaattttattgaattagtgaaccaaattttatcacaggctggcaaattcgatcaggatattgctgttttaacttataaagattgcatatttagaattaatcgagacgttcggttcagtaaaaataaagacccctataaaaataatatggcagcctattttgttaaagggggcaagaaatcttggttggcaggatattattttcactgtgaaccaggtggtaaaagctttattggtggcggattgtatggaggtgagcctgatcaaattaaaaaagtaagacaagaaattgactacaattgggaagcatttaaaggcattctaaacaacaaaacttttaagaaaacttttggcgacttatcaagagaagaaggaatgtcgttaattagagagccaaaaggttatgaaaaagacaaccctgcgatagactatattaagttgaaaaactttattgtttctgtaccagtaactgatgaagaattaactgatcaaaaattagtcaaaaaaataattacttgctttgctacgatgcagccgctcttgcattttttaaatagggcgatggaagattaaaagctaaataattgattattaattacatagtttatttagcaataaattactgaattatttttttgttgtattaaaaaaataattaataaaatttgcggaattcaagattctgtgctaaattagttgtccccactactccaacaagagaacgttagttattatttattaaggacgtgtcaaaaaaatgcccccgttaaagtcgagggctaacttaatgttttcacatcggaataatccttattgtgatttgcttcattgtgaagataataaaaaaagagaaatatgaaaaaaattttaggaattgacctaggaacaacttcaattggatgggcctttgtacacgaagcagagaatgaaaatgaattgagcacaattaaaaggttgggagtaagagtaaatcctttaagctcagatgaacaatcagattttgagaagggcaagagcataaccttaaattcacaaagaacattaaaacgaggggctagaagaaatttagcaagatataagttaagaagggagaatctaattgaaattcttttaaaaaataatattatagataagcatacaatacttacagaggtagataaacaatctacatattctacttatgaattgagagcgatgtctgctgtagaaaaaatagaaaaagtagaatttgcaagagtattattaatgataaataaaaaaagagggtataaaagtagtagaaaagcaaagaatgaagaagaaggccacattatagatggaatggcggtagccaaaaaaatttacgacgagaatcttagtccaggagaattatgctatcaaattctaaaatccggaaaaacacaccttcctgatttttatcgaagtgacttaaaggaagaattggaaaagatttgggaatttcaaaggcaatattatcctgaaatattgactgaggaattaaaaaaggcaattgaaggtcaaggtaaagaaaatacaagaaaacgaattttagcaatttctaaaatttataccgcagaaaataaaggagcagataaaaaaattaaagcttatgaatggagatcagaagcattaaagaaaaagatttctgtagaggaactcgcgtttgtcataactgaaataaataacaacataaatagttctagcggatatttaggcgaaataagtgatagaagtaaggagttatactttaataaagaaacaattggacagtatttattcaaaaaaataaaaaatccaaatttcagtgtaaaaggtaaagtattttataggcaagattatttagatgaatttgaaactatttgggaaactcaaaaaaagtattaccctgaattaaatacagatctcaaaaaagaaattagagatgtaatcattttctatcaaagaaaattgaaatcgcaaaagggtttaatcaatgtttgtgaatttgaaaataaaaaaatagaggttttcatagatggtgtaacaaaagaaaaagttattggaaataaagtagcccctaaatcatcccccttatttcaagagtttaagatttggcaaattttgaataatatagaagctacaaacagaaaaacaaaagaaaaaagagtattagacctttattcaaaagagattcttttttctgaattaagtattagaggaaatttaaaaaaagaggaggtacttcggattctgggccattcaataaaagaatgggatttaaattattctatagttgaagggaatcatacaaataaaaacttttatgaagcatttgaaaaaatgattcgaattgagggggctgaaaatattgatttttcaaaacaaactatttccgaaattaatgaaacaataaaagctttttttaactcctttaaaatagatacttctattttaaattttaattctcaattagagggcaaaagttttgaaaaacaatcttcgtatcagctatggcatttattatactcatatgaagatgacaattctaattctgggaaagaaaatttgtacaatcaacttttaagaaaatttgggtttaaaagagaatttgcacaaattttatctaatgtaagcttattacaagactatgggaatttaagtagtaaagcaataagaaggataattcctcatattaaagaattaaaatatagtgaggcttgtaaacttgtaggatataatcattcttcatctataacaaacgaggaaaatgataaaagacaattaaaagataaattagaaatattacctaaaaatagtttaaggaatccaatagtagagaagatattaaatcaaatgataaatgttgtgaatgctattattgcagatccaaatttagggaagcccgacgaaataagaatcgaattagcaagagagcttaagaaaaatgcaaaagaaagagcagaattaacttcatcaataaatgaagcaaaaataaatcacgaaagaattattaaagaattacaaattaatgatgggataaaaaatcctactagaaatgatattataagatataagttgtatcaagaactaaagggtaatggctataaaaccttatactcagatacatatatccctagagaaaaacttttttcaaaggaatttgatattgaacatataattccaaaatcgagactatttgacgatagcttttccaataagacactggcaccaaggcaagaaaatatcaacaaaaaggatgaaacagcattagactttgtaacaaataacttaggagaagattctttaaagaattatttggcaagattagaaatgatgtacaacctaaaagagggatcaattagtaaatccaaatacaaaaagcttctcttaaaaggaagtgaaattggtgagggttttatagaaagagacttaagagatagccagtatattgcaaaaaaagcgaaggaaatattatttagtataagtaaaaatgttatcacaactacaggaagtataacagataaattgagagaggattgggatttaattaatgtgatgcaggagttaaatttttcaaaatataaaaaattaggattaacagaaattatagaaaaaaaggatggtaatactaaagagcggattattgattggacaaaaagaaatgaccaccgtcaccatgctatggacgccctcaccattgcatttacaaaaagaagttttatacaatacttgaataatctgaatgcaaggagcgataaatcatcaagtatttatggtattgaacagaaagagactactaaactcgcaaatggtaaaagactattcaaaaccccattaccaaattttagagaagaggccaaaaaacatcttgaacatatattagtttcttttaaagcaaaaaataaagttgttacaaaaaataaaaacaagattaaagccaaaacgggtattaacactaaaactgaactaacaccaagaggacaactacataaggatacagtatatggaaagattaagcagtatactacaagactagaaaaaataggaccaaattttgacaaacccttaatttcaaaagttgcaataccatcagaaagaaatgcattattaaatcgcttaaaggaatataataatgatccaaaacttgcattttcaggaaaaaatagtataaagaataatccaatttatatagataaaaataaaactatttcattgcctgaaaaaattaaaatcgtcgaatttagtgacaattttactattaggaaagaagtgaatccagatttgaaaatcgataaaattatagacaaaagaataaaacaaattcttcaggaaagacttcaagcatttgaaaatgatcctaaaaaagcattttcaaatttagaaaagaatccaatttggcttaacgaaaaaaatggcataaaaattaaaagagttaaaataagtggaattagtaatgcagtatcattacactataaaagagatcacttaggaaatgagattttagatacaaatggaattaaaatacctgtagactatgtaagtactggcaacaaccatcatgtagcaatttataaagataaagatggcaacctacaggaaaatgtaatctctttttatgaagcggtagaaagagtaaaccaaaatcttccaattattgataagaattatcgccaagatttaggttgggaatttttattcacaatgaaacaaaatgaatattttgttttccctagcgaagattttgatccaaatgagattgatttattgaatccaatgaattataaattaattagcaagaatttatttagagttcaaaaaattgcaacaaaaaattatatgttcagacatcatttagaaacagatgttgaagaaaaaaaacaactcttaaacatcgcatacattaatataagaagttgtgcccctttaaaaaacattataaaagtcagaataaaccatataggtcaaattgtaaaaacaggggagtagttaaatgatcaaacgaacactatattttggtaaccctgcttatttaaaaattttaaatgagcagcttgtttttgaaagccccgaaacaggggaaacaaaacaaataccaattgaggatatcggcgtgctaattctagatcatcaacagattacaatcacgcaagcattaatcgcaaaattgttgtctaataatattgcatttattacatgtgaccatacccatcatcctactggattattgttaaacttggatggcaataatttgcagagtgcaaaattttctgctcaaattgaagctactataccattaaagaagcaattatggcaacaaaccatcgctgctaaaataaacaatcaggctaccctattgaattggcaaaaagttccaatcaacaacatgagaaactggtccactgaagtgaaaagtggggatgctgataaccatgaggcaatggcagctgcctattattggaagcatctttttcgttttactgcactatctgacgatgatggcaatacaactaattttagaagagaacgctatggagatccgcctaataatattctcaattatggttatgcaatattaagagccattgtagcaagaagtttagtagctagtggtcttttacccactttgggtattttccataaaaaccaatataatgcttattgccttgctgacgatatcatggaaccgtataggccatttgtagatagaattgtgctagatatagttaaaatgaatggcaaattccttgaattagggccaactatgaaaaggactttattgacaatacccaccatagatgttaaaataaaaggtgaaaaaagtccattaatggtagcggtacaaaaaacaactgccagtctcagcaagtgttatgagggtaaacttaggaaaattgactatcccgagttctttataccatgagcagaaattatcatacccgattaaacgcttatcgcattatgtgggtactagtactatttgatttaccaac

SEQ ID NO: 2405 - DNA, 14921 bp, synthetic construct
  misc_feature 1..14921: note = Synthetic
  variation 1777..1796: note = n is a, c, g, or t
  variation 4872..9762: note = n is a, c, g, or t
  source 1..14921: mol_type = other DNA
ttataattatcatctgttcttgatgttctggtttcataatctctccaatcgtggacaatatcggaggtagaaagaatgtttaatttggctttgtacatcctaaatgccaaatcataatcttcgggatatacattggaattaaaacctcctatttcgtcaaagacttctgttttcatcatccaacttggagaaggaattgggcattctttgtatatttctgagaatgagtttttgttttcagcaagtttatttatccaattttgatatttaaggtatccgtttcctatttctgttccgttatatttaaaataattaacctttcctattgctacgcttttttgattggatgataataacactttctgtaaatcttccaatttgttttcaaacattaaatcatcggcatccatcctggtaatgtatttaccttctgctttttctacccctgtttttagcgcttctattatgcctttgttttgtttttgagcacctttatacgtttgtcgttttttgaaaaacctaaaacgatatcaaaactattgtcggtagaagaatcatcgaccgctatcaactcccagtttccataactttgattgacaattgattttagggtttgctccaaaaaaacttcttcgtttttgaagggcattattatagatataagttctttcattttttgtaatatactcaatacaattagtttttattcgctttttcttattatttttagttgaacttatgagctcctttcagtcggtttgagtatatttgaaaaggaatataaaattaattataaatcgctatatgaataaaatatttacattattaataataagctttgcagtaataacgattaaagggcaagataacaacctgtttaatagaaaagattatgcacaagatgttgaattattggaaggtttagtttgtaaaaaattggacagtttgaggcataacaaaaagagagaaaagttagtagaagacgctgcattaaaaacttcggcaaaaaatcatttattgtgggtgaatcgaacaggtaaaattgttcattttgaagatgtaaaagaaacgaaaacacctataaagcgagctcgaaaagcaggttataaagaaaaattgattggtgaaaatttagcagatactttttataataaagaacaaaaaacagagaaaggagtaatttatatgaatcaatctttagaagatatcgcttccgatttggtcaataatatttggaggcattcaaaaggacattacaaaaacataataggcaaagaatttaaagaccacggagtagcaatagttgttgatacaaaattacaaaaagtgtatgcaatgcaagttttgggaggagtagtaaaaaggaaaaaacattgaaaatgaacaatattgatttactagtagttggaggaggagcaggtggtttttttgccgcaataaattacgcaacagataatccgaataaaaatgtagttattttagaaaaatctaaacagattttagccaaagtaaaagtttctggaggaggtagatgcaatgttacacacgcttgttttgaaccaaaagaattggtaaagttttatcctcgtggaaaacgagaattaatggggccttttcatcagtttatgactggcgatacgatggaatggtttgaaagtagaggtgtatccttgaaaattgaagacgacaatcgtgtttttccagtttcaaacgactcgcaaagtattattgactgttttgaaaatgaagtcgaaaaactagggataaaagtattgannnnnnnnnnnnnnnnnnnnccccgtacgcttactaataaaatacctaaaattagaatccttagactttacgacaagacgatattcttttcgtaaaatcagattcaaaaggtgagatattgttgtaatttcaaaatgttgaatttttatttcactactgaagtagcaagtaatcgtagcgacattagaaactcctaacttatacaaaatttttattagattatccttatatttaaactcaagagagcaagtcatttcttctcctctcgctccgtttcctaagtgaattatatcacttcgaaaagcacattgccctttctctttttttgctatttgctcaaaaaactcttgaatcatttatactcaaaacaaatagctttacggttttttgaacctttcttttttccaatactgtcgttgtaaaatcttgtagtaaccagttacaacaagattatacgcctaagtcttgaaaaaaataaacttttcaaatttcccgaaaagctaattgcattgagtatattttgaaaataaaaaagactaaacttttttctttttacctctattaaattcgtgttcatatcctttccagtttcttaccactttctttgcccaatccaattttatttcatttttttcgtcttccgacaaatgccattctatatcactttttctcaatcgatctgtaattgattgcaaactcaaagaagcggaaacagaaatattgtaactctccgtaaatccaaacattggaatacgcataaaaacatcagcgtgttctagcgcaacatcagttaaaccgtcaagctctgttccaaacattagcgcaattggtttatcaattggtagttctggtaacattacatcatttttatgtggagtcgttgctacaattgtatatcctttagcttttaaatcattaatacaagctattgtattttctttttgctcgttatgatattttaaatccaaccatttgttagagcctacaactatttttgggttaacgttatatttgtttctattttcaataatgtgaatgtcctgtataccaaaacaatcacaacttctaagcactgcactagcattgtgaggctgataaatatcttctaacacaaccgttaaatgccgtgttctgttgtttaacacttctgtaaacttgttttgtttattctctgaaacaaaactaactaaatgatctaaaaaatctttatccataatatttcggtaaagttaatgcattactttaaaattataattttttcggtataaaatttattatctaaaccaattcgacaaatataaaagccagagtttaactccttgagttctattatttcattgtttgtattttattattttccgcaattcgcttgctctctcgggagtattccctgggagattaagcacattgtaactcattacactaattgtttcttgcgaaaaaacagataaataaatcatgtaaactattataaatactattgatttcatatttttattttgtccaaattcgccaagatttttcagcctgttggtgtaacattgttaagccgtttaaagtaacggttcccttttcttttccttgttttaagaattgagtttccaaaggattgtaaattaaatcgacaagtaaaaactcttcgttcatcttatcgaaaggtattttaggcacgtcattctcgtttggatacatacccaatggagttgtgtttacaatcattttgtgaaaacgaatcacatttttatttacatccttccagtttataatatttccttccgttggttttctcgatgcaaaaagtacacttgctccatattgttttttaagtaaatacgcaactgcttttgaggctcctccagttcccaaaatcaaaattctttcgtgtcgagatttaaaaaagggttttatcaactgatgaaaaccaaaagcatctgtattatgaccaactagctttattgtattttcggttcgaattactttcaccgtatttacagctccaatttctttagccgtttcactcaatgcatctaagaatggaataatggtttctttataaggaattgtaacattgaatcctgatagattatgctcttccacaactttttttattgttgcaatatcttctaattcataattttgataagaataattctccaattcttcttttatgaatttttctataaaatattttttagaaaacgaatgttcgagtgattcaccgattaaacctaaatttattttttccatttttatttattttctaacccaaagttgaattccttcaggacttttccaagcgtaatttaaagttttattgataaaagaacgtttgtaattcgtaggaaaaaacgcagcacaactaggaacattcaaatcccatttccccgactttgattgttcgccttgcaatatcatcaccgaaaatttatactcatcatttatatctatagccacaacaggaaaacctttgttggccatcaactgagcattatctaacgtttcttgtctgtttgccaatcctaagtttttccacgtactattcctttgtataaaatcatatattttatgataattgacatattctccattttccgaaaggtcttcaactccgttatattcacaaatagctctagccgtaaatgttttgcaataatcagatgttttttcttctttacattgttcatattcttctaaaatcgtttctattgttactcgcctttggggttctgtcggcatttcgtcttcgcaagcaactaagaagctcgacaagattagtattttgtatagtgttttcatttaattctattatagttctaaaaattgatttaattctggttttctttctcttttttctgggcgtttatacgggctatccatttttagttttggcttgtaaaacaagtaagtctaaactcaaaaggagcttctaaagtcgctcttttgagtcaagtcttactaatttcacaaacaaaaagctaacatttctatccctaacgtaattaaaactaaaaaacaaaaccttaaaaatataaagatgtgactaagaccctaatatactcaaactgattagctttttggttttttagacgatgttgnnnnnnnnnnnnnnnnnnnnnnnnnnnnnnnnnnnnnnnnnnnnnnnnnnnnnnnnnnnnnnnnnnnnnnnnnnnnnnnnnnnnnnnnnnnnnnnnnnnnnnnnnnnnnnnnnnnnnnnnnnnnnnnnnnnnnnnnnnnnnnnnnnnnnnnnnnnnnnnnnnnnnnnnnnnnnnnnnnnnnnnnnnnnnnnnnnnnnnnnnnnnnnnnnnnnnnnnnnnnnnnnnnnnnnnnnnnnnnnnnnnnnnnnnnnnnnnnnnnnnnnnnnnnnnnnnnnnnnnnnnnnnnnnnnnnnnnnnnnnnnnnnnnnnnnnnnnnnnnnnnnnnnnnnnnnnnnnnnnnnnnnnnnnnnnnnnnnnnnnnnnnnnnnnnnnnnnnnnnnnnnnnnnnnnnnnnnnnnnnnnnnnnnnnnnnnnnnnnnnnnnnnnnnnnnnnnnnnnnnnnnnnnnnnnnnnnnnnnnnnnnnnnnnnnnnnnnnnnnnnnnnnnnnnnnnnnnnnnnnnnnnnnnnnnnnnnnnnnnnnnnnnnnnnnnnnnnnnnnnnnnnnnnnnnnnnnnnnnnnnnnnnnnnnnnnnnnnnnnnnnnnnnnnnnnnnnnnnnnnnnnnnnnnnnnnnnnnnnnnnnnnnnnnnnnnnnnnnnnnnnnnnnnnnnnnnnnnnnnnnnnnnnnnnnnnnnnnnnnnnnnnnnnnnnnnnnnnnnnnnnnnnnnnnnnnnnnnnnnnnnnnnnnnnnnnnnnnnnnnnnnnnnnnnnnnnnnnnnnnnnnnnnnnnnnnnnnnnnnnnnnnnnnnnnnnnnnnnnnnnnnnnnnnnnnnnnnnnnnnnnnnnnnnnnnnnnnnnnnnnnnnnnnnnnnnnnnnnnnnnnnnnnnnnnnnnnnnnnnnnnnnnnnnnnnnnnnnnnnnnnnnnnnnnnnnnnnnnnnnnnnnnnnnnnnnnnnnnnnnnnnnnnnnnnnnnnnnnnnnnnnnnnnnnnnnnnnnnnnnnnnnnnnnnnnnnnnnnnnnnnnnnnnnnnnnnnnnnnnnnnnnnnnnnnnnnnnnnnnnnnnnnnnnnnnnnnnnnnnnnnnnnnnnnnnnnnnnnnnnnnnnnnnnnnnnnnnnnnnnnnnnnnnnnnnnnnnnnnnnnnnnnnnnnnnnnnnnnnnnnnnnnnnnnnnnnnnnnnnnnnnnnnnnnnnnnnnnnnnnnnnnnnnnnnnnnnnnnnnnnnnnnnnnnnnnnnnnnnnnnnnnnnnnnnnnnnnnnnnnnnnnnnnnnnnnnnnnnnnnnnnnnnnnnnnnnnnnnnnnnnnnnnnnnnnnnnnnnnnnnnnnnnnnnnnnnnnnnnnnnnnnnnnnnnnnnnnnnnnnnnnnnnnnnnnnnnnnnnnnnnnnnnnnnnnnnnnnnnnnnnnnnnnnnnnnnnnnnnnnnnnnnnnnnnnnnnnnnnnnnnnnnnnnnnnnnnnnnnnnnnnnnnnnnnnnnnnnnnnnnnnnnnnnnnnnnnnnnnnnnnnnnnnnnnnnnnnnnnnnnnnnnnnnnnnnnnnnnnnnnnnnnnnnnnnnnnnnnnnnnnnnnnnnnnnnnnnnnnnnnnnnnnnnnnnnnnnnnnnnnnnnnnnnnnnnnnnnnnnnnnnnnnnnnnnnnnnnnnnnnnnnnnnnnnnnnnnnnnnnnnnnnnnnnnnnnnnnnnnnnnnnnnnnnnnnnnnnnnnnnnnnnnnnnnnnnnnnnnnnnnnnnnnnnnnnnnnnnnnnnnnnnnnnnnnnnnnnnnnnnnnnnnnnnnnnnnnnnnnnnnnnnnnnnnnnnnnnnnnnnnnnnnnnnnnnnnnnnnnnnnnnnnnnnnnnnnnnnnnnnnnnnnnnnnnnnnnnnnnnnnnnnnnnnnnnnnnnnnnnnnnnnnnnnnnnnnnnnnnnnnnnnnnnnnnnnnnnnnnnnnnnnnnnnnnnnnnnnnnnnnnnnnnnnnnnnnnnnnnnnnnnnnnnnnnnnnnnnnnnnnnnnnnnnnnnnnnnnnnnnnnnnnnnnnnnnnnnnnnnnnnnnnnnnnnnnnnnnnnnnnnnnnnnnnnnnnnnnnnnnnnnnnnnnnnnnnnnnnnnnnnnnnnnnnnnnnnnnnnnnnnnnnnnnnnnnnnnnnnnnnnnnnnnnnnnnnnnnnnnnnnnnnnnnnnnnnnnnnnnnnnnnnnnnnnnnnnnnnnnnnnnnnnnnnnnnnnnnnnnnnnnnnnnnnnnnnnnnnnnnnnnnnnnnnnnnnnnnnnnnnnnnnnnnnnnnnnnnnnnnnnnnnnnnnnnnnnnnnnnnnnnnnnnnnnnnnnnnnnnnnnnnnnnnnnnnnnnnnnnnnnnnnnnnnnnnnnnnnnnnnnnnnnnnnnnnnnnnnnnnnnnnnnnnnnnnnnnnnnnnnnnnnnnnnnnnnnnnnnnnnnnnnnnnnnnnnnnnnnnnnnnnnnnnnnnnnnnnnnnnnnnnnnnnnnnnnnnnnnnnnnnnnnnnnnnnnnnnnnnnnnnnnnnnnnnnnnnnnnnnnnnnnnnnnnnnnnnnnnnnnnnnnnnnnnnnnnnnnnnnnnnnnnnnnnnnnnnnnnnnnnnnnnnnnnnnnnnnnnnnnnnnnnnnnnnnnnnnnnnnnnnnnnnnnnnnnnnnnnnnnnnnnnnnnnnnnnnnnnnnnnnnnnnnnnnnnnnnnnnnnnnnnnnnnnnnnnnnnnnnnnnnnnnnnnnnnnnnnnnnnnnnnnnnnnnnnnnnnnnnnnnnnnnnnnnnnnnnnnnnnnnnnnnnnnnnnnnnnnnnnnnnnnnnnnnnnnnnnnnnnnnnnnnnnnnnnnnnnnnnnnnnnnnnnnnnnnnnnnnnnnnnnnnnnnnnnnnnnnnnnnnnnnnnnnnnnnnnnnnnnnnnnnnnnnnnnnnnnnnnnnnnnnnnnnnnnnnnnnnnnnnnnnnnnnnnnnnnnnnnnnnnnnnnnnnnnnnnnnnnnnnnnnnnnnnnnnnnnnnnnnnnnnnnnnnnnnnnnnnnnnnnnnnnnnnnnnnnnnnnnnnnnnnnnnnnnnnnnnnnnnnnnnnnnnnnnnnnnnnnnnnnnnnnnnnnnnnnnnnnnnnnnnnnnnnnnnnnnnnnnnnnnnnnnnnnnnnnnnnnnnnnnnnnnnnnnnnnnnnnnnnnnnnnnnnnnnnnnnnnnnnnnnnnnnnnnnnnnnnnnnnnnnnnnnnnnnnnnnnnnnnnnnnnnnnnnnnnnnnnnnnnnnnnnnnnnnnnnnnnnnnnnnnnnnnnnnnnnnnnnnnnnnnnnnnnnnnnnnnnnnnnnnnnnnnnnnnnnnnnnnnnnnnnnnnnnnnnnnnnnnnnnnnnnnnnnnnnnnnnnnnnnnnnnnnnnnnnnnnnnnnnnnnnnnnnnnnnnnnnnnnnnnnnnnnnnnnnnnnnnnnnnnnnnnnnnnnnnnnnnnnnnnnnnnnnnnnnnnnnnnnnnnnnnnnnnnnnnnnnnnnnnnnnnnnnnnnnnnnnnnnnnnnnnnnnnnnnnnnnnnnnnnnnnnnnnnnnnnnnnnnnnnnnnnnnnnnnnnnnnnnnnnnnnnnnnnnnnnnnnnnnnnnnnnnnnnnnnnnnnnnnnnnnnnnnnnnnnnnnnnnnnnnnnnnnnnnnnnnnnnnnnnnnnnnnnnnnnnnnnnnnnnnnnnnnnnnnnnnnnnnnnnnnnnnnnnnnnnnnnnnnnnnnnnnnnnnnnnnnnnnnnnnnnnnnnnnnnnnnnnnnnnnnnnnnnnnnnnnnnnnnnnnnnnnnnnnnnnnnnnnnnnnnnnnnnnnnnnnnnnnnnnnnnnnnnnnnnnnnnnnnnnnnnnnnnnnnnnnnnnnnnnnnnnnnnnnnnnnnnnnnnnnnnnnnnnnnnnnnnnnnnnnnnnnnnnnnnnnnnnnnnnnnnnnnnnnnnnnnnnnnnnnnnnnnnnnnnnnnnnnnnnnnnnnnnnnnnnnnnnnnnnnnnnnnnnnnnnnnnnnnnnnnnnnnnnnnnnnnnnnnnnnnnnnnnnnnnnnnnnnnnnnnnnnnnnnnnnnnnnnnnnnnnnnnnnnnnnnnnnnnnnnnnnnnnnnnnnnnnnnnnnnnnnnnnnnnnnnnnnnnnnnnnnnnnnnnnnnnnnnnnnnnnnnnnnnnnnnnnnnnnnnnnnnnnnnnnnnnnnnnnnnnnnnnnnnnnnnnnnnnnnnnnnnnnnnnnnnnnnnnnnnnnnnnnnnnnnnnnnnnnnnnnnnnnnnnnnnnnnnnnnnnnnnnnnnnnnnnnnnnnnnnnnnnnnnnnnnnnnnnnnnnnnnnnnnnnnnnnnnnnnnnnnnnnnnnnnnnnnnnnnnnnnnnnnnnnnnnnnnnnnnnnnnnnnnnnnnnnnnnnnnnnnnnnnnnnnnnnnnnnnnnnnnnnnnnnnnnnnnnnnnnnnnnnnnnnnnnnnnnnnnnnnnnnnnnnnnnnnnnnnnnnnnnnnnnnnnnnnnnnnnnnnnnnnnnnnnnnnnnnnnnnnnnnnnnnnnnnnnnnnnnnnnnnnnnnnnnnnnnnnnnnnnnnnnnnnnnnnnnnnnnnnnnnnnnnnnnnnnnnnnnnnnnnnnnnnnnnnnnnnnnnnnnnnnnnnnnnnnnnnnnnnnnnnnnnnnnnnnnnnnnnnnnnnnnnnnnnnnnnnnnnnnnnnnnnnnnnnnnnnnnnnnnnnnnnnnnnnnnnnnnnnnnnnnnnnnnnnnnnnnnnnnnnnnnnnnnnnnnnnnnnnnnnnnnnnnnnnnnnnnnnnnnnnnnnnnnnnnnnnnnnnnnnnnnnnnnnnnnnnnnnnnnnnnnnnnnnnnnnnnnnnnnnnnnnnnnnnnnnnnnnnnnnnnnnnnnnnnnnnnnnnnnnnnnnnnnnnnnnnnnnnnnnnnnnnnnnnnnnnnnnnnnnnnnnnnnnnnnnnnnnnnnnnnnnnnnnnnnnnnnnnnnnnnnnnnnnnnnnnnnnnagcgaagaaaaaatttgattgaaattttgataaagaataagttaattactagcaaaacgttattagcagaaacaggaaaaagtactacctttttgactttatcattaagagctaaatcggcaaaagaaagaatagagttagaagagttagcgaaggttttattgacaattaacaaaaaaagaggttataaaagttctcgtaaatctaaaaacgaagatgatggacaagctgtgatggaatggctgttgcaaaagaattgtacgaaagagaaataaaaccttgtcaatatgttttagagttattagagcaaaataagaaacatatccccgatttttatcgctccgatttacaggaggagtttaatactgtttggaaatttcaacaacagttttacgaaagtatattgactttagatttgtatgatgagttaaaagggaaaaataaaggagctacgtggaaaatatgtgaaactccttttgaaatagaaggtgttaaaatagaagggaaaacggcaaaggaaaagaagaaaaatatttataaatatagagtaaaggctctttctcaaaaagtaaatttagaagaattagcaatagttttacaagaaataaataacgacttaaataaatcgagtggatatttaggagctataagcgatagaagtaaagaattattttttgataaaatcacagttggagaatacttgtataatcaaatcaaaaaagacaggcatacatcattaaaaaatcaagtattctatcgccaagattatttagacgaattcgaaacaatctgggaaacacaagcaaaatttcatatagaattaaccgaagagttaaagaaagaagttagagatgtaattattttttatcaacgtaaattaaaatctcaaaaaggattaatcagcttatgtcaatttgaacagggtaaacaagtttattttgataaagtagcaaataaagaaaaaacaagagttataggacaaagagtaatcccgaaatcttctccattatttcaagaatataaaatttggcaaaatttaaataatctggagtttaagaatgaaaagctaaatgaaaaaatagaatttattaaattagataatgaggttagaaatgaaatatttgaagaattaaatttacgtggagatttaaagcctaaggatgttcttaatgttttgaacaaatatttagagctagggaaaatatctgattggaagtgcaactttgaaaaaatagaggggaatcgtacaaatcaatcgttgttcaatgtttataaagccattgtagaaaatgaggggcatggttttgattgggataaaaaaaaggccattgaaattaaggaagagttaaaagctgtttttgaattaataggaatagacaattctattttagattttgatacaatgctaagtggaaataaacttgaaaaacagtcaagttttttactttggcatttattatattcggcagaagacgaaaataaaataaaagcagaagacaagttggtttatggtaatacaaatgtaggaataaaaaaagtcttgcatcttaaatatggctttaaaccagaatatgcaactctaatagcaggaattgattttataaacgactatggaagtttatcttctaaagctatacgtaaaattttaccacatttagaagacgggaatgactattatgaagcatgtgctttagcaggttataatcattcaaatagtttaacaaaagaagagttagataagcgatttttaaaagataaattggatttattgcctaaaaatagtttacgaaatcccgtagttgaaaagattctaaaccaaatggttaatgttattaatcaagtttcggaagagtatggtaaaccagatgaaattagaattgagctagctagagatttaaaaaaatcggcaaaacaaagagaaaaatcagttaaattaataaatgaaaatacgagagcaaatgataaagtaagagaaatcatcaaaaaagactttggttttactgctactaaaaatgatgtaattcgttataaactttatcaagagttgaaaaataatgggtataaaaccttatttacgaataagaaaattgattatcgaacagagcttttttcaaaaaatatagatatagaacacattatacctaaagcaatattatttgatgattcattttcgaataaaacattagcctttagagatgtaaatttaaaaaagaatgcaagaacggcaatagactttattgaaggagattacaataacgatttagagaattataaatcaagagtagaaaacttattcaaattaggagctattactaaaggtaaatataagaagttattaatgtcattagaaaatttgccgacagattttatagctagagacttagtcaacactcaatacatatctaaaaaagcaaaagatatgttattagaagtttttccaactgtagtttcaaccagtggtagaatcacagataggttaagagccgattgggatttaatcaatgttatgaaagaattgtctatttctaaatatagagccttaggattaacggaagttcaaacaagaaaaggaggcaaagaagttgaagtgattgttgattggacaaaaaggaatgaccacagacatcacgctatggatgctttaactgttgcttttacaactcacaatcatattcagtatatcaataatatgagtgctcgaaaagataacgagtttaaagttgggatagcgaaaataaaaaacacaattaaacataaggttaatggaaagtctatctttattgctccaatgcctaattttagacaagaagcgaagaataaaatagaagaaatattaatttctattaaagcaaaaaataaagtagtaacaaagaacattaataaaacaaagttaataggaaaggataattataaaaaaacagaacaattaacaccaagaggacagttgcataaagaaaccgtttatgggaaatcgaaaagagagctatctaaaaaaacaaaaatttcaaaaagatttacattagatgatgccaattttattattaataaagaacaacgtgaaatcgtattaaaacatttaaaagagtatagtaacaatcctttggtagcttttgatacgaagacaataaaaaaatctccaattttatataaaggagagccattaaaagaagtgttttgttttgaagaaatctatacgattcgaaaagatataaaccctgataattttaaaaataaaaaaagtttagaaaaaataatagataaaaagataaaaatagctttagaaaatcgactaaacgaatatggagataatccaaaagaagcattttctaatttagaagagaatccaatttggttaaataaaaaagaaggaatctccataaaaagagtaaaaattacaggtgtgagtaatgtagaagccttacattataaaaaagatcgttttggtaacgaaattttagattcggcaggtaataaacaagccgttgattttgtaagtactggaaataatcatcatgttgctatttatgaagatagcaaaggtaagttacaagaaagagtagtttctttttatgaagcagtagcaagagttaatgcagaattaccaatagtagataatctatataaaaaagatgaaggttggaagtttcaatttacaatgaagcaaaatgaaatgtttttatttccgtctgctaattttaatccattggaagttgatttattgaaagttaaagatttaaaaatacttagtgagaatttatatagagttcaaaagatttcaactaaaaactatatgtttactcatcatttagaaaccgaagcaacaacaggagatgatttaaaaaataaaaaatgctatctaagaaaaaatattattcgataagaagttctgaaaacttaaaaggaatagtaaaagtgagaataaaccatattggtaaaatagttcatgtaggtgaatatagatagaaaaacaaaattgatacgatgacttaaagtcatcgtatcaatatctcaaataccccaaaacaaatgaaaaggaaagactttttaacaacactaggattgtcctcggcttctatcgtattaccgtcaaacggttttataaacgaacaatctatcaatatttacgacaactatttatcgggagttcagttttatgattttgatgaaattaccgaagtgataaaagaaggagatatattgattttacttcgtgaaaaagaaaataaatacgattcttttgcggtgtctatctatttcgataaatataaaattggttatattcctgcttacgaaaacatagtaatagccaatatgatggacaaagaaattaacctaaaagtatttgtaagtaaattagaaaaagagaattatcagggttacagaagcatcgctgtacaaatattagcccctttaattgtccctactcaaaagctagtagatttaatcgaaacctccaaaagagcagacgaccataatgatgaataccgaagccgaagtttttaattaactctattgatacgatgacttggagtcatcgtatcaataaataatgactaaaccccaagataaaatgaattttgaaaacggctacatctaccacgtctttaaccaaggaaacaatggtcaaatcatattttttaatagagagaataaactttatttcttaagaaagctaaaacaatttattagtcctcattgcaaagtattggcttggtgtttaatgcctaatcattttcatttaatgatttatgttactaatgttgaagctgtagagaaagaaaaatcgagaacactaaatcattcaatcggtgtgtttttaagaggttacaccagagccattaataaacaagaagctagaacaggttcattgtttaaagcccataccaaagctgaatgtctaaattgttcaactttaacagaattatcatttatagacaaaggaaaagaattgggactaactcggtctattcctgagagagaatatcttcaagtttgctttaactatattcatcaaaaccctgtaaaagcaagaatggtaactaaagccgaagattacgaattttcttcagccaaagattacctagggttaagagaaggaaaattaattgataagaaattagcagaagaatatttatcgctcatataatggacttatactc

SEQ ID NO: 2406 - DNA, 14880 bp, synthetic construct
  misc_feature 1..14880: note = Synthetic
  source 1..14880: mol_type = other DNA
gctttcactgcaaactcttcttcaactgcattatagttttggcttttcactgtatcaatcgtttcgctaattgtattatgaaccgattctgtactggcatctaccaaagctgttttatttgaaaagtacttgtataatgtttttttagacattccaagttcttttgcaatatcatccatcgtagtgcttttaaacccaagggttaaaaacatttcacctgctttattaattattttatctctcataattgtttgcaaatgtacaacaggaaactctagaaacaaaaaaagtttccagagttttaatctttttttaacattaccttatagttaaaatttatctttaccttatttttacaaaaattttcaaatttggacatattatcatatcaatcagactttataacttttttagaatctcaaaaattttcaagagagcctaaaaacctttacgaaccagtagactacatactaagattaggcggtaaaagaattagaccgatactaaccttaattgctgctgatgttttttcaaacgattatgagaaagctttaccagctgcatttgctgtagaagtttttcataactttactttagtgcacgatgacataatggatgatgctcctttaagaagaggaaaggaaactgtgcatgaaaaatggaatataaatacaggaattttatcaggtgatgctatgcttattctagcatatcaatactttgaaaactatgaacctgaaattttccaaaaactagcacaattatttagcaaaactgctttagaggtttgtgacggtcagcaattagatgttgattttgaaactagaaatgatgtaactattgatgaatacattaagatgattacattaaaaacctctgttttagttgctgctgctttaaaaatgggtgctatcgttgcgaaagctgatgaagaacaagctcaacacttatacaactatggattaaacctaggaattgctttccagttacaagatgattacttagacacttttggcgatcctgaatcttttggtaaacaagctggtggagatattatcgaaaataagaaaacatacctttatttaaaggctttagaagtagcaaatggtactgacaaagaagatttaataaatctttataacggaaaacaaaaaaataacactgaaaaaatagccactgtttcgactatttttaaggagaataacatacctgaagagacacacaaactcattgagtactatacagataagtcgtttgaaagcttaaatcaccttaacatttctgataagcacaaagaaggtttacgtgcttttggtaaaaatttaatgagcagaaaagtgtaaaaaaataggtttttatttaaaaaagtttttatttttgcaatccaaatttaacgggtcctatagctcagttggttagagcacctgactcataatcagggggtccatggttcgagcccatgtgggaccacttttaaacccttgaaaacactgattttcaagggtttgtttttcaacaaggaaagcagaggggaaagaaaaaatataaataaacaccttatcctttttagtttcgcttctttattttttaaattaaccatccctatcctttattctttttccaaaaaacatcacaaattaaggttttacatctgttatcactcttagtattccccttttattaattactcctttgattttatgatgtaaacgaataaccactttaatccctgatgagtttttttgtctttttatgttaaacggttataaatttatcatccgtgttaatttcaagtaagttaagaaagtcagagactcttaaacctacccaaaaaccaataataactatatctctacaatcttctaattttttatcgttataaaatcatgattaaaagtctgtcaatatctttttcgcagagctacaaacacacttttttctttgataacggaaactctctggatcacaaaagcaattttaatcaactaattaatagtgttttgttttttttaagggtaagttttgtggtgatttgttgtaagtaagtattagttaaaaatagatgttttttaaattgaattatttgcttttacttctccttaattttctaatactaacattaaattaattatcaaacccaaaaaactccttaacttcaatagcaaaagcaatttcacctccaattaaaataataattatcccaaactcttttaaaaccagtaatcaattcttcatttctttttataatcaatgataaaatattactattattaagttttaaccaagaaaaaagcgaacgtttttaacgctcgctctctcagtaattgttagttctcttttactcccaatctggcattgtagcattttcaaacaatgctgttcttgttgtagatccttcactaaaaggtactttataaattgttcttgtggaaattccatcattggatgtattcacaaagataatttcagcctcattaggtgataagcgtgggtctaaatcatttgttccattagcttttccttctgataaatcagtaacttctgccgtagcaaactcatataaaaagatatgactatttagtagtctataattactcgattcatattcagaaacatctctagtgtataacagcgagcttccatctattgtaaaattaattcctcctgcaccaccttgtactcctgttaaaacagtgtcaattatatttcctgtcatatcaatcgtatagatttgtacattatacccacttgtattattggttttcagtgctattttagattcatcattactccaatcgcattcagtaatgtaattaccatctattgtttgatatatttgctgtaaaccgcttccatctttatttatcaaatataatttatcgtaatgcggatatatgattcgatctccgtttgaagaccaagagaaatcaacttcgtttaaatcaaacgcaactacaggaacattagaagtaactttttgaacatctgaaccatctgtattcattgtataaatgtgagtttcgttattgtctgtccgtaagaaggcaaccaaattcgctgctgaattttttctaggtctccaagagtttgtggttggggaagttaacaaaagttcatttattggtgcttcgttgatataatctcctgagtaaataacattatttcctgcttcttgttttgtgtaaaagtatctattatcaggtgttgatgtcactttaaacgtacttacagtacttaatacttctgcattaatattatctgaagcagcaacttgccaaaaatattttactccaaattttaaatcggttactgtatacaaagtgtcttttatattttcaaaagatattacatcattatttaagtcatttttaacttctattctgtatgttatttcatcttcatctggatcagttgatttaaagcttaactctaccgtgttatttacatcttctatcccattaactggagctcttaattctggcgcagttggcgggtcgtttaaagcggtttcgatatctaattcaaaaactacattaatttctgtttctgctcctaaacctacaggttcaaaacctgttaaatacccttctttagttgcgcttacagagtagtcttgtgctggtacatcctccattaaaaagtaaccatcttcatctgtaaaagttgtattattggttggtgacaatgttattttagcattagctattggttcaaaacttctctttttaactacacgccctttaatagtaccaaattcaacaaaatccacagtatcttcactacagttaaataaggttacacacattaaaagtattgttatttttattatgcttttcattactttttttcttaaaaataaacatttatacctgctcctattctccaaataaaatcgtttctttttcctctaactaacttatctaaattatctgagcttaaaagatagttttctccataaagagttaaacctattttattggttattaaatactctaatcccagaccatactgaaatttaaacatagggttatctaggtttttttctaaaaccgatccaatcccaacatacgcataaggtgttaacctatcataaggcaacatattgtattctaaaaatagacttgatgttaaaaatgtattttcaaaagacctttcattttctagtgaaaacttccctatacttcctccgaaactaaatcttggatccttaaaaaagtacctatattttaagtcaaacccaaaccttgcaactggatttgaataatcaccagaaattattgaagttcctcccataacactcattgaattggtagcccttcttttttcttgttttctattaaataataaagtattatctgcttcatttttttcttttaaatattcttttttaaagagattaacaaccgtattacctccttgaggagtccataaaccatctacaacaccttctataatcaactgttcgactgctttatctatagcttcttttacagctaattgcataggttcatttttggttactccagtttctacttctaacaaccttcttaaagaaacatatctatataagtttgctgaaattccttgagagagtactgtttttgatacgtaaatattttttaaaatttgtccgtttgatgtagatacggctcttaaataaacggttattctgtcttgtctatattgattagatgctcccgctccaaaatatcgaactcctgaacctcctgtaataatattagaatcataagaaaccacacctccttctaaaatgattccagcaaaaagtaatggtggcatttttgtagagttaactccttgatattcttgccttgttgaccttattatttgtcgttcatttaataagttagcgatattttctctttctattggagtaaaccattttgattcttctaatgattttaataaaattgatgtacctccttgcgttaccgcagtactaaatgtagaaccgttttcagtaggcttgtattgtcctgtttgatctctaaatttataaactcctacgattattttttcgacaggttgaatgtttttaattaaatcgttttgaaaagaggtgttttctcctattctagcattcgttgtttgaaatggctgattaaggtatgctccacaactagaaaacaagataaaacttaataaagagaacaataatttgagtaatagttttctcataaaatttaagttatagttaatcgttttgttttaattgtttggtattattatttgtgtttgttcaccagtttgtgtgtttaaaatattcactgataaccctccacttgtaggtgtaacttctactactaaagatccaaacacgtaagttcctacagttaatccttgatctccaaactgttcttgaaataggtcttgcgacaatgaatttagtaattgcctgtttaagctatttgtaaaattctctaaatctgaaggttgttgaaaaggatcttgcccttcttcttgaaagtcgttttgtgcattagctgaagccaaaatttgctgatatccaaatggattatttcctccaaaaaatggatttaccggtttataaactagttcttgtgaaaaagcaaatgagcttagtaaaaaaaaaactattgttataagtttggttgctattttcataattcacttttttaaattttataacttaataatgtgtttctctgttttgaataactacttaatcttaccaaagatgctttaacagctcgcttaagaaaatcttctcctggcatagtcatgaactcaaaaatctttttatcatcagcttcaataattaaaactgtagttcttcttaatcctggtttttcttttatttttatgataaaaggatattttaagcctgagagcagatactcttgataaaaaaaatcataaaagtcttttcctatttttgttattgcttcttcaataaccaatccttttaatacaaaattagactcatctattttttctttatttatcacgcctacctttttaggtattattactagagtgtctttatctatcaattttttcctgtgctttataaataaataagctcttaattcttcatcagggtttaaactcaatcttattactgaaagctcttttttctcgttaggttttaaagaaaattctcccgattgtttattgttagaatagtttccttctttattcttctttagtactaataagttataattaagctcatctttaaacaacactccttcgttttcagcttctgcttttacagttataaaattatcttttttaagaataagtattttagctttaacattgcttatttcttgtgcaaagcttgtagttgtacacagtaaaaatagagtgacatattttaaaacgtttctaaaaaaaataaaccttaacattttttaataattcctaactataattgttttataattagatttttgaatgatttttacattttccatcaaagagtttgttccataaataagcaatgagtttgcattaccttcttgaagagcatttatttttgttggtgaattattataataatctataaaattataatagttatctctacctttttgccctatcaactgtatgtcattcattccgttttttacttctacaacattattaactcctaactgatttactgacaaatcataattatcaatcgatttatcataatcttgtaaattatttaatgagttaatatttttttctaaaaccagaaaagaagcatcactccctatttgaggtacagacacaaagtaagtagatgtattttgttgtgtcatagcttttaaactaaatattaataggattatacacaatgtcatttttatccttcgcatcattactttagtttcttattaataagggagaggaaaagaaaaccctcccattctcccttatctttgttgcttaattaaaagtttataatcctgtttgttcaacacaagctttgttcatgtaacctgcctgtccaataaaactagcatttccagaaccttgtgcatcttgaataacagaagcatgattttctacaccaaattgactaattaaacttaagttaatccctgcatctgcattttgatcaacgcaagctttgttaccccaacctgtttgtgcaataccagaaatatttaaacctccatttgaagattgatttgtagaagctacattttcgttgccaaactgagcaataccatctatattaaagctacctctttgaacttgtttagctttattataattaccaatttgtaaaatacccgctacacttcctggcgcaccattagttcctgtgctttgatcttgatgagcaaagtttcttctacctgattgtgctacaatagctacattattatcataacgttgtttttgaatagaagtgttttgacgtcctgtttgataagcataagctctgttgttttctgcccaacctacaccaacatcttgttgtgcatagtttttatatcctacttgatttacaaaaccagagttataatctccatgttgtttaatgtcggtttcgttctttcttcctctttgatatacagtagcttcatttcccaaacctcctgaaaacccttgattctgaccatcttgatcaattttagacaggtttccaactccggtttgaacaacacttgcgtcattcatatgtcctgtttgatctacataacttgtgttaattacggctcctctatttccataggaaggtcctacttgcgaaactgaacatccaagacaattagctttaggtgttggtaatggattagcgaactgtgcaaaagctgttcctgaagctaaaaaaatagctgctaataaaaattttttcataatagataattttaaaatacgttagttaatttttagcatactctatctacgacaagcatacaaatagtaatgatgcttattgtgggagaatgctagtaaataagggtaagataaaattatggggtaaaatgcaaaggttagtttgataaccgtgattacatccatcagtttaaaataaaactgtaagaaactatatatagtttgtctgtttaaacgtagctaatatacgattttttcagtttcaaaaaccaataaagatttctttacttttaaaaaaagtgaataagagaagccaaaaacacgctataaacgtagcctttagctttacatttctttatccttaatttaaaaaaaaggggagaatcccccttttttttaatgtattttcttctttaaaataagttactttatctaataaacaaaagttttttatttcttgttaagtagtatttgtctttttgcttctttactttattcgattagtctgattagggaaaataaaagtattaacgaattaattttgttaccttataattagaaatttgttttacgaccttttcactcgtagtttttttacttcttcaatcgtaagaccagtgtttttagcgattaactcattatcaagaccacttcttttaaaagctttagctatttctattttctcactacgtttagctatttcagtagcttctttttttagacgctgctctaacacgtatttgggtacatattttgtgctttttttaagttcatctagtaacccaatatctccaaaactaagatagctcttctcagatattataagatggtctaccacttcagtatccacaataatgcctacttgtattaaacggtcagaaatatctttgtctgcctctgaaggttttaattcaccacttggatggttatggcataatatgattttaacagctcttttttgcaacgcaaaactaaatacctccataggctccaccaaggttgcattgacagttcctaaacttatgagctcaataaaaagaatacggttgttattagctaaaccaataacccaaaaatgttcacggttttggtctattttattgtctcttaataaaatacgttgcataattccgtaaatatcgtcggaatttaagatttttatcttctcttgttctgtcaattttatatccatagaaacaaatgtaagattttatctcttaatgtttgccagttctaattgtggtaacaaaaaaagcgacaaagtaataccttgccgctttaaatgttttcacaacggaataatccttattgtgaattgatttcaaaattgtagagctaatatacatctttttaaattagtagattatggctttccttttttttaagaataaaaaaaaacttacttttattgtccaaggcaacttattttaaaattgctgctattcctcttaaaaaagtaaaaaatatcgcaaaatttcattttgtgtaatacactcgtatctaaaaaaaataaaatgactaaaaaaattttaggtcttgatttaggtatcacctcaatcggttgggcattggtagaagaagctgaaaataactcggaagaatcaaaaattataaagttaggagttagagtaacccctttgactgttgatgaaaaaaccgactttgaaaaaggacgcccttcaagtactaatactgaaagaaccttaaagcgtggagcaagaaaaaacttacaacggtataagctaagaagagaagctttaattaatgagttaatcaatcataatattatctcaaaagaaactccattaacagaaataggaaaaaatacaacgcatcaaactttatatctaagagctaaggcagcaaaagaaagggttgaactggaagactttgcaagaatattattaagtatcaataaaaaaagagggtacaaaagtagtagaaaagcaaggaatgaagaagaagggggagctattgatggaatgtcaatagcaaaagagctatacgaaaacaacttaacaccaggggaatatgtgctaaatttattagaacaaaataaaaaatacattcctgatttttataaatctgatttacatgatgagttcaataaaatatggaaaaatcaacagaagtattattcagaaactcttagcgagcccttatataaagaactgctagaaaaaaacaaaaaacaaacatgggctatttgtaaaactccttttaacttagttggaatcacacaaaaaggaacagcaaatgaaaaaaggttagaacgttatcagtggcgtacaaagggattgactgaaaagttagaatttgaacatttagctattgtccttcaagaaattaataatgatttgaacaaatcgagcgattatttaggcgcaatttctgacagaagtaaagagttacattttaaaaatataaccgcaggagaatatctgtaccaacaaattcaagaaaacccacataactcactaaaaaatcaagttttttacaggcaagattatatggatgaatttgaaaaaatatggtctgtacaaacactatttcataaagaactaacgctgcctttaaaagaaaaaattcgagatattattattttttatcaacgaaaattaaaatcacaaaaaggacaattggacttttgtcagtttgaaagttgggagcaagagtatatgaacgatacaaccaataaaaaaataaagaggcgtattggtcgtcgtgttgtacctaaatcatccccattattccaagaggttaaaatttggcagatactgaacaatcttattttttctaataaaaacacaggcgaccatattgcgattaacgatttggataaaaacataattgatgaaatttttcaagagttaaaccttagaggtgaacataaagcaaccagtgtgcttaagattcttaaaaagcatatagtactaggaaatcaaagtgattggaaagctaaccacgaaaaaattgaaggaaatactactaataaagcactatatgatgtttatcaaaaaattgcggagttagaggggtatggttttgattgggaaaagaaaacagccacagctattaaagaagagttaaaagctgttttttctgaaataggaataaatcaagatattttagaatttaacggaatactacagggtaaaaaatttgaaaatcaggtaagttatcagttatggcatttgctttatgcaactgaagaagattttaacaaggttagtaaagaagaccaaatgatttatgggaataatgctgtaagtttaaagaaaaagttagtttcaaaatttggttttaaacctgaacatacaaaaatgttagccagtatttctttttctcaagactatggaaatttatcaagcaaagcgttaaaaaagattttacccgaacttcaaaaaggatatacttattccgaagcttgtaaaaatgtaggatataaccactctaatagtttcacaaaagaagaacttgaaaatagagaactcaaagacaaacttgagctcataaaaaaaaatagtttaagaaaccctgttgtagaaaaaattttaaaccaaactgttaacgtagtaaatcaaattatagaaacctatggaaaacctgatgaagtatgtatagaattagctagagagcttaaaaaatcagctgatgaacgtagtaaaatgactaggaatattgctgaagcaaccaaaagaaaccaagatataaaaaagctaattattaaagattttggtattccaaatccaaccaaaaatgatgtaattcgttatcgtctttatgaagaactatcaagtaacgggtataaaacactgtttacaaacagaaaaataaataaagaagatattttttcaaaaaaaatagatattgaacacattattcctaaagctttagtatttgatgattccttttcaaacaaaacactcgcatatagagaagtaaatttagaaaagagtaataccacagctttcgattttattaacaacagcaatcattcaggaatagaggactataaattaagggttgagagtttgtataaagacggaaaaatatcgcccgcaaaaaggaagaaattgttaacctctaaagaagatattccaaatgattttattgaaagagacctacggaacagtcagtacatcgctaaaaaagccaaagcaatgttgtttgaggtatttcctagtgtagttgccaccacaggaagtattaccgataaattaagagaagattggggtttaatcaatgtaatgaaagaactcaatttaccaaaatatcgtgctttaggactcacggaatatgaagaacgtttaaataaagggactgaagaaataaacaaacgagaagttataaaagattggacgaaaagaaatgaccatcgtcatcatgcaatggacgctttaacagttgcttttaccacacacaaccatattcaatacatcaacaatttaagtgctagaaagcttacaaatcacaagaagcacaaaattatactaaatattgaaaatttaattaccgaaaacaaaaatggcaaacgcaagtttaaagcacccatatctaactttagaactgaagcaaaaaaacatattgaagcaatacttatttcatttaaaaacaaaaataaagtagtaactcgtaacataaatattacgaaaactaaaaataataccttacaaaaaaaacaattaactcctagaggacaattacataaagaaactgtttatggaaagattaaacgtccctctaaaaaaacgataaaactcaataaaaactttgaggcaagcactgcacagcaaattgtaaatcctgtacataaaaaaatagttttagaacacttaaaaacatttgacaacaacccaacaattgcttttgataggaaaacacttaaaacaaatccgctaatatgtaaaaataaacctttcaaagaggttgtttgttttgaagatatttacactattagaaaagaagtaaatccagagaattttaaaacacaaaaaaatatcgaaaaagtaattgacacaaaaacaagacagcttttaatccaacgtttaaaagactacgataacaatgcgataaaagctttctctaaccttaagaaaaaccccatatggttgcataaagaaaaaggtatttgtataagaagagttcgtattacaggtgttagcaacgctgaggcattgcatacaaaaaaagaccatttaggaagagaaattttaagtgaacaaggtaataagcaagcggttgattttgttagcacaggaaacaaccaccatatagctatttataaagataacaaagggaatctacaagaaaaggtagtttctttttatgaagctgttgcaagggtaaataaaaacttgtctataattgataaaacatataaagaaaaagaaggctggcagtttttatttaccatgaagcaaaacgaaatgtttgtttttccaaatgaagattttgatataaatgaaattgatttaacagacgcaaaaaaagcatcgcgtattagtccatacctatttagagtacagaaaattgctactaaagactatttcttcagacatcatttagaaacaacagtagaagataataaaagcacaaaagaaatcgcatggaaaaggctaggtctaaatcatatcaagggtattaaaaaagtaagattaaatcaccttggtcaaattgttcaagtaggagaatattaattactgtaagagcccatatatatgtatatgggcttttttattaaaatcaaaccgttatgctaaaaagaaccatttacataggcaatccggcgtatttaaaactaaaacacaatcagctagtcgttgcatgcccagaaaccaaacagccaaaaggtacagtgtctattgaagatatggctatgctaatgttagatcatcatcagattactatatctactcaacttattaatcagttaatggggaatggtgttgcattaattcattgcgacaatcatcatttgccaaacggactcatgcaacctttggtaggacattctgaacttaccgaacgttggcgataccaattaaaaagttccatacccttaaaaaaacaactttggaaacaaactgtaatttctaaaatagaaaatcaaaagcagcttttacaacaaaataatagtccatttgaggcaatggatagctatttagaaaaagttacttcaggagatgaaacaaatatggaaggaaaagcagctaaccattattggaaatatatattaaccgattttcaacgagagcgctttggagatgttccaaataattttttaaattttggatatgctgttttacgtagtattgtagcacgtgctattgtaagtagcggtatgttgccagcacaaggcatttttcataagaataaatataatccgtattgtttagctgatgatataatggagccttaccgcccttttgtagataaacttgtattagaatatattacaaaacatccaacagaagatgctttaagtaaacaagccaaagcacacctattgcaaatagctactgaagatgttttgattgatgcaaaaatacgccctcttatggttgctgtaacaaccactacagctagcttgtataaatgctttataggagaaaggcgcactattttatatcccagtttaccatgagtcagaatcgttataatgcctatagagttatgtggatactagtcttgtttgatttaccaaccgaaaccaaagtagaaagaaaggctgccaatgtatttagaaaaaagttgttaaatgacgggtttacgatgtttcaattttctatttatatgcgccattgccccagtagagaaaacagtaaagtacatataagaagggtaaaaagttcactaccaaagtatggtaaagtatgtgtctttgaaataaccgataagcaatttggaatgatggagatttttcatggtagaaaagaaattccaaagccaactcctgtacaacaattagaattgttctaagtttaaaattctgttgaatgcaaaaacctccctaaaacaggaggttttaaacatttaccttgtgattgctcacgtaaa

SEQ ID NO: 2407 - DNA, 14815 bp, synthetic construct
  source 1..14815: mol_type = other DNA
  variation 7070..7372: note = n is a, c, g, or t
  variation 6373..6688: note = n is a, c, g, or t
  variation 7625..7827: note = n is a, c, g, or t
  misc_feature 1..14815: note = Synthetic
ataaccccagcccgatcacgagggagattctaaaagagtctccctttttttgtgtcataacttcgttggcaaagtatcttagatgtataggcaaagtatcttaggtgcgtgagccgatgcacttaagatactttttggggggagggatcgacaagaggttctttctttttccgactggaaaaactatatgcctatcctctatgattagctactgagctggaatttgtcttatatggattgaggaatatgccgtaaaagtaagtactacttactttgctatttaatatatacttactttgtcatttaatatatacagcaaatggcatagaagatgtactgtcttctcacgggtttctaccaagctggcatttaggctgattttagaacttcgtagcataaaaatcccccgcagaagggcgagggaacctaatgttttcacaacggaataatccttattgtgatttgcttcattttagtatggcaaatatatgaaatggaatgtttgcgtgcaagtgtttctgaaataaaatttttatatttgggaaaatataaagataacataccatgaaaaggattttaggcttggatttagggacaaatagtatagggtgggcgttggtgaacgaagcggagacagatgaggaagtctcgtcaatcatccgattaggtgtgagagtaaatcccttgacagtagatgaaacgcagaactttgaaaaagggaaaagtatcactacaaatgcggaaagaacccttaaaagaagtatgcgccgtaatttgcagcgatataaattacgtcgtgatgcgttggttgaatttttgaaagagctgggttttattaccgacgaaactatcctttcggaacaagaaaacagaactacgtttgaaacctgtcgtttacgggctaaagctgctgaagaagagatttctttagaggaactatcccgtgtcttattgatgattaataaaaaacgtggatacaaaagtagtcgaaaggcaaaaagggaagaagatggagttttgattgatggaatggagattgctaaaaagctgtatgaggaggatttgactccggggcaactttgttcgcagttacttgagtcgggcaagaaagttttgccagacttttaccattctgatttgcaagaagagttggatagaatatggaatgttcaaaagcaatttcatcctgatgttttctgtgatgccgccaaagaagaaatcaaaggaaaaaacagaagccagacatgggctattttggctaactattttgtttggaaagaggaagtgattagctggaatgacagagaagcaaagaatgaaacgatagaaaaagaatgtaaacttgtcggtcttaaacggacgactaaggggtatgaactgaaaaaggaaaattatcgttggcgtgtgcaagctcttactgaacaattaggtttggaagagatagctgtagtattgcaagaaatcaatggtcagataaatgcgtctagtggttatttgggagccattagtgataggagcaaagtgttatactttaatcatcaaacggtcggacagtatcagatggctgagttagacaagaatccccatgcaagtttgcgcaatatggtattctatcggcaggattatttggatgaatttgatagaatttgggaaaagcaggcagaatttcataaggaattaacggctgaattgaaaaaagagattcgcgatatgatcatcttttaccaacgacgtctgaaaagtcagaaaggcttgattagtttctgtgagtttgaaaggttggagattgtagtagaaaaggatggaaagaaacagaccaaagtcataggatgcaaggtgatacctcgttcgcatccattgtttcaggaatttaagatatggcagacattgaatgacataaaggtattggaaagagaaaagaaaagaaatgctttgtcggcaagcgaaagtagggctttgtatccagaagaaaaagaaatactggcaaaagaacttgcgataaaagaaaatatgaggaaagcagatgtgttgaagctcttatttgaaaatccacaggaattggatttgaacttcaaacaaatagatggaaatcgtactgggttttctctcttttctgcctatagcaaaatgatagaaaagtatggctacgaaccgttggattttaagaaaccagtagatgagataatcggacagctaagaactatctttaccgatttgggttggaatacgaatctgtttaccattgacttaaccaaagaggggaaagagctcgagatgcaaccttatttcagactttggcatctgttgtattcttttgaaggagataatacgccgaccggtaacggcaaactgattgaaaagatcatgcaactttgcggagttgagaaagaatatgctgtagagctagccagtctttcgtttcaagatgattacggaagtttgagcgcgaaagccattaaaaggattttaccctatttgaaagatggtaatcagtatgatgtggcttgtgaatatgccggttatcgtcattccaaatcttcactgaccaaggaggagatagaaaataaggttttaaaggacaaactgaatgttcttcctaaaaacagtctccgaaatccggtggttgaaaagattttgaatcagatggtgaatgtaatcaatacaatcattgatacatatggaaaacctgatgaaattcgagtggaattggctcgcgaattaaagaagagtgccaaagaacgtgaggaactgacgaaagctatcgcaaagagtacccgtgagcatgaggtgattcgtaaattgttgcaagctgaatttggtatgatgaacgtgagccgcaatgatattatccgttacaaactttatgaagagttgaaagataatggatataaaacattgtattccaatcaatatatacctaaagaaaagattttcagtaaggagatagatatagaacatattattccacaatcccgtctttttgatgattctttatctaacaagacattggagtataaggccattaatatagaaaagggaaataagaccgcttatgattttgtaaaagaaaaatatggagaagaaggcttgcaacaatatataaatcgttgcgaaagcttgttcaatgacaaaaaggcgaaacttcggaaattgaaaatgggacagaaggatatatcagatggtttcattgatagggatttgagaaatacacaatatatagcgaaaaaagcactcgctatgttgaacgaaatctgccgtagagtagtggcaactaccggttccattacagaccaattgcgtgaagactggcaattggtggatgtaatgaaagaactgaacctgcccaaatatgaagccttgggttttgtggaaacatacgaagataaggacggaagaaaaatcaaaagaataaaggattggacaaaaaggaatgaccatcggcatcatgcgatggatgcgctaacggtagcttttacaaaagatgcgtttattcagtatttcaataataaaaatgcggcacaagattcagacaatagaaaccatacgaatataataggtatcaagacccgttattttgacaaaggaagagctttgcctcctattccattggagcaattccgggtagaagccaaacggcatttggaaaacctgttggtatctattaaggctaagaacaaggttgtgactgtcaatgtaaatcgaacaaaaaagaaaaagggtgaaaatacgaagatacagcaaactccgcgaggtcagttgcatttggaaacgatttatggtagtcttaaacaatatgttacaaaaatagaaaaggtgaatgcttcttttgatgtggctaaaatagcgactgtgagtaaacaggcttatcgaaatgccttacttaaacggttggaaacattcagtaatgatccaaagaaagcatttacaggaaaaaatacattggaaaagaatccgctttatgttgataagtatcagaccatacgagttccggagaaggtacaaacagttgaatttgaaactatttatactatccgaaaaccagtcgatcctgctttgaatgtggataaagtagttgatgtaaaggtacgtgctattttagaacagcgtttgaaagaatacgatggagaccccaaaaaggcatttgtcaatttggatgaaaatccgatatggctgaataaggaaaagggaataagcatcaagcgggttagcatccgaggaatcaataatgcccaatcgatacacgtgaagaaagataagaatgggaatccgatatgggatgaaaatggaaaacaaatccctgtggattttgtaaataccggaaacaaccatcatgtggctatttatcgtaaacctgttttagacaagaaaggacaggtgacgtttgatgaggatggtaatctgatgtatgaactggacgaggtggttgtctccttctttgaggctgtaacacgggctaatttaggacttcctattattgataaggattacagaaaaagtgaaggttggcaatttttgtttagcatgaagcagaatgaatatttcgtgttcccgaatgaaaagacgggcttcaatccaaaggaggtgaatttgttggatccggataattatgtggtgattagtccgaatttgtttagggtgcagaagataggttcaaatgattatacttttaggcaccatttagagacaaccatacagaatagtaataatgaattaaaattcataacttggattagatgtggaaaaagtggtattagtgatattgtcaaagtcagaattaatcacattggacaaatcgtatcagtgggagaatattaatagtacctgttagagtttgaaataaatagggtgtatgctattctcaaaaaggttgtacccttttttagaaatagcatacacccttttttagaaacagacttttaatgctgattaataataatttaaaatctaactgcttatgatcaagaaaaccctttattttggaaaccccgtttatctatctctgaaaaatgctcagttgatgataaaattaccggaggtagtcaggaatgatacgttacctgaaaatttcaaacgaacttcagaagtggctaaacccattgaggatattggagttgtggtactggatcacaagcagatcactatctcttcgggcgtgttggaagctttgcttgaaaataattgtgctgtcattacatgtaacagtaaaagtatgccggttggtttgatgcttcctctgtatgggaacacgacgcaaaacgaaagattccggcaacagttagatgcctctctaccgttaaagaaacagctttggcagcagaccataaagacgaagattgaaaatcaggcagtcgtgttgaaagaatgttctggcgcagaagtaaaatgtatgtacgcatgggcttcggatgtgaaaagcggagatacgagtaacctagaagcccgtgcggctgcttattattggaagaatttgtttcggatagaaggtttcacaagagatagggagggcattccgcctaacaatttgttgaattatggatatgctattctgcgggcggttgttgctcgtagcttggtggcaagtgggcttttgcctactttaggaatccatcatcataatcgttataatgcttattgcttggcagatgacattatggagccttatcgtccgtatgtggatcgattggtctgtggtatcataaagcagggagtggattatgcggaactaacgagagagttgaaagcgcagttgcttactattccagtgttagaaacttttatattaggaaaacgtagtccgttgatggtggctgtcgggcaaactacggcttctctgtataagtgctttagtggcgaattgcgtagaatctcctatccggaaatgtaatatggatcggtttagcgaatatcgtgttatgtgggtacttgtgttgtttgatttgcctaccgagacgaagaaggagaaaaaggcgtatgtggatttcaggaaaaatctacaaagagatggatttacgatgtttcagttttctatctatgtccgtcattgtgccagtagcgagaatgcggccgtacatataaaaagagttaaatctttcctcccggagcatgggaatgtcggaatcatgtgtattacggataagcagtttgggaatattgaacttttttatggaaagaaaacggtggaagtgaatactcctggacagcaattggagttgttctaaaagaaaaatcccgctgtcaagcgggatttttaatggaaacaatatctgtttttttaattctgatgtgctttgtaatccattgattaatagcttttaataaataataagctgtttccaatggctcaaagttactaaaatgaaagcaaatcacaacnnnnnnnnnnnnnnnnnnnnnnnnnnnnnnnnnnnnnnnnnnnnnnnnnnnnnnnnnnnnnnnnnnnnnnnnnnnnnnnnnnnnnnnnnnnnnnnnnnnnnnnnnnnnnnnnnnnnnnnnnnnnnnnnnnnnnnnnnnnnnnnnnnnnnnnnnnnnnnnnnnnnnnnnnnnnnnnnnnnnnnnnnnnnnnnnnnnnnnnnnnnnnnnnnnnnnnnnnnnnnnnnnnnnnnnnnnnnnnnnnnnnnnnnnnnnnnnnnnnnnnnnnnnnnnnnnnnnnnnnnnnnnnnnnnnnnnnnnnnnnnnnnnnnnnnnnnnntaaaatgaaagcaaatcacaacgatgcggaattagaagcacgggcgaacggtgctgtttccaatggctcaaagttactaaaatgaaagcaaatcacaacacgataatatcggtagtccccgttttaaagctgtttccaatggctcaaagttactaaaatgaaagcaaatcacaactaatatctatttcgatacttctattgtaaagctgtttccaatggctcaaagttactaaaatgaaagcaaatcacaactgacggacggcgacgttatagactaccgcagctgtttccaatggctcaaagttactaaaatgaaagcaaatcacaacatggtatcgataaacgtatagttaaagttggctgtttccaatggctcaaagtnnnnnnnnnnnnnnnnnnnnnnnnnnnnnnnnnnnnnnnnnnnnnnnnnnnnnnnnnnnnnnnnnnnnnnnnnnnnnnnnnnnnnnnnnnnnnnnnnnnnnnnnnnnnnnnnnnnnnnnnnnnnnnnnnnnnnnnnnnnnnnnnnnnnnnnnnnnnnnnnnnnnnnnnnnnnnnnnnnnnnnnnnnnnnnnnnnnnnnnnnnnnnnnnnnnnnnnnnnnnnnnnnnnnnnnnnnnnnnnnnnnnnnnnnnnnnnnnnnnnnnnnnnnnnnnnnnnnnnnnnnnnnnnnnnnnnnnnnnnnnnngctgtttccaatggctcaaagttactaaaatgaaagcaaatcacaacaacttgtcgtagtactctctctctatctcgctgtttccaatggctcaaagttactaaaatgaaagcaaatcacaactggttatcgtagtattcacgctcaacctctgctgtttccaatggctcaaagttactaaaatgaaagcaaatcacaaccatccgctttgtcttttcgttgaaaaccatgctgtttccaatggctcaaagtnnnnnnnnnnnnnnnnnnnnnnnnnnnnnnnnnnnnnnnnnnnnnnnnnnnnnnnnnnnnnnnnnnnnnnnnnnnnnnnnnnnnnnnnnnnnnnnnnnnnnnnnnnnnnnnnnnnnnnnnnnnnnnnnnnnnnnnnnnnnnnnnnnnnnnnnnnnnnnnnnnnnnnnnnnnnnnnnnnnnnnnnnnnnnnnnnnnnnnnnnnnaaaatgaaagcaaatcacaacatgtaatattatgatatgaaaagtaagaaagctgtttccaatggctcaaagttactaaaatgaaagcaaatcacaacacccgccgccatgtttaaggctttccggtcgctgtttccaatggctcaaagttactaaaatgaaagcaaatcacaacataatatacgccgccttcatactctataggctgtttccaatggctcaaagttactaaaatgaaagcaagtcacaattaaatattgcaaaatattggggcaactgtaccaaaagtaagccattctctttgatgtcatcaaaatatctattttcctgtcattttgctcaaaatggagacttttagctgataaaggctttttatggaaatgcgagaatagaaagaaaaggaaggcggaaacagcgtatttcaccattttttagtgtatgaataggctttgtagagggattatgatccaatagtaaggtgtttataacggcgttgtatgctgttttcgactgcgatctttattgtttccgaccggaaacccgattgttttcggatgaaaagcttattgttttcagataaaaagtcgcttgtttgtccgactgaggttgacagaagacgaaatctttcgctagaataaatcagtgaaaatttgtaatacgttgttcaatagattattgtgaaaaaatattttcgaatttggaagcaagccgtaccttgcctcgaaataatcgattctccaagcgtttagattgcaaagtgtcagaatgacaatttgcattgattgaggaatattttggtgcggtgctctggtaaaagattgtttaggctacggctttttcatttaacatttcgttaaagtgaggtttcttgtaaattttaacatgcgcttttattttcggtggaaggattccggaaaacacgtacgaccttttcggaaaacacgtacgacttttaccaaaaacatgtacgtgtttttgcggaaagattatcctgttttttaaatactgattatcagtttcttatatacaagcttctctcgtgagcttattgtgcggaattttacttgagatccatgcattccggcttgctgaaacggatgggtaaatgaaagagccgtgttgtttaggtcttagataaatgatttatttcgtatatttgtttttgatagtcttaagccggaaactatggggccaggttccctgtggttgagattaaacaggttgtaaatatttaaaaagtagataagatggaaacatttgacgatatcattaaaggggataaacctgtattggtggatttttttgcgacatggtgcggcccgtgtaaggtgttgagtccgacggtcgaggtattgggaaaggaactggcgggacaagtgcgtgtccttaaaattgatgtagataagaacgaggcacttgccagacagttgaggattcaatctgtacccactttgatcatcttcaagaaaggtgagatcgtatggcgctcttccggcgtgatggaccacggaagccttttacagaaggtgcaaagctatattgattaaaagccgttcatcgggatcaataccgtcgagatcaataaaaggaatccaaggatcactaggacaaggatgaacttccatgcccatttgaaccatttatcatacgggatacggcttactcctagaaccgctatcaggacacctgatgtgggagttatcaggttcgtgaagccatcgccaaactgaaaggccatgacggtggcctgcttggataaaccgatcaactccgagaatggggccatgataggcatggtaagggccgctttggcgcttccggaaggaataactaaattgataagcgtctggataacgtacatcatcccgaccgtagctacttgtcccaagccttccatccctttcgctaggttaaagagaatcgtgtcgatcactttaccgtcttgcaggattacgataatacctccagccaagccaacgactaaggcggcgctcataatatccttgcagccctctaaaaatagtttcacaagctcattcggattgcgtccattggcaattcccgccgctatgcccaaggcgaagaacaaggtcgctatttccataatataccaaccgtagcccattacgcctgttatcaagaaaaagatcgtgaagaataaaaggttcaatatatataagtgcacggttttccgtagggcaaatatcgagcagatcacgaacgctacgctaagaatcggaattaagggtagtcccttgattacgctatttcctatttttaaggatgtctggggataatagatcgaaaagataacgagtacgatagtcaataggacgaaactgatccatgcggctttcggggttctgtatacgatttccaaggaattggtactatgcaaatctctccaatattgatcatcctcatagactggagacaattgagggttcttttttaccttggcggcataacgcaatatccatgtgaagcctaccacattgataatacaccagcaaacgatgcgatactcgataccggagaaaagaggaattcctgctaagccttgcgctataccgatcgtgaaagggtttaaaatcgctccggcgaaacctaatcccgccgctataaaaaccatacatacgccagttatggaatcgtaccccatagatatcgccatcgggaccaagaccagacaaaaagcgatggtttcctcactcatcccgaatacggctccgaatatactgaaaagtaacatgatggcggtcaataagaaattatctatgcctattttacgaaggatagggttgttctccattttgcgtgctttccgcaggaaactgactgttccgatatcaaatgccttactgtcgttcacgatccagaatgcaccaccgatgataaggataaagacaatgatatccgccttgtctacaaatcctttataaaaggcggagagtacttcccaagtctgaggtacgctttccacggattcatatacaacggttcgctctccgtccgggctgatactttccgtatattgcccaccgggaataacccatgtcaatatggcgcaaaataagatgatgtaaaaaatgattacgtaagtgtggggtatttgtctctttttcatgattctgttttttcgtcttcttctgttaatattccgatctcgggaaggatagcccgggcctcacggtcactaagcgtatctacgtctttgagtttacgttggatggcacgggtacgggtacctaaaacctcttctatttgcccgctggcggtttgcaagttcttttgggctttctcgagcataccgcctactttctcgaattcttttttcacggcccctaagatcgtccatacctcccctgagtgcttttggatcgccaatgtacggaagcccatttgtaaactgtttagtatggccgctagggtagtgggacctgttacgactaccttgtagtttcgttgcaagtcctccaataaagcggaacggcgtacgacctcggcgtaaatgccctcgaacggcaggaacataatgccgaaatcggtcgtggcgggaggcgccagatatttgtccgaaatatctttagccatcttcttgatcgttgtctccaataattttccggctgtctcgatcgcttgggaatctgcggcatcgtaagcgtctaggagctgttcgtatacatctttcgggaatttagcgtctatgggaaggtatacgaattctcgggcatcatcccgcccggggagcttgaccgcaaattcaacgaccgcatccgaacctttccgggtatgtacattcgcctcgtattgctctggtgccaataactgctccaataacatactgagttggatctccccgatatttccccgggtcttgacattactaagtacccgttttaacccgcctacatcctgcgctaaggtttgcatctcgcccagtcctttttgtacactttctaattgttcggtgactaaacgaaaagattgcccgatacggtcgttcaatgtcttttgaagtttctcgtctacggtgactcggatctcttccagccttttttccgtgttatccactaatctctgctggcgttcgtccaaggcggcgaatttctctttctgcaacctgttaaaagaatcgataccacgttcgaaagcttccctgaactcgttcatggaatgagccagttcttctcggttatctttcgctaccaaacggctttcttcccggttcaggcggaagtcttccctaaagtttttctcgatacggtcgaacgagcgttgtatctcgtttagcaacttttccaggtcttctttgttattatttagctgtttaggacgcaaaaggatttgcatcacgatgattataagaagtccgccaataataatccaatccatctgtttttgattttgacgtcaaagataggtaatctgtattttgtaacagcagttaaatagagttaaataaaagaacattgtttattttcgtttgttttatcgacagaaagctgcttatatttgtgcagccaacttaagtaagactattaaatttacatacaaagatggcaaaagtaacattaaaaggtaacgagattcatacgaacggcgagttgccgaaagttgggacagaggctccggacttcaagggtgtaaaaagtgatttatccgaattgtcgctaagcgacttgaaaggaaagaaagtggtgataaatgttttcccgagcttggatacaagtgtatgtgcggcctcggtaagacgcttcaataaagaagccgcctcgcatccggatacggtagtactggctgtttctaaagatttaccttttgctcatggacgtttctgtactacggaaggtattgataaggtgattacattgtctgtgttccggtgttcatgttttgaggataagtacgggatgcttctggtagacggtccgctgaaagggttattagcccgtggcgtgatagtagtcgatggagctggtaaggtggtttatgaggaacttgttcccgagattactaccgagccgaattacgacgcggctttggcggcgttgaaataaatatagtagattattgtttttcattggttaaagttaagggttagtgtaggaggccgtcggatgtgaatcccgcggccttcgttttttttgtgaagaggctaaagttttccttccagctcatcgacgatttgcccatcgaagagattgatgatacggtcggcgtaggtcgcgtcatgttgcgagtgtgtcaccatgacgatcgtagtcccttcggcattcagttgactgagtaatttcataatttcaagactgtttttagagtcgaggtttccagtcggttcgtccgccaatatcagcatcggtttacctacgacggcgcgagcgatggcgacacgttgctgctggccgccggagagttgctgcggataatgtttggcacgttggctgaggcgtactttgcgcaggatgtcgagtacttgttgtttgcgctcagccttggggatgccgaggtatttcaattggaggtctacgttttcctcgactgtaagctcgtcaatgagattgaagctttggaacacgaaaccaatgcgtcccttgcgatagcgtgtacggtctttctcctttaggtgtcccacctcttcgccttctaatagatagctgccctcgtccgggttatctagcaggccgagaatatgcagcagggttgatttgccgcatccgctgggtcccatgatggcgataaactcgccctttttcacttccatgcttatgccattgagcgcgatggtttctacttcttccgtccggaagtttttgctgaggttctttatttgaatcatgacttgtcttgtttttgtgagaatgtatacctattatagaatgttgcttttattcggtccggatacttttgatggggttacggcgggcgactttcaaggtttgcccgatgattgacacgaaagcgatggctatggttgccaaaactgccgcggttatgagataccacgggaaggcgatgcggttatagaacgactctaaactgatttgaaccgctttcacgctgatgggcagggcgaaacaggcggcaagcaacgagagtgccatgaatcgtttggaaagttcccataccgcgccacttgtctcggctcccatcaccttacacaaggcgatccgtttgctttgctgttcggtgtagcttatcgacatggccagcagtcccaaggcagagatgaggatggagatggtcatgaagcaaaggacaagcatcaacgtgttcttctcatgggttaaatccttgtccatataatcgtcgatataatcggcttccaagtctttcggtatcccgatcacttcattggacacttccctgcaagtgcggcggatggcggctaaggcttccgcccgatcgccttgtgtcttgacgatttgacggatgatgtagccttgtgggttcaacaccataacggctccatgcgaatcgggttggggtgtgttcaacgcgcccagcgaacgatagttgcggatgacaccacagacgttgtatcgatagccgcccttgtcgctattttttccaaaatggggtctgccggatgaaagctggtaacgacggcaagtctcttccgttacccaaaccatgccgggcagtgggtcagaccaacgttctaccacttcgaagcccaacagccggaatgcggcgctgtccatatccgaaaggtggagccacgagtatccttcttcttccgattgcagtacaccatcgtgaccagtgaagaaaggcagtcttcgtgccaatgctacttctgtcacttggggtaatgcctgtaaacgtttctggaggatgacttgcttgtcgtaggtgtgtcccaagtcccatgtcttgacgaataccaggtctgtattataaccggtcggcagggtggcaaggtggtatatttggaaggccatggtgagtcccaaggtgatgagtaccgtgctgatgatattctgca

SEQ ID NO: 2408 - DNA, 14744 bp, synthetic construct
  source 1..14744: mol_type = other DNA
  misc_feature 1..14744: note = Synthetic
gttcattatcttaaagagaaatttaccgagggacgagacttcggcaacaccatcagtgtctatgcgcagaactcgagtgaggacgttttcaagacggtgatgggcaacaagaacgccatcggctttgtcggtgtcagttggatcactgccgacatgaaggcaaccgagaagaccatggagcaacgtatcgatgaactgaagaataagaatgaggttagtgccattgatttcaccgacaagattaaggttctggccatcagagctgatgaccagataacagcacgcaaaccttatcaagcctatatcaacacgggcgaatatccgctgttccgcgagatttgggcaattgacgccagtgcggggggtactctcgatcatggctttttctccttcttgactggggttatcggtcagaaaattatcctacagacgggtatcttacctgccgccgagcctgtgaggtatgtcgaggcagtaaagtgatgccaaattttcgtcattgattgcaaagcgatgttaaatcgtgcgatttgcttgacttttgtcgcaattttaacacttttggcacgttgattgcaattgtgatggcaaagcaacgattttaattaataacactataaaaactacactacaatgaaagcaagattctttatcgcaggtctcctcctcgcaggagcagccatcgtcagctcggcacagggctacaaagatggcatcgagtactacaaggtagaccaactggacaatgctaaggaattgctcgagcgcaaccttaacgctgccagcaccgacaagagcgaggcattctactatctgggccaaattgcgctcaagcagggaaaactcgacgaggctaagtcttactttgacaagggattcgcagccaacgccaataacccttacaacctcattggtcaggctgcacttgaactcaagaagggtgctaaagccaaggatttactcgagcaggctcgcaagatgcgcaagaaagatcctaaactggagattgagattgcacgcgcttactatgccgccaatccaaccacctatgccaaggacatcgagaagtgcatcaagaatgcccagaagtggaacatgaccgatcccgacagtcacatcttctcgggcgacatgaaggccgaccagcgcatttggggcgaagccgcagctctctatgagatggctttcaccaacgaccctgataatgtcgaggcttacgtcaagtatgctaacacctacttcaacgtcaatccggccatggctattgagcgtcttgaagaactcaatgtcaaggcacccaaccaggcactggtgcagcgtcagttggctgagaagtattacagcgacaaccagggcgctaaggcggccgagaagtatggtgagtacatccagaaccccaaccactttgctcaagacgaggtgcgttatgtccaactcctgttcttcggcgagaagtatcagcagagttatgacctggccacgagcctcatcggcaagttgaaccccaccgacgataaggtcttctacatgcgtcgcatgcaactctacaacctcgacatgctcgagaagtggaacgaggctgttgaggcaggcaagcagttcttcgctatgcccaagcctgttggatcagaatatgagagccgcgactacactgactatggcaaagcactccaagaggccggcaagcctgaggaagctatcgaggcctacaataaggctctcgaaatcaaccctaagaacgaggacttgattcgcaacttgggtgactcgtacgccgatgctcagaactatgccaaggctgctgagtactatcagcgactctacgatggtggtatggctaaggcaaatgatatcttctcgctctcgcgctacctctacttcctggctagcgacacgcaggacgaggccgtcaaggccgatgccatcgccaagtcgcagaagtaccttgacgaggccgacaagttggtgcctggcaacgtccagatcgtcaaccagaaggcaagcctggccaagctcatcgagggcgacaagatcacgggtaaggctgtcccggcctacaaggagctgctcagtatccttgaggccaaggaggacaagagtggatacgatcgctactaccgctacatctacaactacctggccaactatgagttccagttgggcgacaaggcacaggccaaggagtattaccgcaagtggctgcagcacgatcctgagaacgaagccctccgcaagtatgtcgaggctatgaagtaatcacaatatcacaccacaacagtggggtcctctctcgaggatcccactgtcgttttcttgtgttcagcgattctgttgccttcaggtgttcagagactatgtcgctgaaaaacaaaaaaggctgccctcatcagacagccagtaccttaatgctttaccattgccgttagcccagataggatttgagcaatttgctcttctgccccttcaggcggcggatggctttctccttgatttgtcgcactcgctcgcgagtcaagtcaaacttggcaccaatctcttcgagcgtcatctcctgacatccgatgccgaagaacatcttcaggatgtcgcgttcacgcggattcagttgatctagggcgcggtttacttccttgctcagcgactcttgggtcaaggttgaatctgccatggggctgtcgtcgttgggcagaacgtccagcagactgttgtcctcaccgtcgacaaacggagcatcgacactcacatgacgacccgacaccttgagcgtgtcgctgattttctcgacagggatgtcaagacgctcagcaagttcctcggcgctgggacggcgctcatgttcctgctcaaactttgacagttccttgccaatcttgttcaacgagcccacctggttgagtggaagacgcacgatgcgagcctgctcggcaagtgcctgaagaatcgactgccgaatccaccataccgcataagagataaacttgaagccacgcgtttcgtcaaatttctgagccgccttaatcaggcctagatttccctcgtcaatcaagtctggaagactcaatccttggttttgatactgcttggctaccgaaacgacaaagcgcaagttggcgctaacgagtttgtcaagtgctacttgatcaccctcgcgaatgcgctgggccagttccacctcttcatcgacagtgatcagttccttgcggcctatctcctggaggtacttgtcaagcgaagcgctctcacgattggtgatcgattttgtaatcttgagttgtctcatctttagttgtgatgattttaagcatgcaaaattactatatctttttcacactaccaaatcgaaaccaccaaaagttgccaattttacaaaaattagcaactcctggagttagcgtcaaagtttaaagtaaagaggctagagaaccagcaatgttgatggattcttgcaagaagcctaacccttaacccttacaccataaaccaattagaggtagggtctcaggttctggctgttgttgccacgcaggcggcgaatggccttctcacgtatctggcgcacacgctcgcgtgtcaagtcaaagcgcgcaccgatctcgtcgagcgacaactcgggaccgccaatgccaaacgacatcatcaggatgtcgcgctcgcgaggttgcaggttttgcagcgtgatggccatctcgtgcgacaagccctcgcgtgtcacgccggcatcggcactgggagtgtcgttgtcggccagcacatcgagcaggcaattctcttcgccgtcggcaaacggtgcatccaccgaggtctggcgggcctgtgacaccaatgcgtcaaacacgcgctcctcgggcatgtcgaggatggcgacaagttcgctaatcgagggcttgcgctggttctcctgctcaaacgcattgatggctttgttcaccttaccctgaatgttgacctgattcagcggcaggcggacgatgtgtccttgctcggcaagcgcctgaagcatggcttgacgcacccaccacacggcataggagatgaacttgaagccacgcgtctcgtcaaacttgcgggcagcgcgaatcaggcccaggttgccctcgttgatcaggtcgagcagactcatgcccgtattctggtactgctttgccaccgagacgacaaaacgcaggttggccgccacaaggcgctgaacggcctcctcgtcgccctggtggatgcgctcggcaagggcaatctcctcatcggtgctgatcatcgggatgcgtccaatctcctgcaggtaacgctgcagagccccggtctcgcgattggtaatttgctgggaaatcttaatttgtctcatgtgtgttaatcgtgttttggtgttaatactgatactgatataaaaccactcgtctaatatccgttttttaatagcaaaaatcgtgccaagcagccactcctggagtaaaaaagttgacccgaaggccaacttttttgcggatattagtttccggtggtttcttatcccatgaaaacttgtgctatggaactataacagaacttactcttctaggtcgctcaagtcgacggcatagtagaccttcttgcccgtctgggtcaagccggtaatcaccatcaccttgtcctcgtcctgcgagcgcataatctggttgtagatttgctctacatcgtcttggctgtcgacaggctgctggttgatgctagtgatgatcaggccgttcttgatgccattagccttgaacttgcctgcttgcagaccggccaccttcacgccatgcgagatgttcaagtctctcttctccttgctgctcaactcggcaaaggcgcaacccagtgacatgatgtcgctgctcttggtgattttggtgttgccttggttgttcttgaaggtcacagtggttgtgcgcaacttgttgtcgcggtagtaactcacctcggccttgtcgcccgggcgcagtttgttcatctgctcctgcatctcaccgctgttcttcacgctaacgccattcagtttcacaatcacgtcgccctcctcaatgccggcttccatggcggcactgcggtcgttcactttggcaacatagataccctcgttggtgacagtgatcttgtgctccttggccttgtcggcatcaagttcggtgtattggatgccgaagacagcacgttgcacggtgccatattgtttaaggtcggtaaccacctttttcaccgtgttgctaggtactgagaacgagcagcccgaataggtgcctgtggttgagtatatcatcgtgttaatgccaatcagttcgccggccatattgaccagtgcaccgccactattgccgggattgacggcggcatcgtgctggataaacgacttgatgcccatgctcgaactctcggccagaccacgccccttggcgctgatgatgccggcggtcactgtcgagttgaagccgaaggggttgcccacagccacagcccactcgccaaccttgacattgtcgctgttgccgaaggtgatggggtgcaggttcttggcgccattgatcttgatgagggcgatgtcggtattggggtcggtgcccacaacggttgcgttgtacttgctattgtcgttcagtgtcacctccaacttttcggcaccatcgatcacgtggttattggtcacaatgtagccgtcgttgctgatgatcacgcccgaacctgtgcccttggcttgaggttcgctcttctgctcgggctgctgcgaacgaccacgctgcccgttgccgaaaccgaagcctgggccaaagaagaactcaaacgggtcgatgccgccaccttgataatattgctgcttgggtgtctcaaaactcttgatgctaaccacactgttgattgtactctcggccacgccagtgaagtcaacaccggctgcgatggcggtgcggttagatgcagtgcgtacaaaactgtcgtccatactgaccgattccttgctggggatgtaggtgtctacatcatagcctgcgctgcgcagcgcactctcgcccatcagcgtcgtcgctgatcctagtaccgatgctccaacgagcatcaaggcaatcttactattctttttcataatcttaaatgttaaaatattgtccgttttaaaatttgtaatcgttaaatttaacttttgctttacaacgccaaaagtactattattatttgcaaccacaatgccaaaatgccgtattttagcagtttttaagcaacaaataggccctttttaactggtttaacaacaaaaaaactacatctgactcaaaaaaccgaaaaccgaaaaccgaaaactgaaaactttgtagtaactttgcacccgccagttgggtggcttgtcgctcggcgtcactggagacggccgccgagaggaaagtccgggcaacacagagcatcacatttcttaacgggaagccaggggtgaccttggggttaaggtgacagaaaatgaccgccaaccatcggttggtaagggtgaaaaggcggggtaagagcccaccggatggcgtggcgacacgtcatgccgcaccacctgtgagttgcaatgtcaagtataccggcagttaagggctgctcgtccattgtcggggggtagacagctatatcggcgcagcaatgtgtcggacagataaatgacaggcgactgccaacatggcagttacataacccggcttatagcccgactggcttttttattttaccgtcactgccccacaacccgcgccacggtctaccgctatcacggttcgcctgcgcgcagtgcggtctcaattcacaattcacaattctcaattctcaattcacaattctcaattagaataaggatgaattaccaagaaactatcgactacctatataaccagcgcccggcctttgagcgacagggcgctggtggctataagccgggattgcagaccagccgtgatctggacgcgcttttcgggcatccgcatcgcaactatcgcatcatccacgttgccggaaccaacggcaaaggctcggtctcgcacatgctggcgtcgatgctgcaactcaatggctatcgcgtggggttgttcacgtcgcctcactttgtcgacttccgtgagcgcatccgtgtcaacggcgagatgatctcgcaggacgaggtcacacgcttcgtccaggagtttcatgacatggattaccacggcacgccgtcattcttcgagttgacctcgaccatggcatttcgtttctttgccgatcagcaggtcgacatcgcagtcatcgagacaggcctgggcggtaggctcgacagcaccaacatcgtcatgcccatcctcagtgtcatcaccaatgtctcgctcgaccacaccgagttcctcggacacacgctggcactcattgcaggcgagaaggctggcatcatcaagccccatgtcccggtggtcgttggcgaggccgatgccgagactcgcccagtgtttgagcagacggctcacttgctgcaggcacccatcacatttgcccaagacaatccgcaggtcctcgatatcgaccatgaggctggcagcctcgttgtcaacaccacccgtcatggcatcgtcacttgcgagttggcaggcgattaccagcgtcacaacatcaacacggcactcacagccgagcagatactcgagcagatggggctgaatctcaatcccgatttaatcaaagcctcgttcaaccgcatcgctagcaccacaggcctgatggggcgctggatgacaattgccactgaaccatgtcgcaccatctgcgactcgggtcacaacattgcaggcatcactgccgttgtcgaccagttgaggcatgagcactacgaccaattgcacatggtcatgggcttcatgcgcgacaaggatttgcagcacatcctgcccttgctgcctcgcgaagccacctattattatacgcaggcgtcgacaccccgtgccttgccggccgacgaactccgcacgatggctgcggctcatggcctgacaggcgagtgttatcgcgatgtgatgaccgccctccaggctgcccgtgcagccgcaagccctagcgacctcatctacatcggcggctccatgtacgtccttgccgaattattctcggcaattaaataaccatcttgtgggcgataattcttaattcacaattctcaattcacaattctcaattaaaaaaacttgtacaccagcctcttcataacattcttcaagatagggctcttcaccttcggcggtggatgggccatgatcagcatcatccagcgcgagattgtcgacaagcaccattggctccccgccgatgaatttctcgacctgctggctgtggcacaggcaatgccgggcatccttgccgttaacatcgcctcggtcatcggcgaccgtctgcgcgggttcaagggcagcatcgttgccgccctcggcaccatcttgccctcgttctgcatcattcttgccattgccatgttcctcacccccgacaccatcaagaacaacgccaccctcaccagcattttcaagggcatccgtcccgccgtcgttgcgctcatcattgcaccggtcatcaccactgcgcgggcggcaggcatcacttggcgcaccgtcatcatccccattgccgtcgcgctgctcatctacagccacctccccgtcatcagcaaccccatcatctacatcgtcctcggtgccctcggcggctaccttcttagtttaagggttaagggttaggggttaaggttttagcagcaactcatcaattattctcacactcaattatgaactcgttcgaaaatttagaagtctggcaagaagcacgcaagtttgtgctctatgtctatcaattgcaatcaagatttcctgcatttgagaaatttggtctctgcgatcagatccgtcgtgctgccatttctataccctcaaatattgccgaaggaagtggaagaagagcatggaaagacaaagtgcggttcattgaatatgcttacggttcattaatggaggtttactgccaattgatccttgccaatgatctgaactatttggagcagtgcgagttagatgatgcccgaacgagtgtcgagcacatatcccgcatgctcagtggcctgaagtctagttttgaacgaatgtcaggaaatcaaccctaaacgacctatgtttgtcaaaaaagtatgaagtcttgatttagaagcaacaaccctaacccctaacccttaacccctaaacccttatgcttaaactaatctgggcctacctcaagataggattattcggcttcggcggtggctatgccatgctctcgctcattgagcgcgaagtcgtcggctctggctggatcaccagccagatgttcaccgacatcgttgccatttcgcagatgactcctggccccattggcatcaatagtgccacctacatcggctatgtcgtcacaggctcagtctggggctccattgttgccaccttcactgtcgtgctgcccccgttcctgcttgtcctcttcgccagccactggatcaggcgacaccacgacagccctgccgtcaaggcagccttcagcggactgcgccccgtcgtcgtcggcctcatcgccagcgccgccctgttgctcatgaacagcgagaacttcggttacgaaaccacccaccgcatcatctccatcatcatctgcatcgcctcattctgctgcgtctacttcacccgcatccaccccatcttcgtcatcctcctcgccggcctcaccggctacctcatcttctagccttcaaggttaatttatagagattatatccagtaaaaagaaaaaggacgagtagaacccgcccttgatgttttcacaacggaataatccttattgtgaattgcttcaaatttgtactgcaaaagtacaacttctttttatacctaccaaaaaactgagcaagaatttgatttatttctgcgttttttgtatatttgcacactctttctttaccgaacacattattcaataaagtatgaaaagaattttgggcttagacctcggaacaaccagtataggatgggctgttatagatcagtcagaacaagagaatgaaaaatcgggtattgtgaaaatgggtgtccgcgtgaatccgcttactaccgacgagaaagataacttcgagaaaggtaaaagcgtcacaacgactgctgatcgaaccctcaagcgcggcatgcgtcgcaacttgcagcgatacaagcaaaggcgtgaacatcttatcgcaatactcactcgcaatcgcattatcaccgatgatgctgtcttgtgcgaagatgggaaccgaaccacctttgagacttatcgtctgcgtgcaaaagcggctaaagaagagatatcactcaatgaattggctagagtgttgctgatgatcaacaagaagcgtggttacaagagcaatcgtaaggcaaataatcaggaagagggcgaattgattgacggcatggccattgctcgtcgtctctataatgagcatctgacacctggtgagttgacctatgatttgttgcagaacacttcgtcgcgcttaatacccagtttctatcgatctgatctgatggctgagttcggtgcaatatgggcaaagcagcagcagtattatcctgagatcttgaccgacgaggctagagagcggatgcaaggtcagagcaggtcaagaactgttgaactattcaaggcgctgtgtcacgttgtgcctgccgaggtgaaagatcgcaaggtcagaatgctgacttattatcggtggcgcacacagtctcttcatcaaaagatggaactagaggctgtcgccactgcacttgtcgaggtgaatggggcaatttctgctgccagtgggtatctgggcaatatcagtgacttgagcaaggagttggagattgcacacatgactgtgggcgagttcttgatgagcaaactggatgccgacccgcactaccgactcaagaaccgtgttttttatcgccaggactatctcaatgaatttgaaacgatttgggaaacacagaagagattccaccctgagttgaccaatgcgctgaaagaagaagttcgtgacaccatcatcttctaccagcgcaaactcaaatcacagaaaggattgatttcattctgtgagtttgagagccgtgagattgtcgtgaagactgcaaagggtaatgataaaaaagtgctatccggttcacgtgtgtgtcccaagagttcaccactctaccaagagttcaagttatggcagacgatcaacaatgttatcatctatgacgacaatgccaatgaagaatctggttttgcgttgaacgacaatcaaaggctcgtgcttcatgatgcgctcacctacagtaaggaactcaaaaagtcggctatactcaaaatcctggggctccccgccaagcgttatcgtctcaattacgatgccattcagggaaatacgacgcaagtggctcttgtcgaggcatacaagaaaatcttggagtggagcggacatgacattgatgagtttgacaagatgactgtggagcaaaagcaacatcagttgtcggctgttttcggtgtgttgggagccaagaccgatttcttgagttttgatgactctcaagccgaaaatagtgcggcatataaactgtggcacttgttgtattcctacgagggagatagttctaaaactggcactgaaggtttgctcaggaagatagagcaattgactggtcttaattcagagtatgccaaagcccttgtggcggtgacatttcaggcggactatggttcagtgagtgcaaaggccatcaagaagattctgccattcttgaagcaggggcacctctatagtgaggcatgcgagttggcaggttaccggcactcaaagaattcactcacaagagcagaaattgaccaaaagcaattgctgacggcattggaaatcatgccatgtggatcactgcgcaatccagtggtcgagaaaatcttgaaccagatgattcatgtggtcaatggtgcgattgcccagtatggaccattcgatgaaatccatgtcgaaatggcccgtgaactcaagcagactcgagagcagcgtgagaaagcgaccgagcgaatcgctaagagaacaaaagagaccgaccagattgtcagtattctcaaaggacaacctttcggcatctccaatcctacacgcaatgacatcatccgttatcgattgtacgaagaactagagcctctgggctacaagactctctatacaagtacttatattgcaaaagagaaacttttctctcgtgattttgacattgagcatatcattccacaagccaagttgtttgatgactcgcagaacaacaaaacaattgagactcgttcggctaatcttgaaaaggctgaccagacggcatttgactatgtgatggccaaatttgggccacaagccattgacgactataaagcccgtgtggcgatgattctcgatcgcaagaagcgggagttgttgttgaccgacgaggaacatatccccagcggattcttgaaccgcgacctcagcgactcacagtatatcgctcgcaaagcaacagaactcttgggattagtaacacgccgcgtggtcacaacgacgggaagcatcaccgctcgtttgcgtgaagattggcaactcatcgatgtgatgaaagaactcaactgggaaaaatacaaggctgtgggcatgaccgaggaagtcaaaaacaaggaagggcatgtcaaacgcatcattcatgactggaccaagcgcaatgaccatcggcatcacgcactcgatgcgctcaccatcgcattcacgcgcccgtcacacattcaactgatcaacaatgtgaatgccagtgacgggaagaaacttgaccaggctgcatttgccatccagcgaaaagaaatcacccactcgggtagattcatccccccgatgccctacgaccaattgcgcgctgcggttctcgaacacatgagccaaatcgtggtatcaatcaaagcaaaaaacaaggttgttactcctagtgtgaaccgcatcaaaaccaagggcggtatcagacgtcaagtgacactgacaccccgtgcgcagatgcacaacgagacggtttttggctctcaatatcaatatgaaacaaagattgaaaccgtgggtgccaaatttgatgccgagaagatatcgacagttgcccggcaagactatcgcatcgcattgttgaaacgactggatgaatttgggggtgaccctaaaaaggctttcacaggtaggaattcactggaaaagaatccgctatatgccgacattcttcatgcagtacaagtgccggcaaaggtgaaaactgtgcagttgatacctcgtttcaccattcgtcgccccatcactaaggacctcaaggtggataaggttgtagacaaggcaatccgcgaaatcctgcagcggcgtctggatgagtttggtggggatgccgctaaggcttttactaatcttgacgataaccccatttggctgaacaaagagaaaggtattgccatcaagagcgtaactatcactggcgtaaatgtggctacgcctttgcacgacaagcgcgataagttcggccaactcatcattgatgagaagggcagcacattgccggtcgactatgtcagtacgagcaacaatcatcatgtggcaatctttgaggatgtcaatggcaattggcaagaacacattgtctctttcttcgaggccaatgagcgtgctcagcaaggcctcccgattgttgataaaaattataatcacgagttgggatggaagttcctgttcaccatgaagcgaaatgagtattttgtcttccccgatgagaccgaaggtttcaatcctcttgagttggacttacaagacccgcaaaatctcaatgtcatcagccgtcacctatatcgtgtacagaagttagcaactaaaaattatgttttccgccatcatttggagaccaatgtgcaggaggacaagagactaaaagacaaaacttggattagaataacgagttttgctggattgaaaggtatcgttaaggttcgtgtcgaccatctagggcagattgtcaatgttggggagtattaacgtatggtgaagcgtacaatatatatcggcaatcctgcttaactgagtctcaagaacgcgcagatgattcttcgtaagcccgatgcgttgcaatatccagtgcaaagatacaaatttgaaagcaattcacaacactcgtcttataagtgctaactgacaaacgttgcaatatccagtgcaaagatacaaatttgaaagcaattcacaacgacggccgtgtacaacaacgtgccgcagttggttgcaatatccagtgcaaagatacaaatttgaaagcaattcacaacccaacgaggaagtcgccacactcatggcggttgcaatatccagtgcaaagatacaaatttgaaagcaattcacaacgtgagtcgcaagcggttgacatcatatatgttgcaatatccagtgcaaagatacaaatttgaaagcaattcacaaccaaccggactagtagtaatatagtctgtttgatgtgtattatcctacaaagatacaaatttgaaagcaattcacaaccaggtgcagatgatagccaaagtcaacaatgatgtgtattatcctacaaagatacaaatttgaaagcaattcacaactcccttcaaagactttaaccattcatcaaggatgtgtattatcc

SEQ ID NO: 2409 - DNA, 14706 bp, synthetic construct
  misc_feature 1..14706: note = Synthetic
  source 1..14706: mol_type = other DNA
atcatgtaattttcgttcaaaaggttcaatgcttcaaatttgaagtttaatttttgatttaacagggaaaatgatttggaaactgaaaggctgtggtcgctataagatgccaagcggtttactgcaaaattttggaaagtagaataccgtttgcccgaccacaagagcgaatatgcaaagttcacccacggagtttcgagggataatcggcctgagccagatacccgtggcatgtatggaacctggtgaagataggtggagccttcgggatcagtgacatctagagcacgctggtaggtgtaagttcccccgaataggattgttaatttttccccggctgacaccgaagcctcacccgaaatatcgactcctgtaatcctgacttttccaagattgaccatactccagacgaaaatattcttcgtgggcatagccataatcttatcacggacatggttgcgataaccatccacagtgaatgaaaccaaggggatggtcttccccaaagaaacagcatatgtgattccaatgtcaaactggttggtcgtttcaggcttcaaatggatattcccgattcttgaataatataaatcattgaaagtgggtaggcggaagatattcttgtagaaagcacgaaaacggagatctgaattctgtaaaggtttgtaggttacactgacatagggagacaaacggttgtagttggatccggcactccctttttgcacagtctctttcaccaaggtagacaataagctggccgtagcaagcacatgttcggaaacatatttggccgcaaccacagacaataagttatacctgactggtttgggaaattcatttgtcaccgagtcggattcaaattcggcaccaagcgcattgatgaaaccgtcggaagagacggcaaacgagagatggggcagtgccttgtacaatgccgacaatgagaggtaatattcattctgccggtaaaaactttcttgtctacctgtttcattgagataagtcggatccaaataatggagatatccgtggttgaacttcgcattgccttgaatggaaaacatctcggacagaatgttttggtaatgcccttgcaaaaagaaggtcgcatccgacaagcgttgcgaagaaaaattctcggtgttgtagagaatgattgctcccggcaaaccacgttcggagtggtaataatatgctttgatgtatccgttttctttctccgaaaggctaccgtgtaaagccgcttccaaccgtagattcttcacatctgtattctttcgcttttcgttggatacactgtctccttcgcctccatggtagagtttgtagggatattggccgtctgcggagagccactcactgctgaaactaagcgcatattttcgtgaaagcttatattgcagccacaaggatggatttatcatcccgaacgaaccacctttcaacgatgctcgtgcatgaatgtaattcgcaccttcaaaacggggcgtaagtgttcgaatattgagcacggctgccgaagcgaacaaccttgccggctgaaaaatgttgtcactttgtccattgcttaaggaaagcatatccacattttccaacgagaatcgtccgatgtcgatctgtccggtctgtgtgtcgctgagcgaaataccatcgtagctgacagccgtgtgagccgcccccaagcttcttacggatacagtcttgagtccgccaatgccgccgtaatccttcactgccacacccgcaaaatactttacagcatcggacacttgtagcgcattcagatttccaatttgcttggacgatagaatttggagaggagacgaagaacgaatctcggcgttgcggtaactctcagttaccctaacttcccggatcgtataaacacgtgtgctgtcctcagcatcttttgacaatgcaaaacttacttctgcaagtaggcaggagaagacagcgaaaagaaaaatccgcttactgaaaaaataatacataagttccactatttggcgttaactcaaatagcaaacaagaaacaaagtgaagttcaacaaagcacaaattctaccaataacggagcagatgatgcagtattgttccaagctctttcctcgaaagccataaactataatccgcaaaggcaggtcttctgactcactcccgtatttgaacgccttcccgaaaaccagttagcagagaacagttagcagttatcaataaaaactgtgactgtaaactgatgactgttgattgtcttcagtggcaatagtgttgttcaatacgttattccaattaagctgttaactgatgaatgttaactgctaactgaaaatgaagcttacagcagcgggactgttcaggatttacacctgattcccttttaatctcttttggcgggtgccaaaaggagaaccgttgcgaccccaaagttaatacatttttcacatggattgcaatcaggttggaaaaatgttggcggcacctatcccacaaccggtattacggaagatctacctgtgcagtatcagaagccgtctttgcaggaagccctccatactttccacctgcattcccatttccaagaaaaaaaccatcattcacttgcaagctaaggaaatattaatatctttggaaaagttataaggaaaataaaaattcgatgtgctaaagagacatcgacgttccgtttattaattcatttaacaaatagagctttggaatcgacaaataacaatgtaagccctttggcaaaagtaaactggcatacgcgcaaagcagccctgtgcagcttgatctcgcttgtacttcttggttcttgcagcgttgacaatgcatacgacatgagcaaggacatagacctgaccatggccctcgggagcaatggattggctctcaagctgggaaataccgaaaaaatgtatttgaaggacatcatcaagatagatgcctctaatttggtggacaccattacctcgggaagcaatcgcggcctttattatttggtcaaaagcgggtcatcgaagttcaatgtgaacgtgaagagcattgccccttttgacgtgtcgcccattcatatcgagacgaataatttgttcattgcgcaaacgaacatcccgggcttcaattcacaagcagacacgatgatctctgtaagctcggatgtgagtgtgaaaatgcccaatattccggttgaggtgaaagagatccacaccatttcattaaacaatgtctctgccacaatcaaattatcaacggacaattcgaaattcaaaattgggtcttataccaatttaaagataaagttccctaatttcgtcaagtcgtcttcgttgaatagcgccaacgaatattttatcacgggaagttcccagacgatcacaatacctatccaatcgcttgaatttccggtcaatggatcattcgggcaaaaggtggacaatggcgaaatacgtcaaagcgggacaatattcatcaatggagatattgcgttctctaccaatggaacagtaaatatcgttcagggagaaacagcaaaagcagttttcaacatcagcttttcccaaatttcatcgcaacagatcaccggccttgtgaacccaacgattaatttcaatgcggctcccctacagataaagagtggccttcctgatttcttgcaggacgacgaaatccacttttcggcaaccaacccgaccctgaaactcagtttcaacacgcaaaacctacctgttcccatcatctttcaaggcgttgttgaaagcaaaaaaagtggacaaacgcttgcatccgtttcaatccccgagtcggggcatgtcaacattgcaaaaaattcaacaacagtctcgtatttttcgcagacaggcacacctttcgatccctttggcaccaatcttcccatacataatgagactgtaagtagcctgaacaaacttgttacaaaacttccagatgaaattggggtaaatttcaatgatggaaaagtaactgcagaccaaagcgttgagcataccatccgactgggacagagctacggtgtcggcgttgactatcaaatcctcatcccatttcaattcgacaaggacttgaaaatcctgtataatgactcgatcgttgacatgaacaaggatctaaaagactatcaagccgaagggctgaccattacggctactgccgtaaacacaatccctctgaacttagtgacagagattgtcccttacgacattcatgggaaaataatcaaagaaattgcggttgaatctgccacaatcgccctgggaacgttggacgccccgaaggaaactgaagtgagcgtgaagtttacgccaacatctccagccgatgtgagtaagatagaaaaattaaaatttagattcaccgcctcggcatcagaccttacctctgacaagacccttctttccgcgcaatatgtccagttaaacaatctccgtatcaagctgaacggaaaggttataaccaattttaattgatcctaaaagccaaaaaaatgagccctatgagacattatatctgccaatctttattcattggtgcagtaatgcttgcatccacgatcagcatttcgggccaggagttgcgttcttcctactttatgaaaacttcaacgttccggcaccagctaaatccggcccttgccgaccaagcctacctgggcttgctcttcggaagcaccaacgtgggaacaagtggcaatgtcggattgtccaatttcgtctataaattggaaaacaaccccaactacaacctcaccacgtttatgagtcccgaagtgaatgccgacgaatttctgggaaagctacacgacaaaaacagggtcaatgcacatgtcaactacaacctgttttccgtcgggttcaaaggattcaaaggggtgaacatcatcgaggtgaacatgaagtcgaacacctccctgagcctgccttacgaactcttcgaattcatgaagaaaacgggagagaaagaacattattcattcaaaaacttgggtgcaaaatcactcaattaccttgaaattggcctcggccattcgcacaagatcggcgaaaacctcaccatcggtggcaagctcaaaatcctatcggggatggcctatgccaagcttgatgtcgatcatctggacttaacactcaacaaagacgtgtggactatcaacggcaatgccaagttctcggcagccgtcctaaaatcgaagttcaaatacgacgacaaccccgatcccaacacaacagatccggccagaggaaagaaggtgaccgggattgacgatgtgagcttcgacacccccggatttgggctggccctggacttgggattcacttacaaagtcgcaccaatagatgggcttactgtctcaggtgcattgaccgacttgggcagcatcacttggaaaaacaccaacacagcttcgtcgaaagggacttgggagtttgacgggttcaacaacccgatctacgccacgggagaaaacaccgggaacaataaagtcggagaccaatttcaagccttgggtgacgacctaaagaaagtattctctgtatatgacgacggacaaaagaacgagaaatcttcgttgactgccaccctttcgctcgcagcagaataccagatgccgttctaccacaagttatccgccgggatcctatacactaaacgcttcaatggaattttttccttgcaccaaaccagcttggcgttgaactatcgcccggtgaaatttgtggaagcttccttaaacgcctccaccacgtccgaaggcacgacactcggagggatgctgagcctgtatgcaaaaggattcaatctcttcattggttccgacagcttcatgggcaaagtttcgaaagaatatattcccctgcacaacggaaatgcaaatctggctttcggcatcaatttcccgctctgaatagaacattagtcagaaccgaaacttttcccccggcgatgagccaacgagaacgtccggcacgagacctgtaaaaaacacttggtttcgtgccggacgtttatcttcgattttcacccgatcttctccctgctaccgatcgaatcatgcgactggaggaatctctctttgctgtacaatcgcaaatcgcttttttcatagaaaggctcattttgcaatgttaatttgcgagaaaaaatgaatgcttttctgcctgtaccgtaaaaaaaaatctgcgcggatttataacgttgataaatagcgatttgtgtttttttcgaaaacctccgtgtaccgtatttttttttggagacagacaaagttctgtctaacttgcaacaggaaagatgcgcaagtggcacgttgattcgccggttgctatccgctttagaaacaaagtgtccgtggaatgatttttcctattttattggtagaggtttttgcccggccaagtattagtccccttggctggtaaggaaacccaataagaaataacagtcaattctccaccggcttgtctttctcgatcaacatcctcgaatccaccgctacgatctctttttcggtagccaagagcggattgatgtccagttccttgatttcggaagcatagcggagcaatatcgacaggcggacgatgatttccacaaatttgtcttcgttgatccctttctgacctcttgcgccttggattatcttgtatgacttcaacgaacggaccatcgagtaagcttccgcaaaattcaggggagccaatcccgatgccacatccttgagaatatctacaaaaattccacccagcccacagagcagcacgtgcccgaaagtgggctcgtgtttagcaccaatgaagagttcctttcccgtcagcatgggctgaatcatcacggcggtagcgccgggtatctgcatcatccgttccacttcgcgggccaaatattcaggggagttgatattgatccgaactcctcccacgtccgacttgtggataggtcccaccaccttcagcaccaccgggaaaccaattctttcggcttcggccacaatctcctctttcgagatggaaacaaattggtgtaccatcgtgatgccagtcatctcgagcaattttctcacctgctggggcggcagccagccgtcttcgttgttgtggataatctgccgaatagcgggtatgtctatctcgggaattggagcatgactcgataaaggcggagctgtagaaaccaccttcgaaagagccgtggcgagcaccacctcgtccgaaaagttgacatgccccttgctcacaaaatcggttgtttcctccaccgccatcaccacggaaggcaggatcggatatatcgggatggggctggtttcgatcttctcgtgcagcacgttgtaagcctcgatcactttcgtgactccgggattcccgtagatcacagcaatgccatctatttccttaaaatgctgtatgcaataatcgatcgccaagccaaggtgttttcccgtaccagttccaagcaaatcaatcggattgcttactgaactgccggccagcaattgctttttcaacccttcggcaatctccttcggcatttccggcacatttatgcccgctttggataaagcatcggtaaggatgaccgcagggcctccagcgtgggaaataatagcaaggttttttcctttcagtggcttcaacgaaagcacagcacccactgcggctaattcctcccgcgaatagcaacggatgatgcccgccttgcggaaaagcgcctccacagcaaggtcggacgaggcaattgctcccgtgtgggaagccgccgcccgttttccggaagctgttgcacccgatttgatggcggctatccggcaacctttttggataagggaagcggtgtgttgcaacaatttgtctggatcgcggattgtctccacataaagcaatttggttctggaactcgtttcaggatcgaacgactcatccaaatattgcacaatgtcttcgacaccgatctgcgtggcattgccaacagcccagaccgagttgaaacgcaagcctatgtggatggaagattcgatgatgaacgaggccgtacctcctgaactcgacaccatgtccacccctttagaatcgatgaatggaattggttgagtgaaaaggctctgatgatggacattgaacatgccgctgcagttgggacccaacatacacgctccggcatcgtttatttttttcaggatttgctgttccagttcgcctccttcggttgtcccttcgccaaatccggcagaataaatgatgaacgccttcacgcctttttgataggcaagcacatctatcacctccaagcaacactgcgctggaatcgaaataatggctaaatctgcttgtggaatttcggaaacatcgtgataacacttcattccctgaactatatcttccttggcatttacaatatatacattgccgtcaaaagtgccgtgcaaaagattccaaagagaactccctcctggtttcatcgtgttgttggatccaccgacaaccacaatgctgcggggggcgatcaattgctgattaatcatatatgttttaagaaattagtctaatacaaatataaggacaaaaatgttaaacgcagagctaaaatcatcgtttttagcggttcgaaatagtgtttaaaaacagatagccaacggcaagcagacgtcatcaaacatcgaggcctattcccggccgatggctcaggcagattttcccattcattatttttgttcctgagaagcagtcgttagagatcagcaaggctccgtccagatcggcaaaatcagccagcggagatagctgtgaagcggccgaaatggcgcaagaagtctccgtcatacagccaatcatcactttcatgcccaagcatttggctaaatttgccattttccaagcttcgcgcaacccaccgcatttcataagcttgatgttgatgcccgaaaagactcccgcaagctttgccacatcctgcaatccctgcaccgactcgtcggcaaagatgggcagcgggctttctgcagtgaccagtgccatgttctccaaatcgtgttttggcatgggctgttcaatcatcacagcccccttttcgtgcagccagccgatcatgtcgagcgcctgcctcgccgttttccacccttggttggcatcgactgaaatcggcaaatcggacaccgaccggatggcctcgaccatcgctttgtcttccgactcggagcgtcccagcttcactttgagtatatggaaatcggcggccacttcctccgttttttccctcaccacattgggcgtgtctatcccaatggtgtaagtggtggcgggagctttttccggattcagcccccacaggcgatgccagggctggccaatcaactttcccgccaagtcgtgcaaagcaatgtcaacagcagcttttgccgccatgttcccgtcctctaccccatcaagatattcccatagctcctccagttgcaagggatcgccaaaagcctccagatggactttctccagaaagcgggacactgattcctgcgtttcgggaaggtaaggcgggagcgatgcttctccgtaaccgaccactccttcgtgctcgatttgagtcaacaccactggcgtttctgtccgtgaggaattagcgatagcaaacacgtgcctcaattgaagcgtatagggtttccatgaaagtttcataacggggcatccggttgaataataatccgcaaagataaatagttttatcgtagcctcgacgatgagtgcggatctttatcttcaacggcaaataatccggagggacggaaccgcccctttgtgcgatagtaaatgaaagaaagcgacccgtaaaggccgctttaaatgttttcacaacggaataatccttattgtgaattgctttcaaaatttgtacttgcaaaaatagaactttaatttattctaacaaatattttgacattaaatttattgtttttaattttagggacgaataaacacaacaaaattagctgaatatgagaactattctaggacttgacttgggtacaaatagtattggttgggcgttggtaaacgaagctgaaaacgattcggaaaaatcgtctataatcaaacttggagtaagggtgaacccgctcactgtggacgagcagcaaaatttcgagaaaggtaaaagtataaccaccaatgcatatcgaacgcttaaacgtagtatgcgccgcaatttgcaacgttataaactccgacgcgaaaacctgattgaaatattgaaagaaaatggttttattaatgatgaaactatcttgtcagaaaacggaaatcataccacttttgaaacataccgattgcgggcaaaggccgctaccgaagagatttcattagaacagtttgcccgggcactgttaatgattaataaaaaacgcggatataaaagcagtcgaaaagctaaaggtacagaagaaggtgtactgattgatggaatagaaatagccaaattactttataacgaaaatcttacacccggacaatattcttatcaacaacttaaaaacgggaaaaagcaactccccgatttctatcggtctgacttggaaacggagtttgggagggtatttgacaagcaaaaagaattttattccgaaatacttacaattgaactgaaagaagaactaaaaggtaaaaaacgggatgctgtctgggcaatttgtgcaaaggcatttaaagaaaagggtacggaactggtaggaataaaacggcaaggaactactgtcgaacagaaaattgaaaatttcttatggcgaacaaaagggctatccgaaaaattgagtttggaacaacttgttgtcgtttttcaacagattaatattcagctcaataactcaagcggttatcttggtgcaatcagcgaccggagcaaagaattatttttcaataaaattaaaaaggcagacggtagctttcgggcacaaaccgttggcgaatatcaaatggatgtgttggataaaaaccccaatgcaagtttgcgaaatatggttttctatcgacaagattatttggatgagttcaacaccatttgggaacaacaagcagagtttcacaaagaacttaccgaagaattgaaacgggaaatccgcgatgtagtgattttctatcagcgaccgctgaaaagtcaaaagggattgattggtttttgtgagtttgaaagccgaaaaatagaggtggaaattgatggcaaaaagaaaataaaagcggttggcagtcgtgttattccccgttcgtcgcctttatttcaggagttcaagatttggcaggtgttgaataatattgaagtttttggcaaaggaaagaaaaataagaaacagaaaggggcaacattatttgaccagactgaagatccattacaacttggtggacggcgaaaattgtatatagaagaaaaggatcttttggcagcagaactatctattcaaaaagaactaaagaaagccgatatactaaaattactttttgataatccgaaagaattagacttgaattttaatagtgttcagggaaatatcacgcaagctctactctttgacgcttataaacgaattattgagctatctggtcacgaaattaatacggataaaaagtctgcccctgatatagtaaaatcttttgaagaaatctttgagggtttgggttacaattccgaagtcctcgtatttaattcgaatatacctttagacagccaagcaatgtatcgtctctggcatttgctttattcttttgagggtgatgattctaaaacagggaacgaaagtctagtcaacaaggttgctgagttatgtggttttgagcaggaatatgcggctatattggcaaatattacttttcaaaatgattacggaagcctttctgcaaaagcaattcgcaagattttgccctatcttaaagctggaaataaatacgatgtagcttgcgaatatgcaggttatagacattcgacaagctctttaacaacagaagaattggataataaggaatataaagaccgcctcaaagtattgccaaaaaactcgttacgtaatccagtagtagagaagattcttaatcagatggttaatgttatcaattcaataatagatacttacggaaaacccgacgagattcggattgaattagcacgtgaattaaaaaagaacgccaaagagagagaagaactgacaaagtcaattgctgaaactacacgattacacgaagaatacaaagaaattctttcaaaatcgccttttaatctgtcgtacataagtcgaaacgatattgtccgttacaaactatatcaagaattaaaagacaatggatataagactttatattcaaacacttacatctccccttcggcactttttagtggcaattttgatgtagagcatattatcccgcaatccagattatttgacgattcattttccaataaaacactggaattaaggagtattaatatagaaaaaggaaataaaaccgctttcgattttattaaagaaaagtacggagagacgggaatagaaaacagtttggacaattatttaacccgtattgaaaatttgtataagacaggtgcactctcacgagcaaaatacaataaacttaaaatacaggaaaaagatattcctgatgggtttattgagcgggatatccgtgacacccaatacatagctaaatatgcgaaaacgatgcttggcgacttagtgaaattggtggtttccaccacaggttctattaccgaccgattgcgggaagattggcagttggtggatgtaatgaaagagttgaattgggaaaaatataaaagccttgggttgacggaggaatttacaaacgatgaaggccataaaatacggaaaatcaaagattggacaaaacgtaacgaccaccgccaccacgctatggatgcacttactgttgcttttacaaaacgaggaattattcaatatctgaataacttgaatgcacgcaacgataaaagttcaagcatatatggaattgagcaaaatgaactgtatcgaaacagcaaaggtaaactgctattcaaaccaccttttacgttggacgatttcagggctgaagcaaaacgtcatttggaaaatacgctgatttcgattaaggcgaaaaataaagtggtaacacaaaatataaatgttacaagaaaatcgggtgatgtaaacaaaaaggttcaacttacccctcgtggtcaattacataacgaaactgtttatggaagccaaaaacaatatgttgtgaaagaagaagcagtaaatgcaaaatttgacgctgcaaaaatagccacagtaaccaaacctcaataccgagaagcgcttttgaagcgcttgaatgaatttggaaacgacccgaagaaagcatttacgagtgccaacgctttatctaaaaaaccgatttggcttaatgaacttcacacggaacaagttcccgaaaaggtaaaaacggtgagctatgaaaaggtttataccattcgtaaggatatttcttccgacttgaaattagagaaaatcattgataaaaggattagagaaatattggaagcccggttagaagaattcaccggcaatgcaaaacaggcattttcaaatttggatgagaatccgatttggctcaatagagataaaggtatttctataaagcgtgtaactatctctggtattagcaatgcagagccattgcacgagatgagagacaaggacggaaatctgattttagataaagatggcaaaaaacaacctgttgattttgtgagtacaagcaataaccaccacgtggctatttaccgagatgcagatggaaatttacaggaaaaagtagtttcgttttatgaagcagtgagccgaagaaatttaggattgcctattatcgacaaagaatacaaagcagccgaaaattggcaatttcttttcagtatgaaacaaaacgaatattttgtttttccaaatgaaaaaactggctttaatccgttggaagttgatttgctaaatcctgagaattatcatcgaataagtcctaatttgtttagagtgcaaacaatgtcgaaagtcgtttatgggaataatgtaatacgtgactataaattcagacaccatttggaaacgactgtaaaagatgtaacagaacttaaggatatttctttcaaacaatataaaaccttaagttttgccaataatatttgtaaggttcgtctaaatcatttggggcaaattgcttctgtggaagaatattagcaataaaataaccatgacatgtccaaaccagccctaaagaaagaactcctgaaattgaccaaagagcaattggtggaacagattctcgacttgtatgataaaaacaaggcggtaaaagagttctatgacttttacctcaaccctctcaatgaatcacccgcttggcaggcctccaaaaagcaaagttaaaccatcgcaatctacacgaacatgattaagaaaacgctctatttcggaaacccggcttacctcagcatttcgaaaaagcaattggtaatcaagcttccggaagtggtgaaaaacgatagtttgccggaatccttcaaggaacaatccgtgaaaaccattcccgtggaagacattggggtgctgataatcgaccacaagcaaatcacccttacgcatggcgtgatggaggctttgctcgacaacaattgcgccctcat

SEQ ID NO: 2410 - DNA, 14679 bp, synthetic construct
  source 1..14679: mol_type = other DNA
  misc_feature 1..14679: note = Synthetic
gcctcccgcaaatcactttttaaaggttttgacgcttgcggggctcccgcaaatcgctttttaaaggattttgcgcttgcgggcttcccgcaaatcactttttaaaggatttgatgcttgcgggcttcccgcaaatcattccgcaaaaggtttgttacttttgcacatggcgaaagtcttttcttgaaagttggatggttatgtatcttgtaattgaggaaggtgtggtaatacttgtggagttttatggtaaagaaatgtttctaaacttaagtcattaagaatttttgttagctaaaaaccaatcttattattctattagtttttaaaaaaaaaaatgccccgtatcggaggacgaggcaacctaatgttttcacaacggaataatccttattgtgaattgctttaaattagttgttgcagagataagtatttataatataataaacaagatttcttgtatgatattttgatattattgttgttttttttacctttacggaataatataaaacaattaatttatttattatatcatgaagaagatattaggattagatttagggtctacaagcataggctgggccttagtaaatgagtgtgaaaatgaagatgaaaaatcctctataataagattaggtgtaagagtaaatcctttgactacagatgaaaaaggaaattttgaaagggggaaggcgattacaaccaattctgatagacaacaaactcatggtgccagaataaaccttcaaagatataagctgcgcagaaagtatctttatgattgtttaaacaaacatggttggataggttctgaaccaatgtatgaagatggacaatcttctacttttgagacctataagttgcgtgcaaaagctgcggaggaggaagtgtcactgcatgagtttgcccgaattctatttatgatgaataagaaacgaggctataaaagtaatcgaaaggctaatgataaagaagatgggaagctttttgatggtatgagcgttgcaaagaaactttatgaagagcatttgacacctgccgaatactcccttcagttgctcaataaaggtaagaggtttacgcctgaatattatcgttctgatcttatagaagaatttgagaagatatggaacgaacagaagaagtattagccagaaatacttacagacgagtttaaacggcagttggaagctaaaacaaagaccagtacgagcaagatattccttggaaaatatggtatttattcagcagatttaaaaggtttggataggaagttgcaacccattaaatggagagttgaagcattgcgacaacaggttgataaagatgtgttagcttttgttattagtgatttgaaaggccagatagctaatacaagtggattgcttggtgctattagtgataggagtaaagaactctatttcaataagcagacaattgggcaatatctatgggcttcattaaaggaaaatccacatgtcagtgtaaagaatcaacctttctatcgtcaagattatatagatgagtttgaaaagatctgggagacgcaagcaagctttcataaggaactaactccagaattgaagcaagaaatcagagatatcatcattttttatcagcgaccattgaagagtaagaaggggctgatttcagtgtgtgagcttgaacaacgtaaggtaaaagtaactattgatggaaaagaaaaggaaataacgattggcccgaaggttgctcccaagtcttctcctatgttccaggagtttagaatttggcagaatctaaataatatacagcttatagacaatgaaagaaatagtaagcgttctttatatgaggaagagagaaatctattatatgaagagttaagcattagagataggctcagtaaggccgaggctttgagagtgttaggtaagaagaatagacaatgggatcttaattataaggaattagaaggcaatcgaacgcaggctactcttttcagctgttataacaaaattatcacgatgacgggacatgaagaatgtaacttcaaacagctaaaagctccagaaatccgtcattatattaagacgatatttaaaaacttagggtttaacacaggtatattagaattcgattcatcacttaatgggcatgagttggaacaacaacctatgtatcaactttggcatttgttatattcttatgaaagtgataaatctcggacaggtaacgaagcattattgaagaagttggaaactatttttgggttccccagagaatatgccagcgtacttgctgaggtcgcttttgaagatagctacgggaatcttagtgtgaaagcaatacgcgaaatcttaccacatttgcaggctgggttagattatagtcaagcatgtgaggaagccggatataaacattcgcgtcggtcgcttacaaaagaagagttagatcaaaaggaatataaagaaaagttagaactattaccaaagaatagtttacataaccccgttgttgagaagattctcaatcagatgattaatgtaatcaatgcagttattgatgaatatggaaagcccgatgaaataaggatcgaattagctcgtgaacttaagattggagcagcagagcgagagaatatgacacgaagtataagtcaaggtaatgccgagaacaagcgtattcgtgagattcttgaaaaagaatttgctctctcatatattagtcggaatgatatcataaaatataaattgtacgaagaacttaaaccgaatggctataagacactatattctgatacatacatacccaaagataaactcttttcaaaagattttgatatagagcatatcattccgaaagctcgtttgtttgatgattcactttcaaataaaactatcgaagcacgtgatgtaaatatagcaaagagtaataagacagcctttgattttatttctggaaagtatgggcagcaagggatagaggcttataagaagaaactctatattctgttgcagggtggttccattaataaggctaagtacaatagattattaatgaaagaagcagatataccatctgattttattaatcgtgatcttcaaaatactcgatatattacaagaaaggcttatgagatattaagtgatttggttagagttgttaccccgacttcaggagcagtgaccagtcgcctgcgtgaagactggcagttagtcgatattatgaaagaattgaactttgaaaagtatcagaagttaggtttaactgaagttattgaagataaagatggtaggaaaattaagcgaataaaggattggactaaacgcaatgatcatagacatcatgcgatggatgcactgactatcgcctttactaaaccatcattcattcagtatttaaacaatctaaatgcgcgaagcaataaaggggatagtatttatgccatagaaaataaagaacttcatcgtgaagatggaaaactttgtttcaatgcccccttacctatcaatgagtttcgtgcagaagcgaaaaaacatcttaaagctgtgttggtgtctattaaggcaaagaataaagtgatgacgcagaatgtaaataagataaagacaaagcatggagtaataaagaaagtacaacttacaccacgtggagaactacataatgctacattctatggaacaaagaaacgccctataataaagatggtcagagttggggctgcattagatgaagtaacaatcaagaaagtaagtagttcttttattcgtaaggtgttgctggatagactctatgagtataatggtgatgcaaaaaaggcttttacaggaagaaattcaatagataagaatcctatttatatagatgaagagcgtaaaaggactgttcctgcattggttaaaacgatagagtgggagatgtatcaccctactcgaaagctgatatcaccagatcttaaaatcgacaaagtaatagataaaggtatacgagatatcttaaaaactcggttggcaaaatttaatggtgatgtccagaaggcctttagcaatttagatgagaatcctatttataaggatgaagcaaagaagataattttgaaacgagttagccttgaaggagtttcaagtgtaattccgctacatacaataaaagatagggcaggtatgcctattacgggaaaggatagcgaacctgtattgggtgattatgttcaaacaagtaacaatcaccacgttgctttttatatagatgagaatggtaatctgcaagataatatagtctccttttttgaagctgctgaacgtaaatcacaaggagttcccattattgataagaactttaatcacgatataggttggcgtttcctatttacaatgaagcaaaacgaatacttcgtttttccaaatgaagttactggatttaatccttcagaagtggatttaatggatgaagctaattatgatattatcagcccaaatctatacagagttcagaaaatgtcgagagttgtatatggaaagagtataattcgggattatgtttttagacatcatttagaaacgactgtagaagcaaatgcaaatcttaaaggacttgcatataaacaattaaagtctttgtcatatttagaaggaatagtcaaagtacgtattaattgcatagggaaaatagttgcagtaggagaatatgattaatacaaatgatttatgataaagaaaacattgtgttttagcaatcctgcctatttgagtttaagaaactcacaattggtgatttgtttgcctgaggtagaatgttgtaatgaacttcctgatagtttcaagcagcaaagtgagcgtacaattccaatagaagatattggagttgtactccttaataataagcgaataacaataacatcgtccgcattagaagccttgatagaaaataatgctgctgtggttacatgtgatagtaaaaatatgcctaatggacttttgttgtctttatgtgggaatacaacacagaacgaacgattccgtacacaaatagaagcatcactgccacttaagaaacaactctggcaacaaactataaggcaaaaaattaacaatcaagcgaagcttctaaatacatatactaatgcaaaggtgggatgcatgtatgcttgggtagataaggttaggagtggcgatcctgataatatagaagctcgagctgctgcttactattggaaaaatctcttttcagacatccccaattttgtaagaggacgggatggagtacctcctaataatctgcttaactatgggtatgcaatattaagagctgtcgtggcacgctcgttagtggcaagtggcttacttccaactttggggcttcatcatcacaataaatataatgcttattgtcttgcagacgacataatggaaccgtatcgtccttatattgatggattagtgttggacataatgtcatcaaccaatgattatactgagcttacaaaagatattaaaatgaaactcttagagattcctgtacttgatacaatgattggagataaaaagtatcctttaatgatagctacacaacagacgacagcttcgctatacaagtgctttagtggggaacaaaggaaaatgctttatcctgaattataaaaatcgattagtggacacttatagaattagtcaatataggagtatgtggttgatggtattctttgatttacctacagatacaaagaaggagcagaaagcagccatgctctttcgtcaaaatctattgaaagatggatttacaatgtttcagttttcgatttatatacgtcattgtggtagtaaagaaaatatggaagtacatattaaaagagtttctacatttattcccacatatggaaaagttggaattatgagtataacagataagcaattcgaagggattaaacttttttatggaagaaaaccgcataagccaaatgctcctggagttcagttagaacttttctaaaaatgaaaaagttccacttctaaaagtggaactttaattctttatactctttttgttttcctaaagtaactcgtattcttctattagtcaatactttacgctacttgagttgtgttcgatagtacaaagatactaattttaaagcaattcacaacagaaaataatttttctcaatgattttgtcgttgtgttcgatagtacaaagatactaattttaaagcaattcacaaccctcgtttatcttctcctttaatctcttggttgtgttcgatagtacaaagatactaattttaaagcaattcacaactttgtctgtttttcttatgattgcagcgtggttgtgttcgatagtacaaagatactaattttaaagcaattcacaacgccgtggatatagtcagcgcctgtcttatagttgtgttcgatagtacaaagatactaattttaaagcaattcacaacgcagaagtagaaaagttacaaggaaagctggttgtgtttgatagtacaaagatactaattttaaagcaattcacaactttggcaaggtcggggtgcgccgccgtgaagttgtgtttgatagtacaaagatactaattttaaagcaattcacaactaattattaatactatattatttaatacggttgtgtttgatagtacaaagatactaattttaaagcaattcacaacgatgccgtgctcaccgctgtctttgtaatgttgtgtttgatagtacaaagatactaattttaaagcaattcacaaccttgccgactttcgaaaatagtccttaggggttgtgtttgatagtacaaagatactaattttaaagcaattcacaacaggtcaactcggtgttcttcataatcagcagttgtatctgatagtacaaagatactaatttaaaggtaatccacaatcagaaggggctaataagtttattggtacttatagtgttttcaagtataaagggggggctttttgagtatttcacccataatcctcactcaacaaaacagctgaaagatttgtttttaaagggaaaagttgctggtgattgcttggttgtgtgtatcattcttttatatattttaatatttcatgtgagcttttgtttgcctgttagcctaaaatattgtatctttgcaggcgtagaataaaaaggatagtacatcttttatggtactatacttagtatttaacggaactgagattattggctttttgtttcttatatgccaaaatcgcgagtatatcatatttattttactcaggttccataaaaaaacaaatatggataaaagaaaaaagatcgtattgttgatttttagtgtttttatgtttttccctatgtactgctgtgcagcagaacaaacggagaatgcgaatgaagtagattggaatcctgttatcaacgcaatcattcatgttgagagcaaaggaaatagtcgggcaaagagtggttcttctgtaggtgtattgcagataactcccgttttggttgctgagtgtaatcaaatcttgaaaaaacgtaagagcaaaaagcgctttaagttatccgatcgtttcagtattgcgaagtcgaaagagatgtttttgttgattcaatcacattataatccgctgaatgatattgaaaccgcgattagagcatggaatggtggcattcattttagcattaaaaagacgcaacgatattttgaaaaggtaatgagcttactccattaatatggaataaaaaacgactgattgaggataaacaatcagtcgtttttatttttcttgaatttgaatatcgtccttttactttccttttgttttctgaacttcctcaacagcttttctaactgagccgtacatcagtagcaatcgcttagcatggtcatagtcaaggcctaattcttcaataatcattcgagttcctctgtcgatgagtttcttatttgtgagttgcatgtttaccatgcgatttcctttcacacggcctaactttatcatgatacttgttgagatcatgttcagaatcatcttttgacctgtgcctgatttcattcttgaacttcccgtaacaaactctggtcctacaaccatttctatggggatgtcacatgcttcggacatgggcgagtctggattacttgtgatacagcctgtaagaatgcctttttcacgagcttgtttcaatgcccctacaacataaggagtagttcctgatgctgcaattcctaccactgtgtcgagtttattgatgtgataagcttccagttcttcccatcctcggtattcatcatcttctgcattttcaactgcattgcgtagtgcggtatcaccacctgcaattaatccaatgatatgcgttggcgaaacgccgaatgtgggtggtatttctgaagcatcaagcacacccaaccgaccgcttgttccggcacccatatagaataaacgacctcccttctgcatccgtgggactacggcttcaaccagtttctcaatctgtgggattgctgcttcaacagcaagtgccacctttttgtcctcttggttgatgtcaactaataattcgtggacactctttttctctaaattgtcatagagagacggctgttctgaaatctttatgaatgccataagctttatactttagtagtgtgataggcaataagtccttccattggcgcctgaattgttttgccaatggtcatgtgttctgctgctaaggcctcttttaaaggttgctgaaaatagtatgcaatagagccaacaaagcctatgggcaggtgttcccagccctgatattgcttcacattgcgaactaagaagcggcggaagttctcctttaccaaatcaaaaatggctttgttttcaatgtgtttcgccaggaaaggaacgaaacttgccaagaaacgattagggaatttctgacgatacacatggtctatgatatcggcattgctaagtccatattctgcatgaaaggcttcgacaatgtctttcggcaattgatttttcagtacatcgcccactaatgtccttcccaatacagccccactgccttcatctcctaagataaagcctaatggagaaacgttctttgtgatgtcctttccatcataagcgcatgaattactccctgtacccatgatacaggcaatgcctggttgatggccacatagacctcgtgctgctgccaacatgtctgtagccacctcacaagctcccgtgatttcaaattgcttttttaatgcttcagccactattgggcttttctctttcgtgcaaccagcaccatagaaatagacggagtcaagatgtgttgttggcaaatggggtactaaatgtgtagccaattcatttgctatctcttctgaactctggaagaatggattgattcctgccgttcttacctttgtcacactattcttttggtccaccaaacaccaatcggtcttggttgaaccactatcagctaaaagtatcataatttgataaatatttgtttcttgtatagataatagccgctactccatgtgaggaatacgaacaataacgcccaagccagtgcagcattttgtgttcctatgcatggctgtagcaagtcggtgaatacccacgcctgtatcggtttaccacaaatgggtacgattgataacggaatcagtaacaagtctgcccatacatagagtgctaatggatttacaccaaagactctaaagaaggtgatggcactgcttttgtggccttctttgtcgatgacccagctcagcatggctaatgttgttgaagccaagccgcaagtaaccagtgcgaaagttggggtccagagtttcttgctgatagggcaaccatagcttaaaaggaagcccgcaaatgtcagtaatgcaccaaaaaggaagagtttttcaatcttttcgttgatggatgtagcagacattaaactccgtcccacgcagaatcctatcaacacatgacctaaagcaggaaggttactcagtaatccttcggggtcgggaatatcccattgatacaaatgttgacgtccgaaaacagcctcatctataacattgcagatgttcgatgcatcgtgggcaaatccatttccatagcataatattaagtaatatcctacaaagagtgcaccaatgaaatagggaatatacttgtgtttcatagagattgccacgaaagaagccagcatatagcagaaggctaaacgtggaaacacaccaactaatcgtatgtgatcaaagacgtttgccgacactacaatgcgcgacagcaaggggagtgttgcgttttctgcattgaatagcccatgagaaaacatcataatccaactgatgccaataccaatcacatagagaagtatgccacgtttgatgatttttcgtgtgcatgtccaagaccattcaaagttatatttgcgcaaggatagataggttgtgatgcccatgatgaacataaagaaagggaagaccaagtctgttggtgtcagccccagccactctgcatgctccaaaggcgtatagacgggttgaccgcccggattgtttacgagaatcattccagctatggtgattcctcttaagatgtccaccgcttcaatacggcttgttttctttgtagtcatttgtttatttatataggtagtatttcttcgaaagtgccttgaaaggcatgatgtctttgtcccaatagcccactacatcctgccagttatgccgctgtaagaagcgcgtgcggatgacttttgagccacaaactttatcaaacatggtcgtacgttgtcccgattcacctaagatgtcgtgtgaaggatagcgctgattcaacacttgcaaggcatagaactgaacgtcgcagagtcttgctttggcataatcggtaaaatagatctgaactccttgtaaggcttgtcctttctgtttaccatagaaaggaacatagtggatggggcgaaacaacaatcctggcagctgcagtgcattcatatcgtctgcaaatttgtctgcatctatccacgaagcacccaatagttggaacggaagtgtatagcctacgccgatgtttagactgtctaattcacccacaatgcctgtcatggcatagaaaggcgcagcttctgcctgtggaatatgtggagaagcgggaacccatttcagctttgttgcactgtaatccatttttcgtttccaccccttcatcttcactacttcgagcatacagggtttgcctaacatgtgttcaccattcaacaacatggccaattcgcccacggtgagcccataaacataaggaatcttaaaggcactcacaaacgattggcaatcctcttctgtcagattgccctctattttcaagcctcccaaaggattagggcggtctaaaacaaccactttaatgttatgtttagcagcggctttcatgatgtttcccagcgtgcttatataggtaaacgaccgacatccgatgtcttgaatgtcatagactaagatgtctatatctttcaacatctcatcggttggttcacgttgtgtgccataaagtgagtagatgggtaggcctgtacgttcgtctttggtgttaccaatcttgtctccagcatgtgcgttgccacgcactccatgctctgggccgaataatgccaccaacttcacattctttgcagcatgtaaaacgtcaatcgttgaacggagttcgttgtctactcctgtagggtttgtaactaagcccacacgctttcctgccaatatcttaaagtcttggcgtttcaaaacctcaattcctgtcaacaccttagcctgtgccaagcccatgaatagccagcatgaaagcaacaataaaactattttcttcatttattcaacctcatttgtctttctgccatattgatcatcgacctgctttctcacaatgatagttactgcaatcgtagccaagcagcagaccattactaaccagaagaagccttcatagcctaacctctcctgcaaatatcctgcaaacatgcccggaatcatcatgctcaaggccatgaaagtcgtacagatggcatagtgagctgtcgtgaattcaccttctgaaaagtacatcatataaagcatatatgctgtaaaaccaaagccatatccaaattgttcgatggctacacacgtgctgatgacaacaacattctcggggtgtgtcatgctcatataaaggaaggttacacatggaagtgtaatgaatatcgccatcggccataatgatttctttagtccccagcgtgaagaagcaaagcctccgataattcctcctaatgtcaggaagcatgcgccaatcgttccatagatgattcctacctcagtagtggctaagtttaggccgcctttttcaatcggatctaataagaaaggattgaccattttgagtagaaaagcctctggaagtcgatagagtaacatgaaaacgatggctaatagcacaccgggtttgctgaaaaatgtaacaaaggttcgtacaaagtctgcccatatctcttgtgctgcatgtttatctgggttattgttgagatgtctttgatcggttttaggccttggaacaatgaagatatgataaagactaattagtgcaaacaataccgaagtgatggtcatggtaagcgtccaagagagtggaatgttttgtgttgtgcgctcaatatagccggctatatacaccaaaataccttgaccaaagattgatgacaggcgatagaacgtgcttcggataccaacaaagaagctctgttgttgctggttgagcgccaacatgtagaatccatctgcagcaatgtcatgtgttgccgaagcaaaggctgtgataacaaacaggattaaggtgaaggtgaacagtgaaattggggtagaccccgctgctattgtagctttgtcagggtgtggaatgctcaaggtggtgagcacaaagacggctgtcatgagcaactgcatacatagaatccaccatcgtttggttttcaagatatcaacaaacgggctccataatggtttgattgtccacggcagatagagtaaactcgtgaaaagtgccatctcaccattgggtactcccatcttcgtaaacatcgttacagagatactattgacgataaaatagggtataccttcagcaaaatataatgtcggaacccacaaccaaggggatgcatgattagttttcatgtgatgcagtgtattgaatgcttaacaaagtttagatagagggagtgctgtttaggctactccctccgtggtttatgaatgaattaatctttttgttctttattctttttcagacgagccaatagttcccaggtgcggatacggtctttataggtgttgtttctgttttctttctcaacacttaatgcggcatctgagttgtcatcccaacgtctacaatagtacaaaacgtcatagattcggcctatctgatagttgcgagagatggctaaacccaaggcatagtcttcaccatagttaacatttggtagtttcacttcgcgcaaaataggagtaaagaaggcacgaggcgcacctaaaccattaatgcggagtgcattgtttcgaccattttctggtgtccattcgcgatgatcaatcttgccaggaggcagcatttggcggttgatatcagtcaacatatacgtgcctattaccattgcacattgttgttcataaaaggcatcgacgaatttttgtagggtgtgttcatcagaataaacgtcgtcgctatccaactgcacaataaaacgaccgcattgtggatggtttgccgccatattccagctgccaccaacacctatatcgcggcggttagggatgagatgaactacgcgttcgtcgcctttatactcctcaatagcttctgttgtgccatcagttgagtgataatcagggccattttctacgataaagacattatatttgaagttggtcttttggcttaacgcgctttcaatagcatcgcgaatagttcgtattctgttgcgcactggtatcatgattgaagcctcaacagggaacgattcagcctttaagtcaacctgcttaaactctggtttcaagtatgctccgatagctttcaggtgattggttgctacagcttccatctcaatttgtgaggcacggttgcgcggatcaacataatcgaagagcttttctccagtcttgcggttgtcaagttccacctcactataaagatattcgttgatatgttcaaagcgaccatttacagaaagtttcaaacggaggtcgtagaaaccagctgcttgataagactcggtcatctgtttagcagccgctttcaaggcatcagtacggaaaagcaacactgaaccgaaatcaaagtcatcgcgcaagctaccttgttgatagtcgatgacaggagcttcgctgcgtaatccctctgccgagatattgtaatggtcggcataagtcatgaccgcatccgtatattcagcaatccgaaccatgcgttccaaggcataaagtcccatttccatatattgctctttcatataaacaagcgtgtagggagcctctgctgccatggcaatcttacgcatggtatcactgcttttcagtgtgtcaatcttcagtacgccgtcaacgtctgttatgttttcatcgtttgtctgtaaaatgatgatgcggtttacaagttcatcattttgcaatccagccaacgtt

SEQ ID NO: 2411 - DNA, 14651 bp, synthetic construct
  source 1..14651: mol_type = other DNA
  misc_feature 1..14651: note = Synthetic
ttacaactaaccgccctagtttagaccttagccagaaagactgatcaatgaaaacagtttttgtcagcatctgctgctccaacatttgataaggtaggctattatttacgaccgcctcctgtacgcctggatgtatattcagactttccctcatctgataatattgaaccaggccattatattgaataacctgattgcttcctatgcctttgactgcactggtctcattactcagggagatatacctggaaggttgatgctgtgaaagggccgaatcattttgaatagttgtgcctgagcgatcccatttgggaagatccaatctggtggtagatctgatataaactgaccggctgttcttctcaacctgccctttgaactgccattgttcagacctgtatatattattttggatttcttcgtaacctatagtatctgtatttggcaggaagtaatttactaatgaactttcacgatattttcttttaagctttagggaataaatatttaaccgcagcccccagtccgccccgggtttaaagagggtgtttattcctcctgcaaggtcattgttcttcaggtaatatttatcgtcaacagtaggatgcgatgtagattccaaagaaaggtaaggttgcacggtcttcagaccaacctcattatcgaaggaaacaccgatatcagcgttctcattaagcaggtccagtccaacgttgttagcctttaccgtattcatgctttttatacccttcttcagaatgatattattcagttcagctgtataggccttgtttccagatcctacatgaccagtgttaaaaattaccgttttagcgctatcagagagcttcaggttaagagaaatatcattagttgtcacaaagccgttcaacgccttgacaggttgatcccgttcgatgacctccacctggtcaacagcaccgacaggcattgttttcgtagctatcccatatttttcatccagcaaattgtccccgtcaatgtagatggtctttatgggtttgccattgtagctaatcgcaccccgttcatcgacctggatacctggaagcctgttgatcagatctgcaatgaccctgtcctgctgatcgcggaatgccttcaccttatattttaacgtgtcgctggagagcttgatactattgtcagacttaacgatgatctctttcaattgagccattgtttgctttaacactatcgtatagggttgatcggataattggccgagcggaacggtttgctggtgaaatccaagacaagtgaccttgatggataacttgtaactgtctgttacaaggtggcatttaaacgcacccttttcatccgtcttaccaaaaaaaaggccggtccctgcttcatcgattatggtaacagccgcattagcgatcggaccaccgatggaatcggttaccctaccttttacactcagctgaccttgtgcggacaacttggacaatgatagcaaagaaacaatgaagaaaaggaagagccgtattttttccacccgggtagatatctatctatttaattctaaaggaaagtttaccacacgtgttttgaaatttaggggggactggtcgttattaaccttaacatgctctatgatagcctcaccaccattcatactgttcccggaaacgccctctttataggctttttccatcctggcaaatgcagcaggagaagtagcgatggcgtctttaggcagatcgagtggtaaatgagcagaaccgctacccgtgaattgaacattggtgcagacgaaccggatcctttgacttacatcgtaagcttccattatcaggccaggcagcccctgcagcttccaggggccgaaaccagcagggatgtctatcgtaaaccaggccgtataactccgtcccttacagatacctgtagctttttgacaatggaaaccgagcacctttttagtctccttaaaaatcttccaatctatcttttcaagttcttcccttatcagatagttgttgtcattgaaaggtttggcaatacacaagaaattttctgcttgcgagacataaattttttcggaggtataagggtgtactatacccatatctatattatcggaaccagaccgcattgcagcgtcaatcttcgcatgctgtagcgaatcctgaatcttctttgtgtagctgatataactgcttttttttccatcaaacactaattgaaagtcttcctgccacaactcactaaggttggtagtgtccctaatatagttaaaatgataaatagcaattccaccaggttcctcgtaggcattaggatacctaaaagaactgattatacataagaatacaacgataaaagtaaacctcagaaagtaccacataataattagaattaaatagattattaccccgaagcgtgttcggggtaataatgtgtcatccttatatgatatatcttattttggacttgacgtatgtcttggactatccggcaagcctattatcaattttcatgaaagcaaccattactatccaggtgatcaactacatagtgtcctgcaacagagcccatatcagcccaaaaggtaccatttggagcactaacatacacagtgattgtctgaccacatgagtcatggaaaacaaatgatttttgtatacggaaggcgctttcagttgttcgcattcctatttcaacttttatcggctcaattgaattctttttacttttcggggaattggcagatgcgcttaaacctaccacagtgcagattaatacaaaaaacagctttttcattttttaattatttaaatgtgaacaatgaatttataagatatgtacataaaggatgatcattaaaattgttagcaagcaggtaaaaatacaaaatataaatatatttcacacacatgtgaataattttttgtagtcctactcaaaaggttatttaaaatctaaaaaagaattaacggatgctgaggataactttggctgaggggggaaagtatcgtgtacctctaggaagttaaaagctgaattttggtaagattattattttagtttcctaccaaaaaataaaatagatggaacagcaacaagctaatagattaacaaagaagcaagagatgtttgttctaatagcgtaacatgaagctagtacgctgacggtgcggaattatttcgaactatatgatatggttcatagtgcagcttctcaaatcatgccaatgtttaaagaccatttgcaaacagatggttatgcggtatatgaaaaagtggttggcaaggatattactgtggtgtgctgccttacgcatgcacttcgtaaaatgcttgacgtgcagactaatgacaaatccagagtatagcatgtgcttactgagatagcctagcaatataaaatagaaacagcgtgtaaagagcagcagctaactgaacaacaacttaaagacaagcgccttaaggaagcattatcatagtgcaggagttaggagaatggatgaaaaaaagaatatctgctgcctaaacctaagagccttatcaccaagatactggcctatagcattaacagatggggtaattcatttaaaagcaatgttaaatagtgcagggtgatgtagcaatttatttgttttactgttatccaaacgaagtttagtaaacatgttatggggatagccaaacagaagtattagtaaagaattaagaagaagccgtaccgcattatgaagaatgattactattaattattttttcataactttataatggagcaattaattataggataattaataaaaaacaaggaaatggaaattaaaaatatagttgtagccggcagtggcacgatgggttaccagattgcttttcagatagcttataaaggctataaagtgaaggtatatgacatcaatgatgctgtactggaaaaagcaaaatcaaaattcaatatacttagtgaggcctataaaaaagatatcggcagtacgaatgaacagctgaagacagcccttaacaatttggattacacatccaaccttgaacttgctgttaaagatgcggatttggtaattgaggccgtaccagaaaacattgagataaaagaaagtttttatacgcagctggctaaattagcgcctgagaagacaatatttacaacaaattcttctacgatgctgcccagtttgctagccaaatttactggaaggcccgagaaatttcttactacgcactttggcattgaagtttggaagcataaccttactgaaataatgggacacccggctaccgaccctacatactttgacattgtcactgcatttattaaatcaatcggcatggtgcctatcattctgcataaagaacaggctggttatgtactcaataccttattggtcccatttttacaagccggtttaggactgctagttaacggtgtttctgattatcaaacaatcgataaaacctggatgattgcaacggatgctccttttggcccgttctctttcatggacactattggccttaccactgtttataacgtttttaagctcatgtatgacaccacaaaagatccatcgcttgaaaagatagttacctacctgaaaacagaacatattgacaaggggaaattaggcgaggcaacgggtgaaggattttataaacatcctaatccaaattacaaaagcaaagaattcctaaaatagtttatcagatcgtgtcatttaccgtcacacaggctatgtagtatgatatctctctaactacatagccttatttttttgcagagcagccagatatcctaaagcaaataactgtgcgatcgcacgagacgccaatattaaatttccacctgcattttatattcggatattcacttaatcttccattttttccaaaactttcagtttggttttattgcttttggaacagcacgaaaaaacaataaaaagagataaccatttcttgttacaagaatcaaattcaggatttaaaatccattaaaacagcaagcattaatgattggccattaaatttatctttcatatcacaattccggtcaggaaaccggatggaacaactttaaatgcataagcttaaattttagttagcctattcaaaaattatatataaatataatatgttttatgcaaattgaaagggaaaatcaaccagtaaatattatgtaaaaatggaactaggtactgtgtgaaaacagcctttattcgtgaattataattaagccgcgtgaagtcgcaacaagaaaatgtgtgattcgcgaatgagatagagtaaaaaatagagtaaaaatgaaaaacccgcgaccagcgcgggttttagaagaataatgcggaccggacgggactcgaacccgcgacctccgccgtgacagggcggcattctaaccgactgaactaccgatccattttccgaccgcaccttagcgtggaacggggtgcaaatatagcaacaaatatttcacatccgcaaatcctatcatgcattttttcttaaataacccgaactcatttctaatcctcatgggtagtatcagatgatctgtacactttccgtagaatacatgttcttaataacaagtaatgcttgcacacatatgcatttgcttcacaaatacatgtagtccactacatagctgtaaagcaagtcgggtaaaaaaagccgctatccggcaaggaataacggctttcgttcgcgatatttatatgatcataataacaacgtatctatgcgatgcgcctgcaccacctgccgggccggcgaccaggaaaagatggtaaaatatccatcctgtgatgctaccagtgccaatgcatcatgctgatcatgcacaaactgcgcggcagaaaaatgacgggtacctccgatcgcggatgcgtgcagctccacagaatgcccacccaccaccggttccgacatcaacaccttttccacgatggttgcattttttgcccgggaggtttttacgccaaatgcaatcagctccatgtcctcattgatcacggtggcaccatctacagcggtaaggccgctcaggttttccacttcccggcgaatagcgttctgccagaacaattcactgaccagggtattgtctttacggataagttccgcaatacccccaaatgccggtgccaccgggtattgcatgggatgaataatgctttccctccacttatcactggcattgggcactaccagcaatgtaccgccatgtctatgcgcacgcatggacacggccatctgtatcaatacattcacgccattgttccacaacggcgatgcatcgatacccagcaaggcggtaagcatagccggtgtatctggctgcataccactatcttcatcgattatttttacctggtcgcctcttaacacagccacattggtgaatttacccagcccggtaatacgccggtgtttgatcaccagcaaacccggttctgatacatccaccacaaaacagaggttaggcacactggtggtagtgccccaaatacataactctccgtcttcataccacacacctacatgaatgcccgacctttctacaccgggcgccaatttggtgagcaccttggaagtaaagggcagtggttcctcaaatagcaacggattgctggtttgggagggaagcataaatgccagggagatgcgggtgtcatttccctcctcccggttaaggctggcccaaaatgccgtatcgatgattttctcaatcacgaacgcattgggcgcgggcgctacacaatcttctttcgcgtcctgcgccaaccgccggtgcttgataaaatgaatttctatttgttctgccacttggcgggccgcctggtaagtgggagcatgcattaattccataaatcttttgcttttcgagataatcgcagtacctgttactttggaaacgctgccggtcttttaaatcctgatcgcacaaatttaagccctttttgccgattcggtaaacaagcctgcttaccaggataagacattaaaccctaatgatttaattggattattatgctccgccaggatcaatgaaaagcaaaatataaggaaatgttaccatattcatggctgtaaccatgttttagcaatgcagtggcagtgttttgggtataagcaatgccaaaggcaccaaagctaactacgccgccgtaattcagggaataaaccaatttctgtatggtggcattgctgcggtctatcataaccgtcttatattcatttaccggatcttctgcatgcaactggccgttcagcaatgcattattaactacccactgtatttccggcctgaaaatgagataggcttgcaatatgccgtggtgaggaattttaggccgttgtgtgttggtgtattgccggatataaccgttgtagtaaggctgcattttgccaatacgcaataaagggtatagcgacacaccactcatcatagtacctgcgcttacctgtgtgcctccactcagttctacatgcgatccccattgcaacagttgtttctcgaaacgcacgtttatatttaccagcaatttattttccagttgatgcgaccatccatgcgggcgttcaaatttaaacaagtgatgtataaatcgctgggtagcttcaccgccggcagccggtccacgcacaccaagaataagctccgattggaatgcatattttttgaccggattgtaagaataaatactatgaatagcaaaaagagcggtggaataagcgtaatcgttgggacggtaattatactcggtaagactgtctggcgtaaacattaattgggcggcgctccagccataagcattaatactgctgttgcccgcttttggggccaggcgatcgaggaagaagtggtcgcgtcctgttttggtataaaagaaatccaggcgaaaaccattggtatatgcttgatcagtgggcaggaagcggatgttcaggccatcattgtcctcgtataaccgtaacattttttcagtgccctgcgcagaaagccggttagcagccatcaacaacaaaaaaaagcaggataaaatcgttttcacatccaatcggtttgtttcgtttcttcgtcgttaacacataagcccgcagtacccggactgtaaaaagtatggtgatgggggaattttaatgctcatgctccagcatatacttaccgaaattagcacaagttttaaatcgtaccaagttaattatggctaacacaggggaccctgggggtttagccagcactacgcttccataaaaaaaagcggatgaccctgacttgagtcatccgctttcaatggtatgtttgcctacttcttttcttcctgatccggtataaacttcatagagatggagttcacacaatgacggatattttttgccgtaagccgttcccctttaaatacatgacccagatgaccgccgcagttagcgcaaaggatctccgtgcgatgcccgtctgcatccgggacatgttttacagctcccggaatttcatcatcaaaactaggccatccacagtgcgaatcaaatttatctttagaatgatacaacggcgcattacactgccggcacacataagtgccactagccttattatcggtatactcgccggtgaatgcacgctccgttcccttgtgcaggatcaccctggcttcttcgttggtgagtttgttatatgacatatgatgtttttcttcctaaatatacataaaaaccataccacgaaacagccggccagaagggcagtttttactagctctcccgggccaaccaggcgacacaaatcaatgctggggcgccaaactggcataaccatagctttcactgaaggcaggatgagcttgttcaggacatgcgttacttgtatagatgattagcataaagccgcttaaaaaaaagaaatttccaccccatgactgaaaataaaaacgacccaatcgtttaatcgtgaaaaatcgattatgcaggaacagcatgtaatagacatgatggcatgcatacctgcacacactcctactaccagcatttttacaatacggacgtagtataccgctctggcacaatgttggcggatgttaggtaaataagatcattatggagattattattcaatcattgggattcacggccagccctgcgctggaaacctttatcggtgaaaaattacagacgcttaaaaacgatcgcgtagttagcgcacgcgtaaccctgtttaaaggacccgaaagcatgcctgaaaataattactgcgaaataagactggagatcccagggaacgatccatttgtaaaaaaacaaagcgcttattttgaaacctccgtgagcgaatgcgtggaggtattatttgccgacctgcaaaaagcaaaagataaacacctggattcccgtaaagtacaaaaggaggtgatacaggatgcactgctggctggcgaagatgatgtagatgaagacgtggaactggaagatgtggtaaagtaaagggatagcatattgtaaaaagcctggttgaaattcaaccaggcttttttgtatttttatttttgtaatctcagaatatttctattgatttgtatacaaacacccctttagtaaatccctcctatggtttgcggcaaatatcccataccgcaaatactccagatttatctgcatggcctgtttacaataatttcatttgcacacgtatgaaaactaaaagttcaggacttcatcatttttctcaaaacggcacttccgggcataaaaaaacccccgtaaagtcgagggcaacttgatgtttacacaacgggataacccttattgcgatttgcttcaagacaaatatagaactaaaaatttaaacgcaccaaaaagaattgcattccaacacctgaattttagctgaagctaaaaaaatcccaatactcctataatccccttcatgggtatataaacaaaagcgaaaaaacacgcatggcttcatcaaaacaaaaaatctaaaatcaattacttaatggaaaagaaaatcattggaatcgatcttggcgtaacctctattggctgggcctacgttatagaagacgaaaacggccattcgcgcatattaagaattggcaccagggtaaatccacttacaacagaggagctgaaaaattttgaacaaggaaaacccattacagaaaccgccgaacgtaccttaaagcgtagcatgagaagaaatctgcaacgttacaaacagcgtagaacaaaccttatcaatgtactccttaaaaataaactgatcacggaaaccactgctttggcagaggatggcaaaggcaccacccacctcacccacgcgttgcgggcaaaggcagcatatgcgcaaattcctcttgaagattttgcgcgtgtactgctcatgctcaataagaaaagaggatatcgtagcagccgcaaagttaaaacggaagcggatggccaagccattgacggcatggcggtggctaaaaaactgtacgaagaaaatattacccctggacagttgtgttatacattactattgcaaggaaagaaaacgctccccgacttctaccgctccgacctgcaagtggaaatggaaaaagtatggactttccaaaaacaatttcatcaagccatactcacggatgaattccggaaatatatagcaggcaagggccagcgagccacggcggcgagcttctggggcaaatatggattcaataccgcagagtttaaaggttcacgggaggagaaaaaactgaaatcctacgaatggcgtagtcaggcgatcactaccccgctaagccaggaagaagtggccgcagtgattacagatataaacagtaacatagccaattctagcggctatcttggcgccatcagcgatcgtagtaaggaacttttttttaacaaacaaaccgtaggccaatatcaatacaacttgctacagcaaaaccctcatacaaacctgagcggccaggtattttaccggcaggattacctcgatgaatttgaaaccatttgggaaacccaggctacattccataccatgctcaccccttcactcaaagaagagatccgggatattgtgatcttctaccaacgcaagttaaagtcgcagaaaaaactggtgagcatctgtgaatttgaaaaaagaatactggagcctttgcagggagataaagtagtgggttataaggtggcgccaaaatcatcgccacttttccaggaatttaaaatctggcaggcgcttggtcgaatggaaatacaacataaagttaccaaagagcgccattttcttgacctggatgctaaacaattactgtttgatgaactaaacgtaaaaggcgatctcactaaagaaaatgccctgactattttaggattcaaacccaaagaatgggaatgcaacctcctgaaactggaaggcaacaggaccaaccaggcactctacgaagcctacctcaaaatacttgaactggaaggatatgaagtgaaagacctgctaggtttaaaattggataaagatgatataaaactaagcgagcttccggttgatgctgctgatataaaaaaaatggttcgggagatatttgaaacacttaatattaaaacatccctactcgatttcaatgcaacgctccccggaaaatcttttgaacaacagcatgcttaccaactatggcacctgctttattcgtacgaaggtgataactcaccctccggcaataaaaaattacaggatttattgcaggccaaatttggttttaccaatgcccatggacaaatattggccaacgtatccctcgagacggattacggaagcctaagtgcaaaggccatccggaaaattttcacacacattaaggaaaaccactatagtgccgcctgtgcgttggcaggatacaatcattcttcctatttatcaaaagaagaaaatgagcaacgaatattaaaagacaggctaacaatattacccaaaaacagtttacggaacccggtggttgaaaaaatacttaaccagttgataaacctgttaaatactatttttgatgacccctatcttggtaaaccagacgagataagaatagagcttgcccgtgaattgaaaaaaaatgtacaggaacgacaaagactaaatacggagattactaaaaacaacacagagcatgagagaataacaaagatcctgattaaagaagacaatatcaaaaaccctacccgtaacgatattatccgttataaactctaccaggaattaaagcacaatgggtataaaacactgtattcgaatacttatataccacgggaagaacttttcggtaaaaactttgatatagagcatattatcccgcaatcgattttatttgatgacagtttctccaataaaacgctctgcgtaagaaaagaaaatatcgataaggcagacaggactgccatggattttataggcccctatttcggggaagataaagtgcaggaatacatcaaccgggtggaaatgctgcaccagatcaatctaaaaaatcccgaagaaggtattggaaaagggaagtataaaaaactattgatgaaagcttccgagatcgggcaaggcttcattgaacgcgacctgcgggatacccagtatattgccaaaaaagcaaggcaaatgctcttggaggtaaccagaaccgtagtagctaccactggcagcattactaaacgattgagggaagactggggcctggtaaatgttatgcaggaacttaatatggacaaataccgccaacagggactaacagaattaatcgaaaaaaaagacggcagtacaaaagaaagaatcacagactggacaaaacgaaacgatcaccgccaccacgccatggacgccctaaccatcgcattcactaaacatagtcacattcaatacctcaataacttaaatgccagaaaatctgatgataaaaaaggaaaagaaatttttggtatagagcaaaaagaaacagaaaaagtaaaagacgatacaggtcagacccagcgcaggtttaaacttcccatgcctgatttcaggcaagccgccaaacatcatctggaacacttattaatttcctttaaagcaaaaaataaagtattcaccaaaaataaaaacaagtataaaacgaagaatggcgaacaggtaaaattagaactgacgcctcgcggacaattacataaagaaaccatttatggaagaataaaaaaatatgtcacacatgaagaaaaagttagctccaagtttaatgcacaacttatccaaactgtggctaattccaagtaccggtatgcactattaaaaagactggaagaaaacggtaacgatcctaaaaaagcttttacgggaaaaaacagtctcgataagacacccctcttcgttgatgcaacacagcaggaaaagataccacccgttgtcaaattggtaagtatcgaacaagggtataccatccgcaaagacattaccccagaaaattttaaagacgccaaaagtattgagaaaatagtggacgttggtattagaaatttattacaccatcgactggaaacatacaatggcaacgaaaaagaagccttttacaatcttgataaaaatccaatatgggtgaacgagtctaaaggcatttgcataaagcgagtaaccatcacgggggtaacgaacgcagaaccattgcactataaaagagatcaccatggtaagcccatactggataataacggcaatcgtacacctgctgattttgtgagtacaggcaacaaccaccatgctgcgatctacagagatgcagcaggcaacctgcaggacaacgtggtatctttttacgaggctgtagcccgcgtaaatcaaggccttcctattattgacaaatctctaaataaagagcttggctggcagtttttattttccttgaaacaaaatgaatgtttcgtttttccgaatgaagggtttgatcctttagagattgacttatacaatcctgctaataataaattaatagcagccaatcttttccgggtacaaaatttttcaaggctacaatatggcaataatattataagagattataatttccggcacatctacgaaacttctgtggaaaacaggaaagaattaaaagacatcgcttataaacaggtaaaaagtctacctatatttgaaaaaataataaaagttcgaatcaatcatattggtcaaattgtgaaaaccggcgaatactaaactaatgattaaaagaactttatattttggtaatcccgcctatctcaaaactgccaatgaacagctggtagttgatttaaaagacgaagaatcaaagtctgcctcgatagaagacattggcattgtcattctcgatcatccacaaatatcgatcacgcaggctttgatatcgaaattactggcgaacaatgttgcattgattacttgtgatgctacacatcacccggtaggactatttctgaacctggatgggcataccctgcaaagtcaaaaattccaggcacaggtagaagtatccattcctttgaaaagtgtccctccgggaagttaaaaactgaatttaggtaagattattattttagcttcttaccaaaaatcaaagcgatggaacagcaacaagctaataaattaacaaagaagcaagagatgt

SEQ ID NO: 2412 - DNA, 14583 bp, synthetic construct
  source 1..14583: mol_type = other DNA
  misc_feature 1..14583: note = Synthetic
tcagagtatttaaggctggattactccggtactgaagccaaaatacttgagtaatcaggccggaattacttgagtactgcgcccaaattactcgagtactgtacccaaattactcgagtattgcgccatagtactatactgtccgaccgaaatgggttgccccctggatttatcgggtgagcccgaaaaacaacaaatatttgagatcaccttttggagttagaatataaaaaagtccaccgttaaggacgatggacgaacctgaatgttttcacaacggaataatccttattgtgatttgctaaaaattcattgcaaatataatattttttcatgatataagtcttatttcctcattatttttttatatttttgcgatataattagaaacttaaatcagaaaatcacagattatgaaaaagatattaggtctcgacttgggaacaaatagcataggatgggcagtagtaaatgaaaaagaaaatttagacgaaaagtcttccatcattaaactcggagtaagagtgaaccctcttaccgttgacgagcaacgtaattttgaggcgggaaaaccaattaccacaaatgcggacagaaccctgaaacgcagcatgagacgtaatctgcaaaggtataagctaagacgtgaaagcttattggagatattaaaatccaatcatttcataacagatgaaaccatactcgcggaggatggcaatagaatgacctttgagacctacagactcagggcaaaggctgccgttgaagagatttcattggaagaactgtcaagagtgctcctgatgataaacaaaaagcgcggatataagagcagccgtaaggtgaatgctgatgacgagggtaagattatagacggcatggacattgcccgaaaactttatgatgaagacctgactcccggacaatatgtcttaaacttgatgagaacaggaaaacggtatattcccgatttctatcgctcagacttaattgccgagttcaacaaaatatggaattttcagaaacagttctatccagaaatcctaacggatgaattaaaagaagaactgaaaaacaagaacaagaaacagacatgggcaatatgcgccaaatcattctcgctggtaggaataaaacgagagacaaaaggcagtgagctgaaaaaagagaactaccaatggcgtgtcgaaagtatctctaaacaaacagaccttgaaaggctcgctattatattacaagaaattaacggacagataagcagttcgagcggttatcttggagaaatcagcgacaggagcaaggaactttatttcaaacgtcagaccataggacaatatcttatggaaaaacttgacgccaatccgaactatagtcttaagaacaaagtcttttacagacaggactatttgaacgagtttgagaagatatgggaaacacaggccaaattccatgcggagcttacagacaaattaaagcgtgagatacgcgatgttgtaatattctatcaacgcccgttgaagtcacagaaaggactgataagtttctgtgagtttgagaacaaacagatagaagtaaccattgacggcaagaaaaaactgaagacaataggaatgcgggtgtgtccgaagtcctcaccattgttccaagagtttaaggtttggcaaatactgaacaacatacaagtatcgggaaaggttgtccctgtgcaggacacagacctgttcggaacaacatcccatatggaacaaggcaagcggtttctttatcaagacgagaaagagacgctgttctatgaattgaacatcaaagaaaagatgtcaaagaacgaggcccttaaactattgttcaagaattataaggagcttgatcttaactataaggaaatagaaggcaaccggacaatggcggctttgataaaagcctgtcagacaataatagacatgagcggacatggagaatatgatttctccaagatgcaggcaaaagatgtcatgcacatcatagagacaatattcaatggtcttgggttcaatacagacattctgcatttcgatgcttctgtcgagggcaaggcttttgacaagcaaccggcatatatgctttggcatctgctttactcttttgccggtgacaactctaaatcaggaaacgagaaacttatcaataagatttcagaactatacggcttcgataaagaatatgcttcgataattgcaggaataaacctgcagcaggattacggcagtctgagttcaaaagccatgcgcaagatactgccacacatgaaagaaggacttgaatacagcgtagcctgcggatatgcaggataccgccattcaagtgaatctctgacaaggaaagagcttgacaacaaggttctgaaagaccgtttggagcttctgccccgcaacagcctgcgcaatcctgtcgtggagaagattcttaatcagatgataaacgtggtgaattctgtagtcgaggaatatggcaaacctgatgaaatcagaatagaacttgcacgcgagctaaaaaagagtgcaagtgaacgcgaggaacttaccaaagcaataaacaagaccacaaaagaacacgagggatataaggaaatactacagagagaatttggtattgtcaatgtaagccgtaatgacattatcagatataaattgtatatggaactaaaggataatggattcaagactctatattccaacacttatattccacaggaaaaactgttcagcaaggagttcgacatagaacatatcattccgcaggcaaaactgtttgacgattctttctcgaacaagaccatagaagcccgtgcaatcaacatagagaaaagcaatgctactgcttacgatttcgtttgcagtaagtatgatgcagaggaaatcaaaagatacgaagtgagaatagaagagctgttccgcaagggtataataagcaagacgaaacgtgacaagctgatgatgaaggaggcggacattccagacggattcatagaacgtgacttgcgcgattcgcaatacattgcaaagaaggcacgcgagatactgtgtgatatagcaagggaggttgttacgactaccggttctgtcacttcacgtctgcgcgaagactggcagttggttgatgtgatgaaggaactgaactgggacaagtatgacaggcttggacttactgaaataatagaagacaaagatggaaggaagatacggcgtattacagactggacaaaacgcaacgaccaccgtcatcatgcaatggatgcactgaccatagcttttactaaacggagttatatacaatatctcaacaacatgaatgcaagaagcgacaagagcagcagcatttatgccatagaaaagaatgaactttaccgtgacaacggcaaactgaagttctgccctcctataccgcttgatgtgttcagggcagaggcgaaacaccatctcgacaatattcttgtgtctataaaggcaaagaataaggtggttacaagaaacttgaatgtcacaaagactagaaacggtaagaataaaaaaatgcaactgacaccacgcggacagttgcataacgagacaatatacggaaaaataaaacagtatgtcacaaaggaagagaaggtgaacgcctcatttacagaagataagattgcaacagttgcaaacccaaaataccgtatggcactgttcgagaggctaaaaagatataatggaaattcaaagaaggcgtttacaggaaacaatacgcttcagaaaaatccaatatatctggatgatatgcacactatgactgtgccggaaaaggtaacgaccgtgacttttgaagaggtatatacaataaggaaagagatttctcctgaccttaaaatagacaaagttatagatgttcacgttcgtgagatactgaaagcacgtcttgcggaatatagcaacgacccgaaaaaggcatttgtaaatcttaaagacaacccgatatggctgaataaagaaaagggaatagacattaagcgtgttacaatacgtggtgtaagcaatgccgtggcactacatgacaaacatgataataaaggacggcttgttcttgataacgatggagggaaacaacctgttgacttcgtaagtacaagcaataatcatcatgttgcaatctatcgtgacgcagacggcaatctacaggaaaacgttgtgtcattctatgaagcaacaatgcgtgcaaatatggagatgccaataatagacaaggattacaagaaagcagaaggatggcagttcttgtttacaatgaaacagaacgaatactttgtattcccaaatcaagaaacaggattcaatccgaatgaaattgatttacttaacacggataactatgcagagattagcaaaaatctgtttagggtgcagaagttagcaagtaaaaattatttctttagacaccatttagaaacaaatgttgatacgcctaaagaattatcaggaattacttataaatctcaacttggacttaaaggtatcgttggtattgttaaggtacgcgttaaccacattggtcaaatcgtagcagtcggtgaatactaaaatcaaattatcatgataaagaaaacactatatttcggcaaccctgcatatctgtcactacggcaaggacagatggtgataaggcttcctgatattgtcaggaacgagacacttcccgaacgtatgaaactgaagggagaaataacaaagccaatagaagacattggtatcgttgtccttgactgcaaacagataaccatcacacaagggctattagaggctttgttggagaacaacagtgccgttataacctgtgataaccgcagtatgcccgtcggactcatgcttccgctatgcggtaattccgtgcaaagcgagaggtttagagaccagatagacgcatccctacccttgaaaaagcaactatggcagcagaccataaaggcaaagataagaaatcagtcaacggttctaacacattggacaagtaaagagacaggttgcatgaggcgttgggaaaatgacgtaaagagcggagactccgataatcttgagggacgtgccgctgcatactactggagaaatctgttctctgactttgaggaactgaaagatttcacacgcgaccgtgacggaatatatcccaacaaccttctcaactatggatatgcagtcttgcgtgccgtagttgcccgtgcccttgtttccagcggaatgcttccaacattaggaatacaccatcacaacagatataacgcatattgtttggcagacgacataatggaaccataccgcccatacgtagacgaaattgttttcgctatagtgcaagaatttggcggtaaagaacaaaacatgacaagagaaataaaagctaaacttctatccatcccgacaacggaagttgtcataaacggaaaacgcagtccgcttatggttgcggcaagccagacaacagcgtcattatacagatgttttaatggcgaattgcgccgtatcgcatatcccgaaatgtaatcaagatttcatggaccgatttagtgaatatcgtattatgtgggtattggtgttttttgatttacctaccgaaacaaagaaagataaaaaagagtatgctttgtttcgcaaaaatctacaacgcgacggatttacgatgtttcagatgtctatatacgtgcgccattgtgcaagcatggaaaatgccgaggtacatatcaaacgcgtaaaatcattcctgccagaatatggtcatgtggcaataatgtgtattacagacaaacagttcggcaatataaacgtattctacggctcgaagcctctcgtcccaaatgctccaggacaacagcttgaacttttctaatcttttaacttttaagaacattctttattctcattattgcagagaacagtatcttccaaaacctattttatccatataaaacacctaaatacaataatagaatcttaccatctaataagattctattattacgacaaccatcttttttatttcctattatttctcttattagtctgtatatcaatgcgttatcaacaatgtgatgtttgtctctatgcaaatatacgaatttttaagcaaatcacaaccgaacaatgacagaggaagaaaaagacaaggatgtttgtctctatgcaaatatacgaatttttaagcaaatcacaacttccgcaaatggtgacgccgaactctaccagatgtttgtctctatgcaaatatacgaatttttaagcaaatcacaactacaatagtagcactcataataataatagagatgtttgtctctatgcaaatatacgaatttttaagcaaatcacaacctccacccatgcgtcgccggtggtattgtcgatgtttgtctctatgcaaatatacgaatttttaagcaaatcacaactgatgcaaaggtacggcctttttagtacagatgtttgtctctatgcaaatatacgaatttttaagcaaatcacaacataaaatcagaagaatatggaagcaaccaagatgtttgtctctatgcaaatatacgaatttttaagcaaatcacaaccgaactgctctactcataccgtcattgccggatgtttgtctctatgcaaatatacgaatttttaagcaaatcacaacaataatgatattatatacatatttttatagatgtttgtctctatgcaaatatacgaatttttaagcaaatcacaacttgcgatattcggaatgaaatttccgtcctgatgtttgtctctatgcaaatatacgaatttttaagcaaatcacaacacgatagaggcgttcttatcgacaggcagcgatgtttgtctctatgcaaatatacgaatttttaagcaaatcacaaccacaaacatacagctacggcgttcctgtagatgtttgtctctatgcaaatatacgaatttttaagcaaatcacaacatattcagccttattaatgccaaagcctttgatgtttgtctctatgcaaatatacgaatttttaagcaaatcacaactatagtggtatttcttttcttcgatacttagatgtttgtctctatgcaaatatacgaatttttaagcaaatcacaacgggtgcttatttaagccggtgaaaaccacagatgtttgtctctatgcaaatatacgaatttttaagcaaatcacaactgcataggatatatatatctgtgtgacgccagaatttttcactgcttcagaaaatagcgacttgggtactttgcgcgactttgccaagtcggacccaaaaaactcctttatgaatggctggagttgttcactcaccttcaccaatactgcctgttgcaacaacgacaagttcttgctcaatctcgtaaaggcaaacggcgtatttatccatttttgcggtaatttcttagtttcttccataatctctgctttcctttaaggtaaaaagttactaaagtgttttacctatttactatttcttttcacctatttactaactatttttctttacctcgcatcaaaaccgctaaaaatcagtgatttatattttgctcctataatataaatataaagaaacatatttcttcttttattcttattataaatagtatggtaaaaacatttagtatataggtaaaaagatttagtaagattttacctgctcaccatctttctggtgaagcaatttagtacctcatgtttttaggtaaaaaggtttagtaagattttacctgcttatctcagcattaggtaaaataatactaaactcttttacctcctacatcacaagtcctcacccaaaatcttttcactcttcatgaaattatccgaatcagtataggtcaggtaaatggaaataccgtaacctgaactgggcgctttcaatgtttgaagaatgaatccaatcatgttgtctccatcttcgtcaaaaatctccatagccagtccgtccacatcgccgtctggtcctttatattctttgcatgtagcgtcggggtatttctgctgcaactgattgtttaggttcacgaatggtgtgtgagcggactcaactgtaggataattcaattcaacagcagcactgaatacgattttgcttttataattatagaacactacaaacctggccttctcacccataaactttccgtgaaagattctggtgcctgcatcagccgatttcgactccgctgcatcgtatgtaacacccttagctttcagcttcaaggtaaagttatctatcgtgccatccaaaggtattcccatgaacttcatgtgctgctgtgcgctcgctgccatacacaggcagatagcgaacaatactgatattatctttttcataatagattaggtttgaattttacatcttgtttctatccaaaaactctatcacagcctgtagcgccaagtctttgatgggtacaccagtgcgcattttcatcagggcaatgcgctcgtaatactccatcggcacatatatggtgatgccgttctctgtcttcttacccttcggcttgcgcatgtttacggcaatatcattgctgaatgatgtggttgccggctgatttgctacatttgtagacatctcggtctctgttgttgtagaagcaatcggggtgtctatacccggagtgtctaaggatggcgcagggggtacactcgctgccgcttccttacgctccttgttctccctgttctccttgcgctgctgactacctgattccaatatgcgctcgttctcctcgatagcgtcagactcttgcagtttgaaacgttttggtttgttagttacttcgcgtgccatactctatattttttaagcgttaaaactgttgagatgtttgtctctatgcaaatatacgaatttttaagcaaatcacaacctggtactgtaggcggtattgttagtgatgatgtttgtctctatgcaaatatacgaattttatacacctccctatacctcacaaattaacaatcaccggctcgtgctgcaatgctggaattactttttccatcaaatctttagttttcattctaagacttgatgtgttgatacaagggtggcatcccacatattcgctttgcagtacatcactgtctatgagcaattgcacaatatggccgtggtcgttcataagtcccaacaccgatactgagccgggagtaacgtcaagaaatttcagcatatcctcctcaccggcaaacgatagtcttgaggaatttatctgtgccgacaaattctttgtgaggaacttcttatctcccggtatcatcaacaaatagaactttgttttctgtcggttacataaaaacaggttcttgcagattatggcatgcttggtgcggtcattgctgtcctccgccttaaattcctcaagggtcattctgccaaaagcggcattgacagcgtcgcagacttccattgtcatagccggtgcatggtcgaggcggtcataatccacaccgatactatccaacaggtcgtacacccttacctcacgctcttgtcgccccgttatgttgccggggcgtcctttatatattgtcaacttcattctcttatgtaaattctatccccaactattcaatctcgaaacgccttgttggcctgtacatattcccttttattcatatttataatatctttcgcatttccatgacctgcttcgggcatttcccgacgcactttccgcatttgatacaatcgccgtcaagcaatccttctgctacacctttagcctcgtatggcttgagctgcatcggacacaccttagcacaaagcttgcactggatacatttgtcggcgacatggatattcttaaacgtactcttatgcttgcgcggagcgaccattgccgacagtgttcccatcggacagaacgtacaccatgtgcgcggagcatagataatgctgaacacactgcccacgatagtggtaacaaagatgatgttccaaaacactctgcccatagcattccaatcgccccaggcgtaatacatctgtacaccgaacatggtaaaaatgagcaaaagcatgaaacctcggaacagacggcctctgaagaatgcgggaatcggcctgttccgactcaccttactaatcaagttgtcgtagtaactgccacgcggacagatgtgtccacaccaatatctgcccttaaacaccgacattgagacagggccaatcatacagataaaagctatcaaaccaaccacagggtagaaatagccaacaaccaaatatatcaataaaatccagtacagcatttttatttgttttattttataatgacattaataatttctgccattccttatcaaacccttttatattctccacaatctctttaattattagaaacctttttattttgcaagaaaatgcaaatatacactttttattcgagaaattaaaacaataaaaaggaaatcattcacccatcagaatattagccttaagatatcaaaacagtaaagaaaatttaccaaaaatcacctctctgagaagttgattctttcgcgtaaatgaatgttaaatatgggtcttttaagcccttttcgacactttttcacgtcaaaaatcaagcctcaaaagtcaaaaaatcatacttctaagctctaaaagagccacttttaggaaaaaaaggagtcattttccatcaaaatttgtcgttcccgaaaacgccgaaaacgacctttttggtgcgatttaacgtttgtttgcgttcaaaagtggcacttttagggtctcaaagtgccactttgacgatgttgagtggctattttggcgttttcaaagtcatattttagacgaaaaacaagataacttactgattatcaatattttaagtcaaaataacctaaaatgccgaatttcgctatattttcaagcaaagaaactgttgattgcaaatacgcgagttttagagggtatagttgtaaagatttttcagaatattcttagcaaaaaaacatcgtaattttaagatatcgaacccaatattggaacaaacttttttgtatattttttcactatcaccttcggtctttatcgttgtgaaaaagcaataaaaaagaggccatgcttagaacatagcctctctaattcgttatcaagacgtatgcgcgtctcaataatcctcgcatctgtatttatggcggagctataaattaccccttattagatttcccaaccgatagccgaagcaccaagaacagcagccgaagcaccgtcgagcgcactcaccaagaactgagccttgccacggaaaatcggcatcacgttcgcatcatagctgcgcttgataggatcaagaatgagatcgcctgcttttgccataccaccaaagaacacgtaagcttcaggagaagcaaacgctgtgaaatcagcgcacgcctcaccaagcatattacctgtaaactcatacacatcctttgccaactcgtcaccctttcctgcagcgatagacacatcaagagaggttatatcgtcaggattcatatcacggagtaacgatggacggtcggtagtagagagcatttcgcgtgctgtgcgagccacaccggtagccgagcagtaagcctcaagacatcccttgcggccacaaccgcacaggcgtccgttatcacgtcgcatgattacgtgtcccaactcaccggcaaagccatcacaaccgtaaaccatctggccatttatcacgatacccgaaccgactcctgtaccaagtgtcaacatgatgaagttcttcattccgcgagccacgccataggtcatctcgccaatggctgcggcatttgcatcgttggtaagtgctaccggaatgcctaacgcctcggaaaacagttctgccaacggcacgatgcaatcgtgtccccatgacaagttcggtgcatactcaatcgttcctttatagaaattggcgttaggcgcaccgatacccatagccttgatattctcaatgccacctacctgatcgataatcacctgaagagcatctacagatgcctttacgtaatcctctactttttcataaccttgtgttttgattgccgttgttactttaatctcgccacgctggtcaacaattccaaacacagaatttgtgccacccaaatccaaacctataacataaggtttctgctgttgtgtattcataaatatgttttattttttagttagaaataatcgttaagattcatatcttaattggcaaagttattaaaaatatgctattacgcaaagttttagatagtaaatttgcctatttcgcataatttttgcaattttgcaatcgattatgaatttaccttttccgtttcatatagatattcttgactgcattatcaagggcatactcattggcgtaatagcttcggctccgatgggtccggtcggaatattgtgtattcagcgcactttgaacaaagggcgctggtttggtttcatcacgggagtgggagccgcagcgagcgatattttctacgctctgcttaccggactcggcatgagtttcgtcatggacttcatcaataatgaacacaacaaatatttgttgcagatatccggctctatcatgctgtttattttcggcatctactgcttcaagtcgaacccgatgaagaacgcccacaaaagctcgaacaagaaaggtacgctcacccataatgcgataacggcattcttcgttacgctcagcaatccgcttatcatcttccttttcatggccacattcgcacagtttgcgtttgtcatacccgaccatccgctcgagatgtctgtcggttatctaagtattgtactcggcgcactgctgtggtggttcggattgacatggctcatcgacaaggtgcgcaacatcttcgaccctaacggaataaccataatcaacaaggttattggctctgtggtaatgattttctcgctcattgccctgttcggattggtgttcaatctgtatcaactgcccgaattctaagtgtttttcatttacgtatattatatattatgtatatagcaaaagaattaagaaagaaatctattgccgaatatctgctctatatgtggcagatagaggatatcatacgcgcctacggatgctcgctgacggcgattaagcgcgaatatatcgataaattcgactactccgacgaacagaaagaggaggaaacagactggtttggcgaccttgtgcgtatgatgaactcagagggtgtgagggagaaaggacaccttcagattaacaaaatactgatgcaagacctgcaagagtttcacggcgcgttgctgaactcaagcaaatttccattctataacgctgagtactaccgtgttttgccgttcattgtagagctacgcaacaagggagcaaataaggaagagaacgagatagagacttgtttcaatgccttgtatggcactatgatgctgcgattgcagaagaaggaaataactacggagacggcaaacgccattaaagagattactacgcttgtgggaatgttgtctgactattatctgaaagacaaaaatgagggtcttgagttcgactaaaaaaatgacaggcaacaaggaaacggagcttaaagaataaaaaacatacgactatgaacatattgataacaggatgtaacggacagttaggcaacgagatacagaaattggagaaagtaaatccgcaacatatattctttaatacagatgttgcggaactggatattaccaaccaactcgccatcgaccaatttatacaggagaacaagattgacggaataataaactgtgcggcttatacggcggtagacaaagccgaaagcaacaagcagttgtgtactgcattgaacgctgaagcaccggcatacttggccatgtcgatagagaaacgtgagcacagattatgtgttcgacggaacaaaacacacgccatacatggagaccgacacgccatgcccggacagcgtctacggaagtacgaaactcgcaggagagattgcagtgcagaaactttgcaagaaaacgatgattatacgcacagcctggctctactccacctttggcagcaacttcgtgaaaacgatgattaggctcggaaaagagaagtcggagctgggagttatcttcgaccagataggctctccgacatacgcccgtgaccttgccgtggccattatgacggccgtaaacaagggcatcgtgccgggaacatatcatttctcgaacgagggtgtcatcagttggtatgacttcaccaaagccatccatcgcattgcgggcatcaatggctgccacgtgaagccgctccacacggccgaataccccactccggccaaccgtccgcattacagtgtgctcgataagacaaaaattaaagatacatacggcattgaagtgccatactgggaagagtcgttacaagagtgtataacagaacttacaagataaaacaatgaacgaaatagaaagaaggcgcacctttgccatcatctcacaccctgacgcgggtaagacaacgctcacagagaagttcctgttgttcggcggacagattcaggtggcaggcg

SEQ ID NO: 2413 - DNA, 14576 bp, synthetic construct
  variation 5281..5327: note = n is a, c, g, or t
  source 1..14576: mol_type = other DNA
  misc_feature 1..14576: note = Synthetic
ccgccaaactgtcaacccagtttaggcgaacgataaaattagtgtaaaccaacttagttaatcgctctcaaatctgtcaagtattcttagggaaagacaacacaaaaaagcgatatttaacatttttccattttccagtgcccaaatatggcacctgcccccattacctttgcaggataatacatcttaatatagtgcaaaaaaagaacgagactagtcccgctcttgatgttttcacaacggaatcatccttattgtgaattgcttcaaattttgtactgcaaaaatacgacaaaaaagaaaaccggcaaaatataatgctaaaaaattctcatcatacggaaataatattaactttgttgttcataaaacaacaagaaaaaaacatattatcatgaaaagagtattaggtttagatttaggcaccagcagtgttggatgggccgtcgttgatcaagccgagagccaaagcgaacaatccaaaatcattaagatgggagtacgtgttgttcctatcgatagtaatgaaaaagatgatttcgaaaaaggtaaaagtataacaacgacctcgcagcgcaacctcaaacatggcatgcgcattaacctgcaacgctacaaacaacggcgtagccatcttattaacattctcaaacgtgagggctttatcacagacaaaacgttactatatgaaagtggcaactttagcacatttgagacctaccactaccgcgccaaagccgccacagaggaaataacgctcgaacaactgtcacgagttctgctcatgatcaataagaaacgcggctacaagagcaaccgcaaagcagataagcaagaagatggccaactcatcgacggcatagatattgctcgtaaactatacgatgagcacctaactcctgggcagtacgtttatgaatcattaaaacaaggcaatcgctacatacccaccttctatcaatcagatttaaagtcagaattcaatgccatttgggactatcaagcgcaattctatcctgacattttagatgatgaattaagggagaaggtcacttctcgcagcaaaaatgatacatccaacattttctatgcagtcaaaaatgtcgctatcgcagaaaataaagaccgcaaaacgcgcctactggtctcataccgctggcgcagcgaggctctaacccatcaattacctatcaacgaggttgctgccgcgctgtgcgacatcaatggaaacatttctaattcaagcggttatctaggaagaatcagtgaccacagcaaggagttatatttcaacaaactcactgtcggtcaatacctgatgcagcagttaagcaaggatcctcactaccgcttgaagaaccgtgtgttttaccgtcaagattacctaaacgaattcaacaccatctgggaaactcagtcactttaccaccccgaactaacagataaactaaaagaagaaatccgagataccattattttctttcagcgcaaactgaaatccaaaaagggacttatctcattttgcgaactcgaagggaagcaaatcacaatcacagtcaatggcaaagacaaaaaagtaatgactggtcctcgcgtttgtcccaaaagttctccattattccaagaattcaagatctggcaagaattgaacaatgtgcttattgagaataagcaggtcaaagcacgcagtaaatcccagtccactttgtttcctgaaactgaaaaatacgttccattgaccagcgagcaaaagcaactccttcacagagagttatcagtaaacgcagagttaagtaagtctgccatattgaaactgctcgggctcaacgagaagaattataccatcaactacaaatcattgcatggtaacacgacacaagtgcaactacttgccgcatccaagcaggtgctggaatggagcgggcaagacatcgataaatttgatcagttagactatgacaccaagatgcacttcatcacttcggtctttgaggcacttggagccaggagtgactatctcacgttcaatccttaccagttagacaactatttagatcaacccgcatacagattatggcatctgctctactcctacgagggagatagcagtaactctggtgacgtgaaactcaaagagcatctaaaagagttaacaggccttagcgacaactatgtcaccgctcttgcctcagtaagatttgagcaggactatggttcacttagtgccaaagccatcaggaatatcatgccgcacttactcgaaggaaaaacatatagcgatgcgtgcgaggccgcaggctatcagcattcagcccagtcactcaatcgcgaggaactagatacccgcccactggccgactctttggatatccttcccaaaaacagcctgcgtaatcctgttgttgagaaaattcttaaccagatgattcatgtggttaactctacgatgcaggaatatggcattgagcgggatggtgctaaacgattcgatgaaatacatgtggaaatggcacgaacactcaagcagaccaaagatcaacgcgagaaggcctctgatctgctaaataagcgaacaaaagaaaacgacagcatcataaagacactacaagagcaattcggaatcagccatcccagtcgtaatgacattatccgttacaggctctatctggaactgaaagacaatgggttcaaaacgctttactccaacacctacattcccaaggaggagttattcagcaagaaatttgagatagagcacattattccgcaagccaaactatttgacgattcccagtccaacaagacgcttgaaacgcatgaggtgaaccttgaaaaaggcagcaggacagcaatggactatgtactggacacctacggcgaggtgggagccgagcaatatcgccagcgcattgcctatctctatgacaacaagaacaagggcgggacgaataaaaagcacaaaaacctgctaactaccgaggccgaaattcctaccgacttcttaaaccgagacctcggggacacacaatatattgcccgcaaagcccgcgagatgcttatgcaagtcgctcgcaccgttgtcccaacgattggttcgatcacagcacgcctgcgagaagattggcaacttgttgatgtcatgaaagaactcaatctccccaaatatgaaaaacttggtctagtcgacacctataatagggatggccgccaggtgcgccgcattaaagactggtcaaaacgtaatgaccacaggcaccatgccatggatgccctcactgtcgcatttaccaagatcgagcacattcattatcttaataatgtgaatgcccataacgatgaagatcggctgcatccaaacgccatggcattgcgcagcaaactcattagagaccaccgcttcgtcccacccatgccacttaatcaactccgatcaagtgccctcgagcatatgagaggaatacttgtttccatcaaggctaaaaataaagtggccactcgcaatatcaatcgcataaaaggcaacgacatgcgccaagtgacattaacgcctcgcactcaattacataacgagaccatctacggcatgcgtaagcgctacgtagccacaattgagaaagtagggagcaaatttgacgcccaacgcatctcacttgttgcccgtcaagactatcgtgacgcactcatgcgcaggcttgatgaatatggcggcaatgcacagaaagcatttacgggcaagaattccattgccaaaaagcctctatatctcatcgggtccagtacccagcaagtcccagagagtgtcaaattagtatggctagagaccatattcagcatacgcaagcccatcgacgcttctatcaacatatccaaggtgctagatagtaaagcccgcaccatattacaacagaggcttgaagaatatggcaatgatgcaaaaaaggctttcagtaatctcgatgacgcccccatctggctaaatcgagaaaaagggatatccatgaagcgagtgaccatccaagcacgagtatctgaccccatccccctacacgacaagttgggccgagatggtcacatcttgcatgataacgatggctgtaccatgccgaatgactatgtaagcacgagtaacaaccaccatatagccatatatgaggacgccaatggaaattggcatgagcagatagtctcatattacgaagcgatagcacgtcttaacggccagatgcctgttgtggacaagcactataatgagagtgagggctggagattcaagttcaccatgaaacaaaatgaatactttgttctgcctgattatgaacatggcttcttgcccaacgagattgacctaatggatgagagtaactatgctctaatcgcgccacatctattccgagtgcagaaactatcttctaaagattatttctttaggcagcaatttgagaccagtgtcacagcaggcaacactctaccccaaggtgttgcattcattagaattagcaatgaaaacaaattgaagggctttgttaaagtgagaatcaatcacattggcaaaattgttcaagtgggggaatattgaaatgcagaagcccacattagacgcgtcaaaaccatgcttccgccatcgggtaacgtgggaatcttatgcgttaccgataagcaatttggaagcatggaacttttttatgggaattccgttaaagaaaaagaactaacaggcgttcaattagagatattctagaaaaaagcctccaagattggaggcttttttctagaatacatcattttatttttctaatatccaattaaaatccactgaatcataatgggttacaaacaaaaatactatattctactgcaaaattacaaaatttgaaagcgattcacaacatgttattggccccaataaaatggtcatcaactgcaaaattacaaaatttgaaagcgattcacaacacttttccccacgcttatctttgccgccatactgcaaaattacaaaatttgaaagcgattcacaaccggtgaaccaagtggccttggtggagaagcactgcaaaattacaaaatttgaaagcgattcacaaccccatcgctgatatacttccctgttggggtactgcaaaattacaaaatttgaaagcgattcacaacacggccttggcgtgtatttcgtggactatgactgcaaaattacaaaatttgaaagcgattcacaaccgaaaacatgacaaagattcaaaaagaactactgcaaaattacaaaatttgaaagcgattcacnnnnnnnnnnnnnnnnnnnnnnnnnnnnnnnnnnnnnnnnnnnnnnncaaaattacaaaatttgaaagcgattcacaacgcactgctgcacgggagtccacattggtctactgcaaaattacaaaatttgaaagcgattcacaacctgcggcaacatcatcgacgagttcagtgtactgcaaaattacaaaatttgaaagcgattcacaacggatcatggggcatgcccagagcattgcacactgcaaaattacaaaatttgaaagcgattcacaacctcctttctttggtaattgtggtccaaaacactgcaaaattacaaaatttgaaagcgattcacaacgaactccttggtggtggtaaaattccgctgactgcaaaattacaaaatttgaaagcgattcatgactcggtgtgacacaatgtgtctgatcgaacttgattctatggtgggaccttaaggaccttaggggcgttagggttttgggggagtggggttgcgggatttctttctgagggcggccattctttcggaaaagccgccgttctctaggaaatctttctccagacgctcgagttgtctgaagagcaggtaatcggcctggtgaatgagtatgatgaccatgttggctatcgtttcgggtggacgtgtttcgcacaggttcaggaagaatgcggcgtcgttgtgggttcgcccgagttggcgcatcgcgttccattggatagattcttcctgccactgctggtgccccctggtgcgcaaatagtcctgataatcttccagcaattcttgaaggctggctttggcgacattgacgagtttgatctcggtctttgacgaagtggccgaagcggcacaaccctcaatgatgttctgcttgcctgagcgtgcggcttgcaccatctggtcgatggtgcggtcgccgcgctgcaggtagtgctgacagaagtagtatgtcatctcgtagatgacgtctgccttctgatatgagagtaacttgcggtagttgccgctgtgacggatgagtttgtcgtcatcgctcatggttggatcgggtttaagcggttgaacattgctattgtggttgactagggactttaaggactttagggtccttaaggtctttaaggtctttaaggtctttaaggtccttaaggtctttaaggtccttagggtccttagggtccttaaggtccttagggactggggggttagaagcctttccaggtttggagccagaagtcgtgggccatctgctgccatctgtaggcggcggcgccgagggcgtcggcggtgtagtcgttgagcagttgggctgctgcggccttgtcggtggcgttgagttcctgccaagtcttttcaatcatggggagttcgcggagtcctttgtccaggaagtggtctcgcgcgggctcgagtgtcttgcggaagactccccatcgcaggctggcgagacggttggctttacggaactgccacagggcggtgttgtcgtcctcactgccgtgtccgcagaccttgatggatgcggggaggtcggtattgccgcagaagatggggaacctggggctctcgccggggttgtccagtgccatccatgccacgcctccgacctcgtcgggcagccatgatcgcaattggatgacggtgctgtaggagcaccagggcacactgacggtgcgtgtccacttcatggccgagtcacccatggcatagaacatggccatctgctcgttggtgatccagggattggccactggggagacgatgctgtcgggctggttcgggtctatgttgccctgcttgtctttgcgtttggggttgggaatcttgtggcgggcactcaggtcgagcgggctgccctcgtagtaactgcccagcagtcgcgacacgtcctgaacgctgacttgcttgtcgggcttgatgctcagaggcaggttctggatggtgtcggtcagtcccagtgacggtgccagttgctgcatgatgtagagttcgcgggtgctgtagttcttgacctgcttgaggtagttggtgccgctgtaggctttccagaagcagaacggctccttgccgtcccacaacttgagtcgcttggcgacctcatagacattgtcggaggccatgtaatggtcggtatcgctgaggtcgagggcgccgatgcgcgagatgttggccgagacagtgatctcatcgtcggggatgcgcacggcagcccagacgccgcccacacgcttgggaccctcgccaaagatttcgaagatccaggcctcgtgcttgtcggcaatggtgaggcactcgccgctgtcgccatagccatatttcttgaccaactgacccatgaggcgtatcgcttcgcgagccgtggtgcaacgctcgagtgcgatgcgtgccaactcttcgatcatgaacacgccagccttgttctgcaaggtatcgcgtcccgaaatggtggtctcgcccatggccaactgcttctcgttaaggcagggataggcggtgtcgaggaagcggtaggtgtggcgcacttggggtatggcgttggcatagaccatgccgttgagatccttgggtgagagggtgtggtagcggttgcggtagatggcggtgaccgtgtcgcggtcatagtcctgtgcggggaccatggtcatccatgtgcggtagcgcgcgtcgcaggtgtgtgaggtgatgaccgagccatcggtgctggccagacggcccactaagatgctggtgcaagactctgtcatgcggtccatgtcctgaccgctggcggcgatggccaatgccatcatcagaaaggcagaaaagatggattttttcattataatagttgttagttcttagttgttagttgttagttcttagttgttagttgttagttcttagttgttagttcttagttgttagttcttgagggtgatttcgacgatggtatcgactgccttggggaccgatggcagggtaatggtggtgcccgttgccgaggccgtgtagcgcaagttgcccttgccgtcgaacaggcgcacctggcggatgcgcttggcatcgagcggaacgaacagggcatcgtcgttgaggttgaggatgtgcagatacagggtgttgccgcgctgggtggtcacgccccaatcatgcggcgggatgatgccgccacgggtgccgtagatgctctcgccatgctggcgcatccactcgcccagggcatgcagacgctcgacggcctcggtgggcagacagccatcgggacgtggccccacgttgatgagcaggttgccattgcgcccagcggccttgaccagtgtgcggatgatgtcgtcggcgctcttgtagttcttgtcggtgatgcggtagccccaggtgcggttcatggtcatgcaggtctccagcggcaactggctgatgccgttctcgcccgagtagccggcggtgttctcgccaggcacgtcctgctcaaatatctgtatatcctcgccggggaagggcacctcgtggtggttgttgccgatgagacaggcgggttgcaagcggtggatgagggcatactgctcgtcgagttgccagtcaaagggcacagggtcggtatcgtgctcccacttgccatcaaaccagatggcgcccacggggccatagttggtgagcaactcggtcaactggtcgttcatgaacttgtagtactgcggccagtcggtcgtcgaggggtcgtgaggcaactgctcctggtggcggcccagggggtaatcgaggcggtgccagtcgaggtgggaatagtagaagtgcaacttgatgccgtggcgctggcaggcgtcggccagttccttgagcacatcgcgcccatagggggtggcatcgacgatgttgtagtcgctggcattgctcttgaacatcgagaagccgtcgtggtggcgcgaggtgatggtgatgtaacgtgcgccggcatccttgatggtgcgcacccactcgtcggcgtcgaagcgcgaaggataaaagcctgccggcaactgggcatactcgtcacggtcgatgcgcttgttgagcatcacccactcgccgtcggcgagcatggaatagacgccccagtggataaagacgccgagtttgttgtcctggaactgctggcgagcctggaggttttcctggctggggacataagcggcctgctgtgcataggcgcccaggcacgccgacaacagcaagagaagggatgaaatgatcttcatgactgtataaacgggactatctagatgattttgattttttggaggggttgaacagacggcggatgcggatgatgagccacgtgagcagcaacagggcggcaaccagggtgccgatggcgatgccgagataccacggagccttgtcgagcaggtcgctgaagatgggcgagatgtattccctcatgagcggcgcgatgaggcggcgttgccctgccaagcggtcattctcgaccatcagcgtatcgctcgcgatcagcatggatgcgcgctgagtggtgtcgtaggcgggccagtagtgtcccggtgtgctgggattgcccgtcgtggcaaagttcacccacatctgttgcacctggttggccaactgcgggtcgggcgcttccccatgcttgatctgccgtcccgtgttgagcacatagcacacctcggcgccatggcaagcgccatacttggtatcgttaccacccaatggtaccagccacgtgtacagataggtccgacctcctgatgcggcatgacgctgggccatctcgatggcgggcacacggaacatcagttcgttgaggaactcaaccgatggcgaactgtaagaggtattctccacatcaccatcgctcaggaagcggttggcactgctgcgctgggcactgtcgagcgacagggtgatataacgggcccacagccatgtagccacgtcaaacttgtcctcgccgcccatggcatcgatccagaagcgtgcctcgtcggcattcgagccgatgagcatatcgatgcccgcattgaagccgtcgaagcggctgtagggatcctcgggaatcaagtcgccgtcacgctcggggaagcggtagaactcacccaccttgtcgttgagggcgatgatgtcgtcttgggagagggcttgcaggtcggctaccgttttggcgcccgtggcatcaagcacacgctgggtcaagcgctggcagtcctcacggctgctggtaaaggctacgctgccactctgcatgatggcgcggcgaaacagaccttgtgcctcgtcgatgctcgccagcagcgacacacttcccgcccctgccgagtggcccacgatggtcacattgtcggggtcgccgccaaaagccgcgatattcctcttgacccagcgcaaggcctcgacctgatccagcagacccaggttgccgctgcgggcataggccttgccatcgggcaacgacgagagatcgagaaagcccagcaaccccagacggtagttgatcgagaccataacgacctcggggtgcgctttcaccaatttatcgccccagtcatggggattggccgtgccgttgctcacataagagccgccgtgaatccacaccatcacagggcggcgcgctgtgcgcatgccactggccgcggtccacacgttcaaggtcaggcagtcctcgccctgaggatagagagaggctccgttgccctggctgcgcgactggatggccgtgtggccgaaatatttagcctcgcgcacgaggcggctgtcgggttcaggcctggcctcctgccagcggcggtcgccagtgggttgcaaagcgtaaggtatccccttgaatgcaagcaacgcgccatcgcgctggcccacaaagatgccattggccgcttccacggccagagaatcgggatagttgccctcgatgaccttgttctcgccatagagcgccgccatctcccgctccagcgccgagggcgcttgcggctgttcctgctgcttggatccacaggctaccagcagcaggcaggctatcatacagaatgcaatgcgtttcatacaagatatgattttagatgcgtgcaaagatagtgaaacctatgcataaatcaaaaaaaacgccctatcacaccatcggagcgccagaaaatgtgtacctttgcagaaaatcaaataactgaacgcaattatgggactgttcaagaaattattctcccgcgagaagaaagagacactcgataaggggctggaaaagaccaaacagggtgtgtttgagaaaatcaagcatgccgtagccggcaaatcgacggttgacgacgacgtgctcgacaatctggaagaagtgtttgtaaccagcgacgtgggtgttgacaccacggtcaagatcatcgaccgcctgcaggagcgcgtggcgcgcgacaaatatgtgggcaccgacgagttaaacgagttgctgtgtgacgaaatctcacagatgcttgccgacaacaacaatgccgaactcgaggacttcaccgtgcccgagcagagcaagccctacgttattatggtcgtaggcgtcaacggcgtgggcaagaccaccaccatcggcaaactcgcttaccagttcaagcaggccggcaacaaggtcgtgctgggagcagccgacacctatcgcgccgctgccgatgagcaactcgagatctggggcaaccgcgtgggagtccccgtcatcaagcacaagatgggcacagaccccgccgccgtggcctatgacgccgtgcagagcgccgtggcacaaaacgccgacgtggtcatcatcgacacggcaggccgcctgcacaacaacgtgagcctgatgaaccagttgaccaaaatcaagaataccatgcgcaagatcctgcccgaggcgccccaagaggtgctgctcgtgctggatggctccaccggccagaacgcctttgagcaggccaagcaattctcggcagcgaccgaagtcaatgccctggccatcaccaaactcgacggcacggccaagggcggcgtggtcatcggcgtgagcgaccagttccagattcccgtcaagtacatcggcctgggcgagcagatgaccgacctgcagatcttcaacaaacgcgagtttgtcaagtcgctgttcggcgtaaacaaggagtaatcagatgccctggattctcttgagaccatccagaaatcatcaagcatgaggaaaaacaagatagacatcatctctctgggctgttccaaaaacctggtggacagcgagcacctgatgcgtcaactgcaggccgcaggctatagcgtgagccacaacagcagccacatcgacgccgaaacggtggtcgtgaacacctgcggttttatcgccgacgcccagcaagagtccatcgacaccatcctgcgcctgggcgaagccaagcggctaggcaagatacgcaacctgatcgtcatgggttgcctggccgagagattccgtgccgaactcgttgaagcgctacccgaagtcgaccgcttctacggcaagtttgactggaagggcttgctggccgacctgggccacgcctatcgcgacgacctggcacacgagcgttgcctgactacccccagtcactactgctacatgaagatttcggagggctgcaaccggttctgcgccttctgcgccattcccctcatcaccggccgccacacctcggtccccatgcagcagttgctcgacgaggtgaagcgcctggccgagcaaggcgtcaaggagtttaacgtcatcgcacaggacttgtcgtcctatggcttggacctggaagggcgcatgatgttgcccgaactcatcgaccgcatggccgacattgagggcgtggaatggatacgcctgcactatgcctaccccacccaattcccctacgatatcctgcccgtgatggctagccgagacaatgtgtgctcctatctggacatcgccctgcagcacatcagcgacaaggtgctgaccaacatgcggcgccacatcagccgccaggagaccctagacctgctggccaggttgcgccgcgaggttcccggcatccacatccgcacaacgctgatggtcggtttccccggcgagggcgaaaaggagtttgccgaactgatcgacttcacgcgtcaggccagatttgaacgcatgggcgcgtttgcctacagcgaggaggccggcacatgggccgccaacaacctgagcgacgacatcccacagcaagtcaagcaggacaggctgcaacaactgatggccctgcaggaagaaatctcgatggacatccagcagcagaaggtcgggcagcgattccgcgtcatcgttgaccgcgaagacgaggactactacgtgggccgcacacagtgggacagccccgaagtcgatcccgaagtgctcatccagaaagacgagcctctcaccattggggattttgcccaggtgcatatcgaccaagccctgccgtttgaacttatcggccacgcggtccgataatcgttttacgaatcacagatatcgccttcctaggcactcacacgcccgccgaccatcatcggtgggcggtgcaaacgtttgcataacaaattcactgaatacgcattcagaatattgtacatcaacatattttcatgctatttttgggcaactttcctatactgaggacgattcaagaagaaccaactttattataaaaccattcattttttaaactttatttaagcatgaaaaaattaactcttatcttatcgatgatgcttgccctggtgagcatgagcgctaatgcggccatctatatcgtgggcgacgcgcctctcggcaagggctgggaccccagccaaggcattgagatgaacgataatgccgatggcacctatacctatgtgacaaccatcactggagcagcgtatttctgctttgccgatggcctcgacagcaattgggacgtctttaacagcacttaccgctttagccccagcacaggcagcgatcagaccgtgaatgtcggtgagtggaccacaacccaacgccagagcagtggcgcatacaagtttatcggcactggatcggaatacacagtgacatttgatctcaacgagatgaagttcaagatcgatggctacgtggcaccgattaccgaggatgtttactctgtggccggcagtgacctggggctctttggcaccacatgggatccctacaacaccgacaatgacatgacctttgacgatgacctcaacctctacacctggtccaaggagcacgttctgctctcagcgggagatttccagttcaaggttgtcgccaaccacagttgggacatcgcctacc

SEQ ID NO: 2414 - DNA, 14323 bp, synthetic construct
  misc_feature 1..14323: note = Synthetic
  source 1..14323: mol_type = other DNA
ccttgctacacacaaattcacccaacttgtattcccgtatcgggcgatcatcaatctaagcttacgctgatgtccgaatcgttacgtaacgatggtagagtatgggtacctaaaacggtagaaactgccgaaaaaatccgcaaaggcgaaattaaagctaaagatattgccgaagccgatagagattattttttagaacgcaaatatccatcgtttggtaacttagttcctagagatgtagcttcacgtaatgcaaaaatttgttgcgacgaaggccgtggtgtaggtaaatcgggcttggctgtttaccttgattttgctgattctatcaaacgcttaggccagccagccgtggctgcaaaatatggcaacttgtttgatatgtatgcgcaaattacagatgaaaatccgtacgaatcgcccatgcgcatttacccagccgtacattataccatgggtggcttatgggtcgattataatttaatgactactgtaccaggtttatatgctttgggcgaggccaacttctcggaccatggtgccaaccgtttgggtgcatcagcattaatgcaaggcctggccgatggttattttgtgataccttataccgtgggcgattatttagccaccattggccctgcgcctgtggatgcaaatcatcccgcttttgcggaaaccaaaaaagatgttcaaaaccaaatcaacaaatttttatccctaaaaggaacaaaaacggtggacgaatatcaccgcgatttaggcaaactaatttgggaatattgtggcatgtctcgcaacgctgttgatttggtaaaagcgaaaaaattggtgcaggagcttaaagccgatttctggaaaaacgccattgtagtaggcgccaacgaagaagtgaaccaatgtttagaaaaagctggccgtgtggccgattttatagagctaggcgagctaatgattgatgatgcgctagaccgtaacgaatcatgtggtggtcacttccgtgaagaataccaaacccccgaaggcgaggccttgcgtaacgatgatgattttgcctacgttgccgcttgggagtttaaaggcgaaaacacagccgaagagcttcataaagagcaattgattttcgagaatgttaaactaagccaaagaagttataaataaatacggttacaggtatataatacgatataaaatgagtggaaatatgaacttgacgttaaaagtatggcgtcagaaaaacagcaaagcagcgggtaaatttgttacctacaaaacagatgaggtatcgcccgatatgtcgtttttagaaatgctagatgtggtaaacgaaggcttggtaaaaaaacaagaagaacccatacagtttgatcacgattgccgcgaaggtatttgtggctcttgcgctttaatgataaacggccaaccacacggccctaaaaaagctaccactacctgccagctgcacatgcgtagctttaacacaggcgataccattgttattgagccttggcgttcggtagcttttccggtagttaaagatttagccgttgataggtcatccttggatagaatacaacacgctggcggttacgtaagcgtaggtacaggtggtgtgcccgatgccaacgaaatagccatacccaaagttattgccgacgaggcttttaactcggcaacttgcatacaatgtggtgcttgcgtagcggcgtgtaaaaacgcatcggccatgttatttgtatcggcaaaggtatcgcaatatgccttattgccccaaggccaaaccgagcgttacgaaagagctattgccatggtaaaccaaatggacacagaaggttttggaggttgtaccaatacttaccaatgcgaagccgaatgccccaaagaaattaaggtaaccaacattgcccgcatgaaccgcgaatattttaatgccgagtttttaaaagataccaaagcacaggtttagggttgataattaatttttagagaaagccattttgcgaaagtaaagtggctttttttgtggtagctaagcaagaagtttttttcaaaaaaatgcccccgttaaagtcgagggctacttaatgttttcacagcggaataatccttattgtgatttgcttcggtgtaaatgtatgtaaaaatttaattatatccacaaatatttgtatatttgcaaatattaaaatattggataggggtgtccccaatcggaatgaagccaggtaaaactggctttgttttttaagggaaaattttaagcccgtaccgcttacctgaagcggtgtaaaatttagctttaaaaatagcataagctgggtttatcctttctggttctaaaacatgtcttgcaattggataagcaaccaaatctgccaattgtaaaccattaatgttttcttttttgcttttaaaatggatggataagtggtatttactcattctttcggcactaatataacctgtacctctagctaatagtcgttgaaaatgttcggttaattttttatcttcttttaatcctcttttttcgatgttaatggttaaggataaattatcttgttttaagctatctaaataaaaaattgccctttcaataataaatgacaaactaatttcgtaaacatcatcagaaagtttaccgtataatttaatatatttttcttttttaatagcagatgctataatattatagttggctgtttcaataatattgtctaattgatggtaaaattgattttttaagtttaaatcaaataaatacttaaactctttctcacattttctaatatctcttgagtgaaaaattacattttcgttattccaaatgtctttttttatattattgaacccaattcttactttttcatactcttcctcagaaataacaataccacacaaaacaaaaacaggaaaattaggattaagattactcaatccgtggtcgccgctttcgtcaataaataaattatacctcattggtttttatgaaattttaaagtgctagactataaaaaagaagcaaatcacaaactactaatctcaagaatgcaatttttgtataatttaataagtaaatttttagcctagcacttaaaaagcaagtattgtattttcggcaaaactattataaaaattactttagtatgcctaatacaatagaaaaattattctcttacaaatatatattaaaaaaatagattagtaggaattttttaaaattaattattacatttaaaaaaaaaaatttaatgataaaaattctcggtttagacctcggcacaacatcaattggttgggctttagttaatgaagcacaaaatgataatgaagtttcatccatacaaaaattgggggttagagtaaacccattaaccaccgacgaacaaactgattttgaaaaaggtaaacctgtttctgtaaacgccgaccgtactttaaagcgtggagcaaggcgtaatttgcagcgctataagcaaagacgagagaatttaattgatgccttaaaaaaagctggtttaattaatgatgaaacaattttagcagaaatagataaatttactacacacagcacctatttattaagagcgcaagctgcccaagaacaaataactaacgatgcttttgccagagttttattaatgattaataaaaaaagaggttacaaaagcagtagaaaagctaaaaatgaagatgaaggacaagctgttgatggtatggctattgctaagaaattatatgatgaaaatataacgccagggcaattaagttttaacttattaactgatggaaaaaagtatttaccagatttttatcggtcggatttagttgctgaatttgataaaatatgggagtttcaagctcagttttaccccgaaattttaaataatgtgtttaaaaaagaattaaatgataaaggccaacgggcaacttcggctttattttggataaaatacaattttaatattgccgaaattaaagcaaaaaccagagaagaaaaaaaactaaaagcttatgaatggcgtagtaatgcattaacccaacaactcgaaaaagaggaagttgcgtacgtaattaccgaaattaacaacgatttgaataagtctagcggttacttaggtgcaataagcgaccgtagcaaagaactttattttaacaaacaaaccattggccagtatttgtacaaacaattagcagatagcccgcatacacgattaaaaaatcaagtgttttatcgtcaagattatttagacgaatttgaaaccatttgggaaacacaggcaaagtttaatagcctgcttaccccacaactaaaaattgaaattagagacatcgtaattttttatcaacggaagctaaaatctcaaaaaggtttaattagcgtttgcgagtttgaatgcagagaagttgaaaatgaaaacacaaaaaaaacagtaggcttaaaggtttcgcctaaatcttcgccactttttcaagaagttaaaatttggcaaacgctacataacttagagtttagagataaaaaaactaaagaaaaatttaagcccgatttagaagcaaaacaacttttatttaacgaactaaatattaaaggaaatttatcggctagtaaggtgataaaaacagtaggttataatagcaacgattttgaattaaattataaaattgtagaaggcaacagaactaaccaggctttatacgaagcttatttacaaataatagaactggaaggatacgatgaaaatttatttaaacccaacggtaaagacgatgtaaagctagccgaaatagctgcatctgcactagaaatcaaggctgtggtaaaacaaattttcgaaagcctaaaaattgatacttccatattagattttgatgccgagttagagggtaaagtttttgaaaagcaactatcataccagctatggcatttattacactcgtacgagggcgatgatagcaaaagcggaaacgacaaattgtacgaactattaaagaataaatttggttttcaaaaatcacacgcacaaatattagcaaacgttgcatttaattctgattatggcagtttaagtgcaaaagcaatgcgtaaaatttatccttatcttaaagaaagtaattatagcgacgcttgtaaaatggcaggctacaaccattcttcatcaataactaaagaagaaaacgaaaatagagttttgaaaaacaaactagacttattgcctaaaaatagtttacgtaaccccgtggtagaaaaaatattaaaccaaatggtaaatgtagttaacgccataattgccgacctaactttaggtaaacccgatgaaatacgtattgaacttgcccgtgaactaaaaaagaatgccaaagaaagagccgaactaacgttaagtgttaacaaagcaaaaacagaccacgataaatttagagaaatattaaccaaagaatttggcattaaaaacccaacccgcaatgatattattaggtataaattatacgaagagttaaaagtaacaggctataaagatatttataccaacagctatatttctagagagaaattatattctaaagaatttgatattgaacatattataccccaagcaaagctttttgacgatagtttttctaacaaaaccatagtaccacgccaagtaaatttagataagggaaaccaaaccgcttacgattatattcttaaaaaatttggacaagaaaaacttgagcaatacttacaaagagtagaaactatatataaggctaaggaaggtgcaattggcaaagcaaaatatcaaaaattactaaaacagggtaaagatattggcgatggttttatagaacgtgatttacgagaaacgcaatacattgctaaaaaagcaaagcaaatgctagaagaactttgcctaactgtaaccagcacaacaggtagtataaccaataaactacgtgaagattgggatttagtaaacgtaatgcaagaattaaactttgataaatttaaaacaataggcctaaccgaatttgttgagaaaaaagatggctcgtttaaagaacgtattaaggattggactaaacgtaacgaccaccgccaccacgcaatggatgccctaactgttgcttttaccaagcgtaactatatacaataccttaaccatttaaacgcccgtaaaaacgaagaccacaaaatgcacctacacattacaggtatagaaaacaacgaaaccgaattaattattgaagacaatggtaacaaaaaaagaaggtttaaaaagccactgccaaactttagagccgaggctaaaaagcatttagaaaacatacttatctcgtttaaagctaaaaataaagttgccaccaaaaacaaaaacaaatttaaaacaggagcaggcgaacaaacaaaaatagaattaactccacgtgggcaattacacaaagaaactatttatggtaaactaaagcaatacgcttgcaaagaagaaaaagtaggcgcaaaatttgatgaagaaacaattttaaaagtagcatcagaaaaataccgtaatgccttattaacaagattattagaaaacaacaacgatacaaaaaaagcttttacaggtaaaaacagcttagataaaaacccgatatatttaaacccagccaaaacacttactgtaccactaaaagtaaaattagtatggttagaagacgattataccatacggaaagatataacacccgatttaaaaatagaaaaagtaatagacgcaggtgtacgcaaaatacttaataaacgattaacggattttaaaggaaacgctaaagaagcatttgcaaatttagataaaaaccctatttggttaaacgaggataaaaaaattcctattaaacgggttaccataagcggtataaaaaatgccgaagctttacacgtaaaaaaagatcatttcggaaatcaaattttagataaaaatggtaacaaagctcccgttgattttgtgagtacgggaaacaaccatcacgtagcaatataccgagatagcaaaggtagcttacaagaaaacgtagtttctttttacgaggcagtagctagggtaaaccaaggtttgccagttatagataaaatctacaaccaaaacgagggttggatatttttatttacaatgaaacaaaacgaatattttttgttcccctccggagggttttcgccaatagatattgatttgctagaccctaacaacaataaaataattagtaaaaatttatttagagtgcaaaaaattgccactaaagattactggtttcgccatcatttagaaacaaatgttgaaaacgataattcaactaaaaatataatttggaaaagagaagggttaagcggtgtaaacagtatagtaaaagtacgtatcaatcacattggtcagattgtaaaaattggcgaatattaaatgttatcaaaccggcataaaccatgaaccgctcctcattcatccgtaacctcataggcacatttggcctatctgtagtgccactgcacttgataaagcagtaccaaaaaatttatttactgcaatgctttgtacgtggttttaggttttatgatggcgaaactatgttaaatgcaatgaaggagggcgatatgctagaattagtgcgagaacccgataatacttacgataattgtgccatagctttatactataaccgccaaaaaattggctttgtacctgccgaaagtaacgaagttttaagtcgtttaatggatgctaaggtggtggaactgcaagccgaaataacccacctagaaaaaaaagcgcaagcttgggaaaacgtacacatagctgtttatgttttaaaagataacgtagatactatacatccaaatcaaccttatttaacccaactagaaacccctcactaccatagcttaaaatacaataacaatacttacggccgtgtgtattacgatgatgaggatgacgaaaatgtgtacagcccttacacagccgatgatttttaccaagatatggtagataacagtgcaaacgatggcgtatatgatttgctacataatgaaattgatgttgaaaccttatcggatgctgttgataacaacctttttataacgcaattaaacaaattacccaataaatttaaaagtggtaatttattgcaaacccttgatggtgccgttattaatttagacaatttttttaacgatgagggtttagtgatgcttaacgttgaaaaattagcaaaaatacccagttcaataaaaagttttgtacatactattgataaaacaggaaataaatttgtagaggtggtatttaatgccattgcataaataattaggtaagcataaaattagtttaacaaacaattaggtatgataaaacgaacgctacattttagcaaccctgcctatttaagtttaaaagatagacagctacaaatagatttacccaatttaaaaacattgggcgaaaaagaatctaaaaaacaagtacccatagaggatataggtattatacttttagaccaccaacaaataaccattacccacggttgtatagccgcattgttagaaaaaaatgcagctattataacctgtaaccatagccatttccacaggtatgcttttgccttttgatgggcataacacacaatccgaaacgtttaggtaccaaatagaagctacccaacctttaaaaaagcaattatggcagcaaaccatacaagcaaaaatattaaaccaagcagccgtattggcacaacgtggcatagcacacgataatatgttgcattgggtaaagcaggtaaaatcgggcgacccagaaaattacgaaggccgggcagctgcttattattggaaaaacgttttccctaaaaaaatagaattttttagaggccgagagggcgacccgccaaataatttactaaactacggctatgctattttacgagctattgttgcccgtggcctagtttgtagtggtttattacctactttgggcatacaccaccgcaataaatacaatgcgtattgccttgccgatgacataatggaaccctaccgcccttatgttgatgaaattgtattgggtattatagaccgtggcgaaaattttttagaactaggtaccgctattaaaacgcaactattaggtattgcaaccgttgatgtaaagtttgataaaaccaccagcccactaatggtaggtttacaaagtacaacagcatcgttagcaaaatgctaccaaggtaaaagccgtaaaataagctaccctttaattacacttataaataatgaaaaatagcaaataaacactcctgttaaggcgtagttaacttagcaaaaataacagggcgataaaaataacttttttaataaatgcgtttaaacgaatatagaattttgtggatacttgtattttttgatttgccaaccgtaactgcccaagagaaaaaaattgccagtaagtttagaaaaaacataatgaaagatggtttttcgatgtttcagttctctatttatttgcggcattgcagcagccgcgaaaacgccgatgtacacattaaccgggtaaaaaaaatattgcctgccaaaggccatataggcattattaccattaccgataagcaatttggtatgatggaactgttttacggcaaaaaagaagccaaactacccaacaccccacagcaattagaattgttttagaatgtaaacctagcgagtaaaatcactaggtttttttaattctaaattttactttaaaatattgatatttaaacatttacgctatggtatgttgtgtcaaatatcaataaatcaaagaatgaaagcaaatcacaactgaatagtgccaattttttagcttgatagcgttgtgtcaaatatcaataaatcaaagaatgaaagcaaatcacaaccttatttatgccaacaggccaaagtctgaagttgtgtcaaatatcaataaatcaaagaatgaaagcaaatcacaaccatagtggtgtgttacactccagccattagttgtgtcaaatatcaataaatcaaagaatgaaagcaaatcacaacaatgcaagtagaacatataacattgctcgggttgtgtcaaatatcaataaatcaaagaatgaaagcaaatcacaactcaaaatataacaaggcttttacagcaaagttgtgtcaaatatcaataaatcaaagaatgaaagcaaatcacaactatcggtaatgtaaattgtttctattgtgtgttgtgtcaaatatcaataaatcaaagaatgaaagcaaatcacaactgcctataatcatgggtattacaaagggtggttgtgtcaaatatcaataaatcaaagaatgaaagcaaatcacaacatactctaatcaaataattagcaaaaacgagttgtgtcaaatatcaataaatcaaagaatgaaagcaaatcacaactatcgaacattttataaggtttatcgtttcgttgtgtcaaatatcaataaatcaaagaatgaaagcaaatcacaaccacggcaaaagacagggatgctagagcagagttgtgtcaaatatcaataaatcaaagaatgaaagcaaatcacaacacaaagatactgatactgacatattgacagttgtgtcaaatatcaataaatcaaagaatgaaagcaaatcacaactaaggaagtacattataaaaaggaattgccgttgtgtcaaatatcaataaatcaaagaatgaaagcaaatcacaactcaagtaatgtactctgttttttttgagcagttgtgtcaaatatcaataaatcaaagaatgaaagcaaatcacaacctaaggtctaaatagttatttggatagcgtgttgtgtcaaatatcaataaatcaaagaatgaaagcaaatcacaacattttttatacaattaaactaaacaataaagttgtgtcaaatatcaataaatcaaagaatgaaagcaaatcacaacagaggatcgtggctctttgcccgttgccgtgttgtgtcaaatatcaataaatcaaagaataaaaagccaagttgtataagtgtttttttttggctatgcactttaaacgttagtaacgttaaggattaattaatgtaaatttttccaaatataccattttttaatgccatatttggaaaaatttacattgtcttaccttatgggattgttgcatttttttaaatcttactctaaaaacgataatctcgagtggcttggtgttgatatacactctcatttattgcccgcaatagacgatggttcgcccgatgtagctacatctgtaaactatataaaacaattggctgcgctgggcttaagtaaatttatatgcacccctcatatttttaatgaagtatatcccaatagcaaaaaaaccatacagcctgccttagtacaaacccaacaagaggcaaaaacccaaaatattaatgtagaaatttatgcagccgccgagtatatgatggacgttgattttttagaaatacttaaaaacgaagaaattttaacgctacccaataaatatattttaattgaaatgagttatgctgcaaaaaacaataatattgaacaatatatttttgacttgagtataaaaggttataaaccaattttggctcaccccgaaaggtacaaatactaccatgccaatttaaaacaatacaaaaggtttaaagatatgggttgcttattacaagtaaatgcactttcggtaacgggttattatggtaaagatgtaaaagatgtggcacttaccttaataaaacaaaaccttattgatttagtaggtaccgatacgcaccaccaaaaacacttagacacccttagctattatacccgtaatggaaagttttatgaactattaggcaaatgcgatatgcaaaataaaactttatttgggtaggttttaaatattattataaatttgaaaaaaaaccacttatgatattaccatttgtaaaaagaaatatattgttagttatacttagtgccagcttttgctcttgtgcaaactataaaaaaatagcttattttagagatttacaaaacaatacccagcaaacaatacccgaaattgcttacaaagaattaaaaatacaggccgacgatattttatctatcactatacaaactatcgaccctgtaaacgccaccagtattaatcaaataactaccacccccgttgcgggcgtaagcctaggaacagccaacttacccaacgcacaagttgctggctttttggtagataaagacggaaatatcgagttgccaatgttaggtaaattaaagttagcgggcttaaccaccatcgaagcccgtgaattaattagaaccaaggccagttttttttacaaagatcctagcgtacaggtacgctttaccaactttaaaattaccgtattaggcgaggttgcaaaaccagctccttatatattgcccaacgaaaaaatttctgttttagacgctttaggcttagccggcgatttaaccatttatggtaaacgagaaaacgtaatgctgataagagaaaacaacggaaaaaaagaaatttatcgcttcaatcttaactcatcatctacgtttaactccccagctttttacctacaacaaaacgatattatatatgtagaaggcaacaaagcaaaagcagcaacactaaatacagcccgatctcaaacgtatgcacttattgcttcattggcctctgtattcgccatcttaattaccagattttaatttataatgaacaatccatataaagacccccaagtgcaaaactttgtagatgaatcggaagagctttttgattttaaaggcttttttttcaaagttattaaagactggtgggtaatattattaagcgtactaatatgctttacggtagcctttatttatttaagatactccaccccagtgtataaaatacacgctaccctaatggtggtagatgaaaaaaaagggggcggtggtggcactagcagtagcgaactttttggtggcgatataagcagcttactaggtggaaaaagtagcgttgataacgaagtagagatattaaaaacccgctttttgatagagaaggtagtacggggtatggacttaaatattgcttactttaaaaacggacgagtaaaattagatgagctttacaatatcccctttaaggtaaatattttaacccccgttgatactataagtgctacaaaatttaatgtaaatgccattaccgaaaaccaactaacattaaattatatagataatttaacccaaaaagataaaaccgaaaccgttttttttggaaaaccatttaaaattgcaggcgttggcttattacaaattaataaaacgcctaatttaccccttgcacatacacaatattgctttatagtaaatgcgtttgatgccacagtaacaggctttcaaggcaacttattggtaagcgtacctaacaaaatggtaactaccattaacttagaaataagctaccccgtacctcaaaaaggcgaagatattttaaacaagattgtacaagaatatatacaacaacgcattaacgataaaaacgaaattgccgatagcaccattcagtttatcgaaaacagattgctatacgtaggccgtgagctaggcgatgtagaaggaaacatacaatcgtttaaacaaaataataaaatagccgatattgatgcacaatcacagttattaattgccaatacaagcacttacataaacaagctggccgatatagaaacccaaataagtattattgatgccttggtagattatttaaaagacgaaaccaaaaacaaaagggtagtaccagggtctattttaccgcaagacgaaatttttgcagatcttgtagggcgttacaatggcctattattagaaaccgaacgcctgctgctaacatcaaccgaaagcaacccttatattaaaaacctaaaagaaagagtagccagcttgcgggcagatatgctttcgaacttagcaaacacccgcagtgcatttgttatcagtaaaaacgccttaaacaaaaccaataacaatgtagctgggcttattagaaatgtaccagcgcaagagcgcacttacctagatttggcaaggcaacaacgtattaaacaagagctatatatttttcttttacaaaaacgagaagaaacagccatctctaaaaccgccaatatttcgagttcgagggttatagaccagcctaaatctgaggctatcccttttagccctaaaagaaaatttatttgggcaattgcgttaattataggtttaatattacccctgattcgcatatacattgc

SEQ ID NO: 2415 - DNA, 14311 bp, synthetic construct
  misc_feature 1..14311: note = Synthetic
  source 1..14311: mol_type = other DNA
tcgatgtggcttatgacaatggttattcgacgataaaccgccatttgagtgcctttgtgggcgatgtggcccgccgggttgaagacttgcagtacgagaaagaaagttgggaggtggaaattactcccgaacccgatgaatatcccgtgaaggccggtcagataatagctttgagcggaaacaccggatactctttcggtccgcacctgcatctggatatgatagagacggctacggacgaatatatcgacccgctgcctttcttcatgaacaaggtgaaagacaagactgccccgcgtgccgaaggtatcatgctgtttccacagccgggaaaaggagtggtggagggcaagcagacgcgacgggcttttccggcacatccaacgaaacccattaccgcctggggactgattggtgcaggcatccgtgcctacgactatatggacggagtgcagaataaatatggcgtgaagacggtgattctcgaagtggacggtgaggaagtcttccgcagtacggtagaccgctttgcctatgaggagaaccgctatatcaattcgtggacacacggtcagtacatgaagtcttttatagagccgggcaaccgccttcgcatgctgcaggcatccaacggcaatcgcggactggtggaaatcaacgaagaacgcccttaccgatttgtctatacactgagcgatgcgctgggaaatacctctaaagtccgctttacagtccaggggcagaagacgacaattgctccggtggaacatcgtgagaaatatgccctcaaatgggacaaggtgaactatctgcaggagccggggctggagttggttatcccgaaaggaatgctctacgatgacgtcttgctgaactactccgtgcgggctgatagtggcgacatcgctttcacctatcaactgaacgatacccgtattcctatgcacaatgcctgcgatttgcgtatcggcttgcgccggcgtccggtagaggatgtgaccaaatattatgtggcgggcgtaacggcgcgcggtggaaaataccgcatcggtggtaagtatgaggatggtgtcatgaaagtgcgtatacgggatttggggacttataccgtggcggtggatacggttccgccggtgataactcccgtgaaccaagctcagtggggacgtacgggaaaaatcatcttcaaggccaaggacaaggaaaccggcatcaacacctatcggggtacgattgacggaaaatatgccttgtttggaaagcccaactccatcagtggtaacctggtgtgcgagctcgacccgaaacatgtggagaaaggcggcaagcatgtggtggagatgacggtgacggatggctgtggcaactgtaccaccgaacagtttgaatttgtatggtaaagcctctcccccgatccctcccccgtagggaggggaggtcggaagttacttttgctatatatagtgtaataaataagtgtaataaaaatatgtgtaacaagctatcattttcttctcccctctctttcggagaggggacgggggtgaggccttaatttattagaagtatgaaaagtaaaagactgactctttccgtcttgtttgttgtggcagccgtggcgaatgcactggcctgcaccaatcttatcgtgggcaagaacgcctccgcggacggttctaccatcgtttcttattctgccgattcctatggcttgttcggcgagctatatcattatcctgccggcatgcataagaaaggcacgctgattgacatacacgagtgggataccggcaaatacctcgggcagatagcgcaggcccgtcagacgtacaatgtcatcggcaatatgaacgaattccagctcactatcggtgaaacgacattcggcggacgccccgaactggtagacactaccggtattatcgactacggtagcttgatttatctcggactgcaacgttcacgcactgctcgcgaggctatcaaggtgatgacggaattggtgcaggaatatggctattacagtagtggagaatccttcaccattgccgaccccaacgagatatggattatggagatgattggcaagggacccggtgtgcgcggtgccgtatgggtagctgtccgcgtgcccgatgattgtatctccgcacatgccaaccagagccgcattcatcagttcaatatgaatgacaaggaaaactgcatgtactctgccgacgtcatctcctttgcacgtgagaagggttactttgatggtgtgaacaaggatttcagttttgccgatgcctatgctccgctcgattttggtgcccgtcgctattgcgaggcccgtgtatggagctatttcaatatgtttaccgaccgtggtaacgagttcttaccttatatattaggtgagacgaacactccgatgcctctgtttgtgaagcccaaccgcaaggtttccgtgcaggatgtgaaaaatgccatgcgcgaccattatgaaggtactcctctcgacatcagcaaagatttcggtgcaggcccgtatcataccccgtaccgcctttctccactctctttcaaagtgggcgaccgggaatatttcaatgagcgtcccatctccacccagcagagtggtttcgtattcgtggcacagatgcgttccgagttgcccgaccctatcggtggagtactgtggtttggcacggatgatgccaacatgacggtatttacgcccgtatattgcagtacggacaaggttcccgtatgctatacccgcgtggatggcgccgattacatcactttctcctggaactccgctttctggattttcaattgggtggccaatatggtatatccccgctatgacttgatgatagacgacgtgcgtgccactcagacagagttggagacaactttcaatgaagcgcaggagggcgttgaggctgctgctgccaaacttttggaaaaagaccctgccaaagcgaaggcattcctaaccaactatacgaacatgaccgcccaaagcactttcgatacctggaaacgtcttggcgagtttcttgtcgtaaagtacaatgacggcgttgtcaagcgtatgaaaaacggtcagttcgaacgtaattccattggccagccggcaggcgtaatccgcccgggatacccgaaggagttccttgaagagtatgttaagcagacgggagacagatataaaatgcctgaataaaattaggatatttgaacttattcttctacatttgtgtcttacaaaaaagtttatattaactcttaaaataataacagtcttatggaaaatcaggaactgattaagcaggtgactgagaaagccgaaaaatggcttaccccggcatatgatgccgaaactcaggcagaagtgaaacgcatgttggaaaacccagataaaaccgaattgatagacagtttttacaaagacctggagtttggaacgggtggtctgcgcggcatcatgggtgccggtacaaaccgcatgaacatttacactgtaggtgctgcaacacagggcttgtccaactatctgaacaaatgttttgccggaaagaaggatatttccgttgttgtggggcacgactgccgcaacaatagcgacaagttcgcaaagatttctgccgacatcttctctgcaaacggcatcaaggtatatctttttgatgaccttcgtcctacgcccgaagtttcatttgccattcgccacttcggctgccagagcggtatcaacattacagccagccacaaccccagagaatacaacggctacaaggcttattgggatgacggtgcgcaggtgctcgctccgcacgatacagccatcatagacgaggtaaataaggtgacggtggccgacatcaagttcaacggcaacaaggacttgattcagattatcggcaaggaagtggataaggtttatctggacatggttcactccatctctatcgaccccgaagtcatccgtcgccagaaagacctcagcattgtgtatactccgcttcatggcgcaggccgcgtgcttattccggactcattgaaggagtggggatttgagaatatcaactgcgtgcccgaacagatggtgaaggacggcaatttcccgacagtggtttctccgaatcccgaaaatgccgaagccctttccatggccattgcgctggctaagaagattgacgctgacatcgtgatggcaagtgacccggatgccgaccgtgtcggtatggcctgcaaggacgataagggcgagtgggtgcttatcaatggtaaccagacttgtctcatcttcttgtactacatcatcaagaaccgtattgcaatgggtaagatgcagccgaacgacttcatcgtgaagaccatcgtgaccaccgaactcatcaaggctgtggcagacaagaacaagattgaaatgcgcgactgctacaccggcttcaagtggattgcccgcgaaatccgtctgagtgaaggtaagcagcagtatatcggtggtggtgaagaaagctatggcttcctggccgaagactttgtccgtgataaagacgcggtttctgcctgctctttgctggccgaaatctgtgcttgggccaaagaccagggcaagacactctatgacgtattgatggaaatctatgtagaatatggattctcaaaggaaaccaccgtgaatgtggtgaaaccgggtaagagcggtgccgaggaaatcaaggcgatgatggataacttccgtgccaatcctccgaaggaaatcggcggttcggctgtcagtctgattaaggattacaagacgctggaacttactgatgcccagggcaacgtaagcaagctggatatgcccgagacttccaatgtacttcaatatttcactgtagacggcacgaagatttctgtccgtccttccggtacggaaccgaagattaagttctatatcgaggtgaagggcgagatgggttgtccgaaatgctataccagcgccgatgccgaagctgagaagaaagtggaggcagtgcgcaagtcactcggcatttgataggaaagaggaaaaaatgtgtatatagtgttcggagaggcgtaacccgtgagggctgcgcctcttccttttgcttctgtgttgaaagaaaacttaaataaagacttaaacccgatggttgatgaacaaaacgtttgcagggaagttaagtataggcagattgcggttacacaccgattggttgatgtgaatgagagtcgtttcattcgtagttgttcgtttgtgagtgtgtgttttccgcaatctgctttttaaaatttcttccccccctctttttaattctttaatttttaattgttctccatccaccagtctatcagccttcttgcgatactcagttttcgtggaatttcgggcaggttgtctttggaatagaaggcggcagcggtcagctcatcttcctgcagttttatctccccgctttcgtagtcggcaatgaaacccaccatcaatccgctggggtagggccagggctggttgctgaagtaggtgatgttctttaccttcagccccgtttcctcaaaaacttcccgttccacacattcttccagtgtctcgccggcttcgaggaagcctgccaccagtccgtagaaggttcctcggaagttccgggcatgcaccagcaggatttcgtctcctttgcgtatcagtacaatgatggcggtggaaacgggagggtacatctcattgccgcagttgggacacttcttcatgatgggggtctggtgctccatggcggtgccacacacggggcagaagcggctgtgctcgtcccaatagagtatctggaaggcctttcctgcagaacggtactcgtccggcgagatgtagtcgtacgatgcgcgcaggcctatcatgacccattcatcggtttcggccacgggctgttccaaagcaaatgcacgtacttgcttgccgttgggtgggaacacttcgtgtatattacttccggcttccggtgtcagaggaggctctatactgacgggtacgctgtattttatttctcctttgtctgtatatccttttttcagcagcagttggtctttgaagaagacgaaccactgcgtgcagggttggggttctgttgatttttccattgtttgttgttttattattttgggggatgaacacgaaaatacaaaggcacagagattcttttcaaagagataaagcattaatttctatgtctctgtgtctctgtgcttgcccccctaaatttcgtttgctgtgtctttttcttgtcgtacatagaccgttgaccttcccattccgcggcggcgcaggaacccttgccggatgaagttgttcagttcgtctatggcggcatgtctggtcagtccgctcaattggatgtattcgttcttgttgatacatacattctgcttgaggaacagttccagttcggcttttcttgtttcttcggtggtctctactacttttttcgatttcttggtagtggagtgtacacgttccaacgtcattttcttcttgatgttgttgcggaacgtgctgctgatgcgcaggtgtacgttttggaattggacggattcggagcggattttctttttctcgtcgtcggtttcgcgcaagcatttcagtgaagtgctgaagaagccgagttctcccagttccacgatgtttccgttggcaaggaggtcgcacaactcgtcaatgcaggcatccaatgctgctcctatcacattcttgggcagatgttggaaagttgcgatatgttccacaaactccttttgggtataagtccttttcgggcagatacgtgcatggagtgatttcttgtcttctttcccgtcgggcgaaggcgtttcgtaaaggtcgtaatacgcgctcataagatatttatttttgtttatagcgataaacagttctcgtcgcttcggggaattatttttgtcgctaagcggattaattttcttcttcctaaaaactaatcgtccgacaactgttgcattatcgtccaacagttgtttaattatcgtccgacagctgtcggacgaaacagaaatgggtatgggacgattaattcttagtgaacaaaggtataaaatatagtgatacgaagagtagtgtttggggaggaaagttttagtaggcaggaagttttttaaggaaagaaaaagtagtttctttgatggaaaaactcgtttattgaaataaaaaatcccccgttaaggacgagggaacctaatgtcttcacaacggaataatccttattgtgatttgcttcattttagtacgacaaagataagaataaaaatgatatatcctgcaatcttttcaaatgctttttttacatttgtggaaattaactttaaattattgttatgaaaaaaatattggggttggatttggggaccagtagcattggctgggcattagttaatgaggcagaaacgagcgaagagaaatcgtcaataattaagcttggtgtgcgagtaaaccctttaacggtggacgaattgcagaattttgaaaaggggaagagtatcactacaaatgcagataggacagcaggtcgaagtatgcgacgtaatttgcagcgctataaactgcggcgtgaaaatctgattgaggtcttgaaagaatataatttcattaccgatgaaacgatattgtctgaaaatggtaatagaacgacttttgaaacatatcgcttaagagcgaaagctgctgtagaagagatttcattagagcaatttgcacgtgtgttattaatgattaacaagaaacgtggttataaaagcagtcggaaggccaaaggagcagaagatgggactttaattgacgggatggaagtggccaaaaaaatgtatgatgagggtattacacccggcgaattatgtttgcaacttcttacagcaggaaaaagatatttccctgatttttatcgctcagatttgcaagctgaatttgatagaatttggaattttcagaaacaattttatccagattccttaattgataaagtcaaagacgaagtaagaggaaagaataagtcacagacttgggctatattagcgaagtattttgtatggaaagaagttgaaaatagttggaatgaagaagaagcccaaactagaagagtagaaaaagaatacagacttgtgggaattaaaaggggagtaaagagagaggaattgaaacttgaaaacttccaatggcgagtaaaagcactttccgagaggatgaatcctgaagaacttgcaatcgttttgcaagagataaatgggcagattagtaattcgagtgggtatttaggtgcaattagtgaccgaagcaaggaactatatttcaatagacaaactgttggacagtatcaaatggctgttttggataacaatcctaatataggcttgcggaatatggtgttttataggcaggattatttggatgagtttaatacgatatgggaaaaacaggctgaatttcataaagagttgacggaagatttgaaaaaggaaattcgggatatcgttatcttttatcaacgtcgtttgaaaagtcagaaaggtttgataaatatttgtgagtttgaaaggcggcagatagaggtggaaatagatggtaagaaaaagattaaaactattggtagtcgggttattcctcgttcttcacctctattccaggaatttaagatatggcagactttaaacgatatagaggtgtcggtgcttggtgtgaaaaataaacgtaaaaagcaagatgataattctactacactgctcgattctgccgaaaatattgattctttgaaattgaatgttagccgtcctctggatgctgatgaaaaaagcttacttgctaaagaactttttatccgtgataagctgactaaatcagatgtgctgaaattgctatttaataatcctcagaatctgaatctgaattttaaaaatattgatggaaatagaacaggaagtgccttatatcaggcatttagtaagattcttgaaatatctggtcatgagtctattaatttcaaaaaatcagctgacgaaattgtagaacaagtaaaaacgatattttctgctttgggttggaatacggaagttttgtgttttgattcggaaaaagaattggacaagcaaccttactttaaactttggcatttattgtactcttttgagggtgatagtacgccgaccggagatggaaatctgattcaaaagatagcagatttatgtggttttgaaaaagattatgcttcaattttggcgaatataacttttcaagaagattatggtagtttgagtacaaaagcaattcgtaagatattacctcatctaaaagatggaaatcagtatgatgttgcttgtgaatatgcagggtataaacattcaaaatcctcgttaaagaaagaagaaattaagaacaaggtattgaaagataaattagagcttcttcctaagaatagtttgcgtaatccggttgttgagaagatactgaatcagatggttaatgtgattaatgcgattattactacttatggcaaaccggatgaaatccgtattgaactggctcgcgaattaaagaaaaatgcaaaagagagagaagaactgacgaaatctattgcggatacaacaaaaacgcacgaagggataagagctattctgcaaaatgatttcggaatgtctcatgtaagccgtaatgcaataattcgttataaattgtatgaagagttgaaagataatggatataaaacattgtattccaatcaatatatacctaaagaaaagattttcagtaaggagatagatatagaacatattattccacaatcccgtctttttgatgattctttctctaacaaaacattggaagtgaaaagtataaatattgagaaaggaagtaaaactgcttatgattttgtggaggagaaatatggcgaacaaggtttgcaggaatatttaaatcgttgcgaggtactgttcagggataagaaagaaaatgcaggagagtgaaatccctgaaggatttattgatagggatttacggaatacacagtacattgcaaagaaagctctttctatgttgaatgaaatttgtcgtcgagtggttgctactactggggcgattactgatgaattgcgtgaagattggcaacttgttgatgtaatgaaagaattgaattgggaaaaatataaagtactgggattagtcgaatattttgaagataatgatggaaggttgataggtaggattaaagattggactaagcgtaacgatcaccgccatcatgcaatggatgctttgacagtagcatttactaaagatgtatttatccagtattttaataataagaatgctagtctgaagcctgatacgaatgaagctgcaataagaaataagtattttcaaaatggaaaggctattcctcccatgtctttagatgaatttcgtgctgaggcaaagaagcatttaaatgatacgctaatctctattaagaccaagaataaggtagttacaattaatctcaatagaacaaaaaagaaaaatggaataaacaaaaagcagcaacaaattccacgagggcaattgcatttggaaactgtttacggtagtcataaacagtatgtggttaaagaggagaaagtgaatgcctcgtttgatgcagctaagatagccactgtaaataaacctgcttatagagatgcattattgaggcgtttgcaagaaaatggcaatgattcgaagaaagcttttactggtaagaattcattggacaagcaacctgtttggttagatgctaagcagaacgagtgtgttccggaaaaggttaaaacagtaatgcttgaaacggtttatacggtacgaaaacctattgatgaaaaattgaatgtagataaagttgtagatgcgagaattcgtaaacttttgcaggatcgcataaaagaatacggtaatgcgaagagtgcatttgccaatctggatgaaaacccgatatggctcaataaagagaaaggtataactataaagcgagtgagtgtttttggtatcagtaaagcgcaatcacttcatgaaaagaaggataaggatggtaattttattttagataaagacagtcggaggattccggttgattttgttaatacaggtaataatcatcatgtcgcaatttatcgtaaaccagttttagacaaaaagggacaggctgtatttgatgaaaatggtgaattgaagtttgaacttgaagaggttgtagtttctttctttgatgcagtgacgcgggtaaatcttagtcaacctattattgataaagattataagagaagtgaaggttggaagtttctttttagtatgaagcaaaacgagtattttgtgttcccaaatgagaagactggctttgaccctaaagaaattgatttgctgaatcctgagaattatgctttaataagtccaaacttgtttagagtgcaaaaaatagcctctaaagattatgtgtttaggcatcatttagaaacagttgttgcagataggaaagaattgcaggagattacctggaaacgaatttcttctctaagtatattgaacagaattattaaagtccgagtcaatcatattggtcaaattgttatgataggggaatattgagatggagaataaattgaaattgtttcaaggcaagagtattcgttccgcctggaatgaagaagaacaacaatggtatttttctattttagatgttgttcaggttttgacagataatgcaatgctaagcaatatacaaagcgaatgtgttcaagagatgaaatgttgaatttgaactggggtacaatttgtaccccagttcaaatgactgctgaagatggtaaaagaaggaaaatccaagcggcaaatataaaaggactttttcgtatcattcagtctattccttctcccaaagcagagctttttaaactgtgatcagcccagattggctatgatcgtgtacaagaaattgagaccccagaattagctcaagagtgaatgaaagaactttatgaacagaaagggtgtctcctcagttaccgtttgaagaaggtgatgaataatattcactaaaattgaagtactatgattaagaaaacactctattttggaaatccaatttatttatctttaaagaatgcacagttagtaataaaactaccggaagtagtgaaaaatgaaactttaacgggaggatttaaacaaaaggcagaagtgacaaaaccaatagaagatattggtgtagttgtattggataataagcaaattacgattacctcaggagtactggaagctctacttgaaaataattgcgctatcataacctgcgatagtaaaagtatgcccgttggcctgatgcttcctttgtatggcaatacaactcagaatgaacgttttcgtcaacaattaggtgcttctcttccattgatgaaacaattgtggcaacaaaccattaagcaaaagatagagaatcaggcagctgtgttgaaaaaatgtgcaggggaagaaataagatgcatgaaagcatgggctgctgatgtgaagagtggggattctgataatctggaagctcgggctgcagcttactattggaaaaacctatttaaaatagatggtttcacgagagatagagagggcattccacctaataatttgttgaattatgggtatgcgatattgcgtgctgttgtggcacgtgggttggtatcgagtggacttttgcctacgttaggcattcatcatcataatcgttataatgcgtattgcttggctgatgatataatggaaccttatcgtccgtatgtggatgaactggtttgtgatattatgaaaaaaggaggagattatgggatgttgacaaaggaactgaaaggacagcttttgacgattccgtcgttagatgttattatttcaggtaagcgtagtccgctaatgatagcagtgggacaaacaacagcttctctttataaatgttttaatggagagttgcgtaaaatagcatatccggaaatgtaatggaccgttttagtgaatatcgcattatgtgggtactggtgttatttgatttgcctactgataccaagaaggataagaaggcgtatgcagacttccggaagaacctgcagaaggatggatttactatgtttcagttttccatctacgtacgacattgtgccagcagtgaaaatgcagatgtgcacataaaaagagttaaatctttcttaccggagtttggacaggtgggaattatatgtattacggacaaacaatttggtaatattgagctcttttatgggaaaaaagttcaagatgtgaatacaccggggcaacagttggagttattctaaaagtaaaaatcccacttgttggtgggatttttagtggaaaactgtttgctttttgtgattcaaattgattgtttaaccatttgattattagattataatgaatagtctgctgtttccaatggttcaaagatactaaaatgaaagcaaatcacaacagtgcattagcgttcaagtagtccgctatagctgtttccaatggttcaaagatactaaaatgaaagcaaatcacaaccgtcagtcatgtttgcactcttatacacaagctgtttccaatggttcaaagatactaaaatgaaagcaaatcacaaccggtatgtttattgtcccggagtaactaagctgtttccaatggttcaaagatactaaaatgaaagcaaatcacaacctggcagccctaccaaatcgcatgaatatagctgtttccaatggttcaaagatactaaaatgaaagcaaatcacaactcgaagatgacgaaagagactcgcgagtgctgtttccaatggttcaaagatactaaaatgaaagcaaatcacaacgttcgggcgctgtgaacgcagcagaaagtagctgtttccaatggttcaaagatactaaaatgaaagcaaatcacaactatttttggtgtgaatgctgattctacttggctgtttccaatggttcaaagatactaaaatgaaagcaaatcacaacttccggtgttcagcaggctattggttctgtgctgtttccaatggttcaaagatactaaaatgaaagcaaatcacaacgtcctgttcgttatacctctgatgttcggtgctgtttccaatggttcaaagatactaaaatgaaagcaaatcacaacaatggtattgcttctagaatttctatatttgctgtttccaatggttcaaagatactaaaatgaaagcaaatcacaacgtgtgtgtgcgtgtctgtgtg

SEQ ID NO: 2416 - DNA, 14186 bp, synthetic construct
  misc_feature 1..14186: note = Synthetic
  variation 917..1142: note = n is a, c, g, or t
  variation 7964..8186: note = n is a, c, g, or t
  source 1..14186: mol_type = other DNA
ctcgagggagtggctgatctggttcagtaaatggttcctcccgagtatcctgagcgttctctcgatttgtaaccaaggtatccgccgtggtgcctcttggcgtactcggcggcggtgaaacctatcttttccatcatcagggccaccagaacatcaccgattaccgtcatgacagttgtggatgttgttggtgtcagccccagcgggcacacctcggggggaccgcctgtgaaaaggcccacagtagcctgttcccataacggagaggcattgttgccggatattactaccaccggcatgttggggaagaggttatccttcagttcaaggagctcgaggatctcccgggttcgtcctgaattcgaaataacgagcatcagatcattttcctgcagcacaccaaggtctccatgctgggcttcactggggtgcagaaagactgaaggtgttccggtggaactgaatgtagtggcaatgtcatgggcaatctgtcccgccttgcccataccgctggtcacaagtttgcccttgagaaggtgcacatgtttaaatatcagttcaattacatggctgtaactctccgtgacaggaattttcctgacagcatcagcctcctggtcaaggatctgtctgactctggtttgcatgatttcagaatatgagcccaaagatatttattttaaatttatgtagtaccggcttataacttccccgggagtaaacggctgacggatgcctttgatggttttcgttatggcagtttgtttttatgtactgcataataatattatgtcatatgttactatacaattgaatctgagtgcttatttttatgcataatttaagtccggagtattgtcaggtagtacgtatgtttagattattagtatgaaccgaccccaaaactaactttgttnnnnnnnnnnnnnnnnnnnnnnnnnnnnnnnnnnnnnnnnnnnnnnnnnnnnnnnnnnnnnnnnnnnnnnnnnnnnnnnnnnnnnnnnnnnnnnnnnnnnnnnnnnnnnnnnnnnnnnnnnnnnnnnnnnnnnnnnnnnnnnnnnnnnnnnnnnnnnnnnnnnnnnnnnnnnnnnnnnnnnnnnnnnnnnnnnnnnnnnnnnnnnnnnnnnnnnnnnnnnnnnnnnaaagctcagacacctttaagggtgtattacaaatccatcataaacggcaaagaaattcaaggcgtatcccagccggtgattgagagcaatggtgtgacagtcttgatctcttccacccaggggcagaatgaaaaagcgcagatgccctccccgcaacaatcgtcatttatcgaccttgcaggcatgcgttacgtacagatggctgacatgcctgacggctcgcgaatcagtacggagactccgttcagtgagctgcctgttgcagagctgagcaacgattccgaagtcattgcgggctacaggtgcataagggcaaggatcatctacttctcgaatacaatcgacatctggtatacatccgaagcaggtgtggcaggaacaccggtgccttcctatggtgtcccggagggtctcgtgcttaggatcgtgcggaacgggaataacattaccgaggctgacagggtggaggtgatcaagaggaaggatatgaacatcgctatgccggaaaatttaggacggagcgttgacaggatgaccttcgagcatcttctgcgcgaggctttcgttacgacagtaaccgtctttgacaatgatgtaatcaactgggaaggggaggtgacgaatcaggcttttggtatgaaagacacactctatcgcttcgcagggggaactgtgatactgaaaaaggtgaccctgccacaggtacacgacagctacagcctcttcgccgaggtgacggagtactcagccggcgatgcgtatgacaggacaggtaccgtttttgtgattccgcagggagatcctgttaccttccttgatggaatgacaaagggccacatggtgcttccggcctattctgacaggcatggcaaacagtataccggagtggcggcaactgaagattacagaccgccggtagaactggtgcgattctttaccccgttcggtgtcagaggcttcaatgacagacgcacagtaccgggacttacatggcaggattcatctttctacaagcaggagatcacccgttatctgccattgctgcgcggcgaagtctggattggcgctttcattggaaattatgacaggggagggcacaggctctcactaaggctgaaatactatcccgatacccgcgaccaggtacctccggaggcgcctggtaagtggctcagctccgtcttcaacacgctgccgatacttgaaatggcagggcaacagtacggtactatgttcgatggagacaccctttcagtaagcgttgatatccccgaaggactcagatcactgcagatggtgttcattaccaccggccacggcggatggggaggcggagatgaattcaatccgaaactgaatgagttgctggttgacggccgtcgggtctggtcttatgttccctggagaagcgactgcgggacgtaccgtaatttcaacccggcatccggcaatttctggaacggactttcatcatctgattattcaagatcaggctggtgcccgggatcggcatctgaaccactgatcataccacttgatggtctgtctgcgggcaggcatacattcagcgtcaccgtcccactgggcaaaccggagggaggtagcttctcgcactggaatataagcggggtgctgtctggtgagcaggaatgaccctcaggaagaatggcgcttttcgctctgcggggtcctgctctgaatattttaagaaataaagagcgacccaatcgtcacgcagacagaacggcttcagtatgtacgtgtcatggtcacggggataactacaatgaaatcagccaatcccttgttttcattctcaaggtcagcgatatcatcctgaagcacggtggtaatggtggcaatctttatcccgggcctgtaaagtttcaggtggtggataattccaagataattgtcagagtggtatgctccgttataatggattaagatcttccctgacggcaggttttgtgaaataaagtgagccatggtggcatccttgattgcctgagccttcgggagattctggttcggtttggcacccatcccgggcatgccgtgcattgacagcatgtccttgtaacatttcagctcagggtcataggagaccggtaatggcgccaggtacttcttcgcttcagttgtaagtgagtcgagctcctcaaatccgccacgtgataccattgaggcataccggcgtggtacgttggttgcaatgaatgaaaggctgtttttcctggcaaattcaaccagcggcctgtaatcggttttgtagttcttccagagcttaacctcagcctcgaacttatcggcttcatattcataacccaggtattcattcattaacaactggttgtcagcctcaaacatctctgcgcctaagatcagtctctctcctgcaagtttgtaaagatctgcagtgatctcatattcaagccagtgggcaatagggttgtcatgcagctccccgaaaaagacgacgtccgccgagcttatcttctcgatcatcttttcatatttaacattctttccctcacgatcatacaggttatatgcaggcttgtctgacctgaatgaaaggatgagtatggaaaccagggtcaaggtgatggcggttctgttcattgttgtggctcgtgaggattgataattaagtttttttagcacctggaaacaaattaaacgattatttccggattgatttggaatatctttgggagttcaacaattgttaaatgaaaaggttaatcattccctttcttattacggtttccatggtggcctgcaactacagcgggcaacagcctgacgtggcatatgaaacgccggatacagatgatattacgatggacaaccaccttcagaaagtattttccctgaggcgtgaagcaatacttgacacgattggtaacggtttgctaatgctcaggtcagattatggatttgacggaggcaggcatgaatacagggcagccggtaacttctggtacctgacagggtacggacatccgggagccattatgtctctctcagaacctgtttcagggagctcttccgtgacttatacgctttactcgaggcagagaagcatcggtgatatcatatactccggcaacctgccagagcctgctgagctgatgatgagatggtctcctgacacggtgttggattacagtgaggctgacatgctcatcgctgaagcagccagggagggcagatacatctaccttgatttccgtgatcatgatttccgtgatcatgtactggagatactgggaagcgggaaagctgccggagagttgctcaaaaatattaatccggcactgtcagagatgcgggtgaacaaggatgaatatgaggtaaggatgttgcagaaagcagttgacattaccggcgagggacttaaggcagcgatggctgcctgctctccgggaatgtatgagtttgagattgaagcccttctggaatatgagtggcgacgtaacggttcctcaatgcccggtttcgagtcaatagttggttcgggagagaatgccgttaccctccattattctgcaaacaacaggaagatggaggaggacgaactcctgctgatggacgttggagctgaatacgggtactacacagcagatattacgcgtactgttccggtgagcggaaagttcaccagggagcagagggatatttatgacctggtactgcgggcccagaaggctgcgataggtgagatgaagccgggagtacctctgacggcagcgcacaatatggcaaccggtattattattaacggacttcgggacctgggtctggttaccgatcctgactgccagtggcagcgcaaattctacactgtctaccacatctgccattttctgggacttgatgtgcatgataccgggaaccagggaataccgcggtcgatgatggataattatctcataactgatacagcagtgggaagacttcttgtaccgggtatggtacttacggtggaacctggcatctaccttcgggcaaacggacttgaccagctcgatctgctttacggtagtgaagccggtgaaggggagattgctgacttcattgaaaaggtgcggcccgtttacgaaaaatacagtaatataggcgtcaggatcgaggatgatgtgatgatcaccggcaccggcaacactgtattatcggcatccatcccgaaggagccggttgagatagagagacttatgaggtaaatcgttattttttagcccaggatgtcaaaacggattttacattgtaatccttggcatacatataagcagttttgtcctgtgagtccctgatcagcggatcagcacccctttcaagaagaagatttacaacctggcaatgccctcgtgacgctgccgcgaagagggcagtggctcccctggtggtctttatatctaccagcgccccgctgtcgaggagcaactgaacggtttccatgctgcccttgagtgaagcgagtatcagcgccgaattgccgttcagggtctgatggttgacgtcaactccacctctcaacagaagccttactaccccggtctgcccttcctgggcagccaggatcagtgcggtggatccgttcatgtctgatatatccgggtcagctcccttgcctaatagcatccggactatctcttcattaccgttctgagatgcgaggatcagtgcagtggaaccatggttatcctgcaggtctgtatttgcaccattttcaaccagcaggcctgcaatatcagtatgaccatattccgatgctgctatcagaggtgttgtaccgttatcaggccgtatatccgggtcagctccctttccaaggagagttttgaccaccccggtgtgcccgttctgagctgcgaggtaaagtgccgtggtgccgttgacagactgccggctatgatctgcgcccctgtcgagcagaatagtgcatacctctgtcgcacccgtttcagcagcatacatcaacaacgtcacacccgacttgtcagaatagcctggctcatcaaccttccctgccagttcaagggcatgtttgaattcccttctctcaagagcttcaagaacttttttgggagaaacacctgactggctccggacatttattgacaaagccagcaataaagaagtgcagatggctgcagggacgaatgttttcatgatagtcggactaaactatagtaaaattatcatggagccctgaaaaccggaagtcatttttgaccttcagtgccagtgtgttgacggacagatgcttttcgggtgttttgtttaagtccggacagaacaaaacgggttttggtccgtataagccgttaagtcaaaatatggaaaatcaagggtatgaaaaagaccgttgtgcttcttctctttgtgctgacctgggtcggcgccttttcgcagacttataagagcaggtctgcaaccatacggagggatggtttcgaaattgaccggaccgagaggtctatagtcatcagcgacagggagatagtgatttccaactatctcaacgggaataccaggccgcttctgcttgaggtctactttaccgaggacaaggaggaccgttttgacggggtttgcaggcactattactgcaagaccaggaatgatgagacactgagtccctgcaagaagatagtagtaatcaggaaaccttattcaatcactcttgagctatacctgtctgacgacaacaagtatgtacatgacctggagataaacggttaaagggccgttatggtgcttttcgtagcaggttcattaattaagggaatatcttccggtccggagggaaacattctcattaattgtaaaatcggaatggagccatatttgttcgaggctctccctgtcaaagagatcatctacagtatattgaaataatccacggttttcggataccggaagtgaatcccatctttccgtggcgggcatcatgacaatgactgactcaagtgcgcttaaatgagattcttcccagatgaactctcccttttcgatctcttcaaaagtaagtgtatgggctgtctgttcatcctccatgaatccgggggcatcagcaggactgaggtaccaaaaggttttggcatacagaatgaaacactctggtgttgcattgtagttctttccatccatgataaaggaaaacaaccgctgaggatcctctgacagatcctggcaatcaatctcgtcccaggaacagtcaaaacaaccatggtactcgaattcatcccagggaacggaatagagctcaacggtgaaagtgttgactctgaggcttgttgcacggctggccgaatccctcagggcgagcccggcatcaacgaagagatcgatatctgcagtgaattcaagtgtacaggtggtgtcgaatgctgtggagaagcttgagtcagaagcagagaacataacagggatgtgtgcagggctgctcatattgacagagatgttaaagaaaagtccggtggccgtggtatctgacatgacattgacatataaaaagccatcttcgtttgtgaaccggctttcgatagtccggctcatctcataagagagcatcccgtaagttacattttcctctgcatcagagaggtaccggttgatcaccgaatcgcagtcaaaaactcttcccaggtcatcatcaaccagtttttcagggtctatttcataggcacccaggagaattgtttgtggcgttcgggtattcagcaggctggcaagtgttttggtcaggccagtgaacggcacccctttggaccgggtggtatcagggagctgatcattgccacagacggggcnnnnnnnnnnnnnnnnnnnnnnnnnnnnnnnnnnnnnnnnnnnnnnnnnnnnnnnnnnnnnnnnnnnnnnnnnnnnnnnnnnnnnnnnnnnnnnnnnnnnnnnnnnnnnnnnnnnnnnnnnnnnnnnnnnnnnnnnnnnnnnnnnnnnnnnnnnnnnnnnnnnnnnnnnnnnnnnnnnnnnnnnnnnnnnnnnnnnnnnnnnnnnnnnnnnnnnnnnnnnnnntttcattgcaggggtaaatcattggtatgctaatgtaaaacaatcattaatggtttctattgcgccggatagtatttaatctcacggctaaatcatctgacacgtatcgatgtgtggtcagattgagatagttaaacatctcaaatgaggtcagaaagagtattgtaaaaagtctgcctaattggattgaatccagtcctgccccggttgaattccgttaattctcagggaattttacagtttattattttttctaaataataaatggtttaattttaaagtcttacccggtgtgagcaggttgtcagtcgcaaccggtttcatgttcacgatccggaatactgtagtagcagaggagtttgtggcggagaaaaagaaagcccccgatgaaggacgagggcggcctgaatgttttcacaacggaataatccttattgtgaattgctttaagaatgtagaacaaagttagcagataaaactgaaaaccaaaaaaaattatgaaaaagattcttggactggacctgggcacgagcagtattggatgggctttagtcaatgaggctgaaaatgatacagaaaaatcatcaattattaagctcggggtgagggttaatcctttaactgtagatgaactttcaaactttgaaagaggcaaaagcattaccacaacggccgaaagaactctgaaacgcagtatgcgccgcaatcttcagcgctacaagctccgtcgtgcaaaccttatcgagattcttaaagagaatggttttattacggaagaggctgttttatccgaatctggtaacttttctacattcgagacatatcgtctccgtgcaagaggtgtggaagaagagttgacactggttgaattatcgcgagtgttgttgatgataaataaaaagagaggttacaagagcagtaggaaagctaagagtcaggaagaggggcaacttatagacgggatgaccattgcaaagcaactgtatgaagaaaacctgactccggggcaactttgtctgcgattactgcaatcaggcaacaaatttttaccagacttttaccgctcggatcttcagactgaatttaacagtatctggaattatcagaaaaaatattaccctgagatactgactgatgagcttaaggaaaaattgatcaacaaaaatgagaaggcaacgtgggcaatatgcgaaaaaccactgaatctggttggtcttaaacgagtgtcaaaggcacgggacttaaggctggaaaatttcaaatggcgctctgatgcgctctgcatgaaattagatctcgagcaaattgcagtagttcttcagaaaataaacggacagattagtaactcaagtggctatcttggatccataagcgaccgaagcaaagaactgtatttcaagaatcagactgtgggccagtacctgatggctcaattgaagtccaatccaaacataagtcttaggaaccaggtcttttatcgtaaggattacctggatgagtacaatactatatgggagaagcaggcacaatatcattgtgagctcacggaggatattaagcgtgagatcagggatgtcgtcatcttttaccagcgtcggttaaagagtcaaaaaggattaatcagcttttgtgaatttgaaagcaagcaggttgaaatcgaatcttcaggtaaaaagagagtaattaccattggaagcagggttatacccaggtcttcacctttatttcaggaatttaaaatttggcagaacctgaataatctggaagtcttccctaaaggatatttatcaaggagaaaagcatctgcaagggttatcaatggtcaggcagagggaggcgaaaggagatctctggatcaggaggagaaggaaatattgtttaaagaattgtcagtcagagaagaactaagtaagtcacaggctctggcattgcttttcgacaacgacaaggaactggatttaaattttaacaaaatcgatggaaatagaacatttgcagcattctataaaaccattaacgaaattattgagatttccgggcatgataagatagacttcagcagacataatgctgatgaaatttcagctactgtaaaatcaatcatatatgttcttgggtgcaatcctgacatttttagcttcgattccgaaaaggggctggaccagcaatcttcatacagactctggcatttactttattcgtacgagggagataactcaaatacaggaatagaaggactaatagaaaaaatatcgaacttgaccggactacagagcgattacgccaggatatttacgaacataacctttcaggatgattatggcagtcttagtgcaaaggctatccgaaaaatcctgccataccttaagtcagggaacaaatatgaccttgcctgcaggtacgccgggtatcgtcactccaaatcatcattgaccggtgaggaaattgccggtaaggtattgaaagacaggttagatattctcccgaaaaacagtttgaaaaatccggtggtggaaaaaatcctgaaccagatgaccaatgtggtaaatgcaatcattgatgaatatggaaaacctgatgagatcagggtggagctggcaagagaacttaaaaagaatgccgaagagagagacaaattgtctaaaatgattaacgaagccaccagggtacatgaggagataaagaaaattcttcaggatgagtttggattatcccatgttagccggaatgatatcattcgttataagttgtacaaggaattggaaactaattgttttaaaactctctattcaaatacttttgttcccagggagaaaatattcagtaaggagtttgatatagaacatataattccacaggcaagattatttgatgactccttttctaacaagactctcgagaaaaaggatatcaacctggaaaaaggagacagaactgccttcgattttgtgaaggagaaatacggagaaagcgctcttcaggattttcttaccagaatcgagagtatttataaccttaaaggcatttcaaaagcaaaattcaataaattaaaaatgtctgagaaggatatacccgacgatttcattgacagggacctgaggaatacacaatatatttcgagaaaggcattgggaatgttgggtgagattgttagaagcgttgtgccaacaacaggttcaatcactgatcagttgcgtgaggactggcagttggttgatgtcatgaaggagttgaattgggagaagtataaagcccttgggttggtggaatattttgaggacaaggatggacgacaaattggaagaattaaggattggacaaagcgaaacgatcacaggcatcatgcaatggatgcattgactatagccttcacaaaacatgttttcatacagtatttcaataatgtgaattcaaggtatgacaaggattctaatgcttatgccattgagcagaaatatttgtatgacagaaaggtaaagccgcctattccggttgatgaattcagggctgaagccaaaaagcatctggaatcagttttggtatcaataaaaacaaagaataaagttgtaacccggaatattaatgcatcaaagaatgacggggggattcatcgtaagatccagctaacacccaggggacaattacatctggagactgtttttggaagtcacagggtaccggttgttaaagaagtaagggttggcggcactcttaatgaagaagtaatccaacttgttaccaggcctcagtatcgggacgcattattacagagacttgctgaaaacaataatgatccaaggaaagcttttacaggacgaaatagtctggagaaacaacctttgtatcttgatgaacttcataccaagaaagttcctgaaaaagtaaaggtacttacgtttgagccggtatatactatccggaaacaagttgctcctgacctgaatgtggacaaggttattgatcctaagatccgtaagctcttacaggatagaattgctgaatatggcgatgcaaaaaaagcattttccaatcttgagaaggatcctgtctggcttaacagagagaagggaatatcaatcaaaagggtagctgtttcaggtataaataatgctcaggcccttcatgaaaagagagacaaggagggtcggcttatttctgatagtgaagggaaaaatatacctgtggattttgtcaatactggcaacaatcaccatgtcgcaatatacagggatgcaaacggcgagcttcaggaaaatgtagtgtcattctacgaagcagtaacgagggcaaatcttggtcagcctgtaattgacaaggaatacagaagctcagaaggatggaagtttctgttcacaatgaagcaaaacgaatactttgtttttccgaattttaataccggctttaatcctattgacataaatcttctggatacaggaaattaccacatgataagtcctaatctgttcagggtccagaaaactaccactaaagactactttttcaggcatcatctggagacaaacgtggataacaatggtaatctgaagggagttacatggttacgaggtggtttaggcctactgaatggggcaataaaagtgagagtaaatcatattggtcagattgtctctctcggagaatattgagatgataaaacgcaccttacattttggcaacccctgttcgctccggaagagagatttacagcttgtcattgagtatccggaagaaaggatcgatcctgtaacagtacccattgaagacatcgggttgatggtgttggataatcctcagataattataaccaatgccctgatcatgtctttaaacgagaataatattgccgttctcagttgcgatacctcccatctgccgtttggactgatgcttcccatgtactcacatcacgcttttacagagaaacttggagatcagatcgaggcttcgctgccattgaaaaaaaacttgtggcagcaaacggttatcgccaagatttcaaaccaggcagccttgctgaaggctaaaggaatgagtacggacaaaatagactatttcattcgccaggttaaaagtgatgacagtacgaatgtggaaggacgagctgcagcacattattgggattgtgtttttggagacctcagctttattcgacatcgttttggagaaccacctaataatatgctgaactatggttacgcgatcctcagggcaataattgcaaggtcgcttatcggatcagggcttttcccgacaattggtattcatcaccgaaataagtataatccgtattgtctggctgatgatgtcatggagccatatagaccgtttgttgattctttgattctggacttgcttgaaaagattgaacctcctgaagagctttcacctgcgataaaaaaggaactgctgaaaattcctgttctggatgtagtaatagatggatccagaagtcctttaatgatagcaacccaacgaaccacagcctcgcttgcaggatgttttggcggtactctgaggaaaattgtctatcctgtcctgcagtgaggtacaaccaatacagagtaatgtgggtttttgttttttttgaccttccgactgacactaaaaaggaccggaagaactatgcattttttagaaaacaattgcaaaaggatggtttcagtatgttgcagttctcaatctatgtcaggcattgtaacagcagggagaatgcagatgtccatatcaaaagggtaagatcctttcttgcgccgaagggtgaaataattatattttcccttactgacaaacaatttgggatgatggaatttttcagaggcagacaccctgatgcccggcctggtacgccacaacaactagaaatgttttaaaggataaaaatttaagagccgacatacatcggctcttaaattccggggctttttttaatcctgaataccgggctaagtagctgattttaattggataatcacctgctatgttgtgtccggtatttcaaag

SEQ ID NO: 2417 - DNA, 14164 bp, synthetic construct
  misc_feature 1..14164: note = Synthetic
  source 1..14164: mol_type = other DNA
  variation 1390..1637: note = n is a, c, g, or t
aaaaactactcagctaaacaaaacgcaaaaactaatacatcattattctataaatgatgcgattgagcatttaaaaactattaagaaaataaaattcaatagtaatgaatttgttacttcagaaatgaataagtcaaccaaaacattattaaagcagatgaaaatatctattacctaaaaaattagggttcgagtttaagttttttactaaaaataagacaaattattattgcttaactggctcaacttttttgccaaaaaatctaataattaaaaagcaaactccaattaaaatcggatatgcgatccaaggacttagtccatatgccactggtagagtaccaaaaactaaaccaactacagcaactgtcaatgcataaggcaattgagttctaacatgttgaatatgattacaagaagaagccaaagagcttaaaattgttgtatctgaaattggtgagcaatggtcgccaaataccgaacctgcaataacggttgatacaacatgagaaaaaagcattaaacttgcattgtaatccattcctgtttcttggcataaaaaccatgttgctggtaaaaccaaaggatacattattgccattgttccccacgatgtgcctgtgctaaacgacattagagcagaaataacaaaacttaaaacaggtaaaagatatggactcatatttgcagattgtattgctgatgtaataaattcagcagtatgtaaatctgaaattagggcagcaagcgaccatgccaaaattaaaattacaattgccgacaacatagctttaaagccattaatcatgctatccattgtgttttgcaagccaagttttttcttacttaaactcaagaacattgcagaaatcaatcctcctaaagaaccccaaatcagagctttataagaatctgaagctcctattgtttccgaaatttttgttataaatcctatagatttattttcccaaacagcaggattccaacctgtataaaaaagacctgcaatagttccaaaaataataattgcaataggaataatagcgttgtaaatgtttggtttaatatggtcagaaacttccatttcttttaaatctgtttgcagtttttgttccatatcagctgctgtaacacctttttctcttgctcgtctttctgcggttagcattggaccataatctctgcctgcataaattaaaatcagtataaaaattagagttaaaattggataaaaagaatatttaagacttgagaaaaagatattataagcactctcatttaatccaagttgagtgatagaattttgaatatatgaaagttctgctcctatccatgttgtaacaaaagcaatagaagccacaggtgctgcggtgctatcaacaatataagnnnnnnnnnnnnnnnnnnnnnnnnnnnnnnnnnnnnnnnnnnnnnnnnnnnnnnnnnnnnnnnnnnnnnnnnnnnnnnnnnnnnnnnnnnnnnnnnnnnnnnnnnnnnnnnnnnnnnnnnnnnnnnnnnnnnnnnnnnnnnnnnnnnnnnnnnnnnnnnnnnnnnnnnnnnnnnnnnnnnnnnnnnnnnnnnnnnnnnnnnnnnnnnnnnnnnnnnnnnnnnnnnnnnnnnnnnnnnnnnnnnnnnnngtcatcaaaaaatattactaaacctaacaaccaagtaacaaactgccctgagcgaggattattagcacgccgagataaaatatttatcactgctttcattccaccattttttgtaataatctgcacagtagcaccaattaacatagaaaaaatgattatagacaaatgctcggttttaaaaagagcacgcaagacataagtatcaggaattgtaagtattgctttaaaaactgaaaggataacatttgtgccagaatatatccaaattataaaagccccactaaacaaacctatgaataaagcagaaaaaacttctttaaaaattaaagcaaacaatattgcaatcaatggtgggataattgacatccaaagaggaattggctttatagttttgcttgcttctatcccctcgcactgaatgtttaaatctgttttctcattaaaaatatactcaaattctgcaattccatcaacaaaaactatgttaaatactttattatttaatttgatttcacgtacacagttgatatctacaatatttccaaggctatctttagctaccaaactaatttttgaattaatgccttcaacgattgcaaaatcggtttgtatatctattgattttattatatagttttctgaaaacaaatttgcagtactaaaaacaagtactgcaaacaaaactagtatatttttgagtttaaacattagaagttagtccattccttaacttgctcaggtgttggattttgcaagccaagtttatgttttttattccaaccgcacagtatttgatgcaattttcctacattagcttcttttagctgagccaaagaagtaaagcctgatttgtataatatttttgcccattcttctggtatgcctttttcaacaaaaacagattcattaaaaatttctgcctttttctcaggtttcatttgtgggaaaaacaaaacatcttgaattgatggactattagtcataaacattgttaatctatcaattccaattcccattcctgcggttggtggcattccatactctaaagcacgtaaaaaatctctatcaataaacattgcttcatcatcgcctttttcgcttagtttaagctggtcctcaaatctttctttttggtctattgggtcatttaactcagaataagaatttgcaagttctttaccgtttacaataagttcaaatctttcggttaagccaggaattgaacgatgtttttttgttagtggcgacatttctattggataatctgtgataaaagtaggttgaataaaatggtcttcacatttttctccaaaaatagcatcaatcaatttgcctttacccattgtgtcgtcaatttctatatctaattctttgcaaatttgtcttaattcatcttcagattttcctgcaatgtcgtagcctgtatattttttaatggcatcatacatgctaactctcgcaaatggagttttatagtcgattattctatctcctaattgtactttagtagttccatgcagtgctatagcaactctttcgaccatttcttcagtaaattccatcatccatttatagtctttataagccacgtaaatttctaatactgtaaattctggattatgggttctgtccattccttcgttacggaaatcctttgcaaattcataaactccatcaaaaccacctactataagttttttcaaataaagttcattagcaattcttaggtaaagaggaatatttaaagcattatgatgagtaacaaaaggacgagcagctgctccgccgggaattggctgtaatattggtgtttcaacttctaaatatccttttgaattaaaaaactcacgcattgtgtttactatttttgttcgttttacaaacacatctttcacatgaggatttataatcaaatcaacataacgttgacgataacgcatttctaaatctgttacggcatcgaaaacatgtccgtctttttctttcactataggaagtggacgtaaagacttagttaaaacagtaaattctttaacatgaacagaaatttcgcccatttgagttctaaaagcatagcctttaacgccgataatatcgccaatgtcaagcaagcgtttaaacacaacattatacattgttttatcttcaccagggcaaacatcatcacgtttaaaataaagctgtattcttcctttactatcttgtaattcagcaaaagaagcatttcccataatacgacgagacataattcttcctgcaagagaaacagattttaaattttctggcatattttcatcagaaaatgtttctaaaatatctgttgagtaaatatctacatgatattctgctgctgggtatgggtcaattcctaaattacgaagttcttttaacgattctcttctctgaatttctaagtcacttaatccaatataatccatataattttaaaattttagaatttttattgcaaaaatacattaaattttcgattattagcaaatagatagaattaaattaagaattaagaattgaagaattaagaattacttccattaaaagttaaaagttgtgttgcccttgcgggcaaacctttgagagtcttgttttgtactcacgtacaacccataccaacacgctccaacgcccatgatgctcgctcggatttagtgaattttagaaattgtaataaaaataaaagtttttaaagttcaactcaacaccataaactaaaaactcaaaactaaaaactaaaaacttttatttttcttcttctgagctttcttctactatataaagaggacgtttcctcacatcattatttattctactaatatattcgccaattattccgattgttattaattgcactcctccaataaacgaaacagaaataatcactgaagtccagcctctaagtggtggagtatgcaaaagataatgagatattaatgcgtaaacaataatacagaaagaaaatacagaaacaacaattccatattgcttgcaaatttcaaaggtcgtgaagaaaaacctgtgatgccatcaattgcaagtttcattagtttactgaaagaatagcctgtttttccactaaagcgagggtctctaacatattctacacatgtttgtttgtagcctatccaagctatttgacctctaagaaacttatttctttctggcatttgtttaagatgattaataatcactctatctattaaacggaaatcgccagtatctaaaggtatttttacttctgtgagtttgtccaatattctataaaataatttatatgctgcttttttaaatatattcactccttttcttgcacttcttttagcataaactaccttataaccttctttgtattttgcatacatttctttaattaattcaggaggatcttgaaggtctccatcaataattgctactgcatcgcctttggaatagtctaatcctgccgaaacagctacttgatgtccaaaattacgactaaaactaatatactgaactgaattatcctttttcgataaatctttaattattgacagagaattatcttttgaaaaatcattaacaaaaataatctcatatgatgagcaaatttctttcaaaactttagttagtctttcatacatttgaggaatatttccttcttcattgtaaattgggacaacaacagatatttccataataattacatgttttgagtttctaataatttagttaagcgaactattttactttgaattttaaagtgaagcacttcgtattcaaatctttccataattttttcgtctgtttcaatttcatttatctgaacaagatctccaagttttaaatcttcaatgttttttctctgattatgaatatcataatgattcattgcataaaagtaaaacatagaactttggtcgtagtcgccatttatatagtttatagtatcatttacaacaatatttcctttcaataaacttttcattagttcagaacgagaataatatgcctgatacagaggatcttcctttggacgatagatatgctttacaatacgcttgtatgggatagagaaaactgcaatataagctacaataattaaaatataaattttagaagtcttatattttaaatttataatccaattgtgaataacataaaatgcagatccaattactaaagcaaaaagaggcattaaaggaagtaggtaccagtgcaatttagtcttggcaataagcaaaaacacatactgcataattgcaatagacatagaaaaaatactaagtcgttttacttgtttatctttaacaaataacgtaaaaataaaagccaaaggaagtatataaaagaaataagtaaaataatttgtttttaaattgttgatgtaataacatttacctccagaattattttcaagaactgtcataaaacgacctcccaattcattttcataaacagccttaaggtatccgccataagatagttctctccctatataatatcctccaacaaaaagaataaaaagtccaattccaatataggttgttttgtcttttaagataggcaataattgttttctaaaaataaggtaaattggaataaaaggaagaggcatcaaagcttgaattccctttgttagagtggcaaaaataagagaaacaaagaaaagtatatagtattttttttctttggtttctgtataaataaagaacaaaagaagataagcaatcataaaaaaacaaagcaaggcatcataatcggcacttcttccactatgataaataaaaaatccccttgagcaaattatcactgaagcagcatagaaacctaagaatggtttttttataactcctgtaagtaaaataataacaactcccatgagcaatattgcaagagcagatggcaatcttactgcaacttcattagctccaaaaaccttgatactcaaagcttgaatccaaatagccaaaggaggttttacgctccaatgatctggcttataatcgtaagttacaacaataggatttttggtttttgtcatttcataagaagaagcagctactctactttcgtcccaggttcttaaaggttgagttcccaaaaatgcaaataaaggatataagcttataagaacaaatatcacaacaagtatccacgtaagttttttgttagagattttcttttccattcacttttgttctaaatgaatttacaaaagtagtaaaataatatttataacaaaatgtgtcaacttttcttaggacgcgacaggctgacgcgtctattgcttcgcagagttcgcaagctcactctacttgcatgggttagttttaaaccacaaaagacacaaaagagcacaaaagttaaaagcgatgcactgaacgtagttgaattgtcgaaagaatttcggtgtttcgacttcgctcaacacccgatattggaatcgctcgacacccgatattcaaataactttatgaactttaaaaacttttaactaattgttttttaattaataatattttttactgttttaatctaattttaaattacaaagataaaaactttttcagttaaaacttagtaaaattgattaaaattaataaaaaaagcccccgataaaggacgagggcaaccttaatgttttcacaacggaataatccttattgtgaattggtttcaaattttgtacgacaaagataatgcttttttttgaaaataaaacaaatattaataaatttgtaaaataattttaatatttgttaatatcatgaaaaaaattctcggattagacttaggtacaaatagcattggttgggcgttggttaatgaatcagaaacagaaaacgaacaatcatctattgtaaaacttggagttagagtaaatcctctaactgttgatgaaataagcaattttgaaaaaggaaaaagcattactacaaatgcagaaagaactttaaagcgtggagcaagacgtaatttgcaacgttataaacttcgtagagaaaatctaatagaaattcttagagagaataaaataatagcagacaaaactattctttccgaagatggcaaagatacgactcaccaaactcttaaactgcgagcaaaagcagcaaaagaaaaagtttctttagaagaatttgctaaaatattgctgttgattaataaaaaacgtggctacaaaagtaatcgaaaagctcaatcaagcgacgaaggacaacttattgacggaatggctgttgcaaaagaactttatgaaaaagacattacacctggagaattttcatataatttgcttaaaaatggtaaaaataatctacctgacttctatcgctctgatttacaaatggagtttgatagaatatggaaattccaacataagttttatccagaaattttgactgatgatttaaaaaacaatttaaaaaacaaagccaaaaaagacacttgggctatttgtcaaaaaccttttaacatcgttggtattaaacgtaacactaaaggtgctgaacaaaaattagaaaactataaatggcgaaaagatgctcttacaaaacaattagaactcgaagaattggcaattgtcctacaagaaatcaatggacaaacaaatagttcaagtaactatcttggcgatattagcgaccgaagcaaagaattgtatttcaacaaccaaaccgtaggtgaatatcaaatggcacagttggtagcaaatcgacaccaaagccttaaaaatcaagttttttatcgccaagattatttagatgaatttgaaaaaatttgggaaacacaagcaattcatcacaaagagcttactcctgaactaaaaaaagagattagagatgttgtaatattctatcaacgtccactaaaatcacaaaaaggcttactttcattttgcgaatttgaaagtaaagaaattgaaatattaattaatggagtaaagaaaaagaaaactacaggactacgtgtttgcccaaaatcttcgcctctttttcaagaatttagaatttggcaagtattaaacaacattgaagtaaaaggcgttacaaagaaaaacaaaaataatatagagccaactcttttcgaagataacttcaatgaaaaaaaacttatccagaaagtgcaacgtcctctagagcaagaagaaaaagaattattagcagaaagactcatgctctgcgataaaatgactaaaaatcaaatgctaacagcactaggcttaaataattacgacatgaacttcaaagaaataaaaggcaatacaacttttgcaaaattatttcaagcctataaagaaattgctgaaatagttggatatgacaaagataaaatcaaaaacttagaagatataaatattattttcaaagatttaggaataaagactgattttctttcttttaactctgaattagatagaaaagagttgcaacaacaatctctttataaactttggcatttactatattcttacgaaagcgacaattctgcaacaggaaacgaaagtcttataagaaaaatttcggaactatgtggaatgcctgaagattatgctaaaattctggcaaatatagttttcgaaagtgattattctagcctttctgctaaagctataggcaaaattcttccacatttaaaagatggacttcaatatgatgtagcttgcgaatatgctggctatcgccattctaaaagctcactaacaaaagaagaattagaaaacaaaaaactaaaagatagacttgaaattttgccgaaaaacagcttacgaaaccctgttgttgaaaagattctaaatcaaatggttaacgtagtaaatgaagtaattgatacttatggcaaacctgacgaaataagaatcgaaatagcgagagagttgaaaaaatctgccaaagagcgagaagaaatgactcaacaaataaataaagccacaaatgctcataaagcatataaagatattttagaaaaagagtttggactaacaaacgtaagtcgaaacgatattattagatacaaactttatttagaactcgaagacaatggctacaaaacactatattcaaacacatatattcctcgcgaaaaactttttagcaaagaatttgatattgaacacattatccctcaagctaaactttttgatgactcattttcaaataaaactattgaaaaacgtagcgtaaatatcgaaaaaagcaatatgactgcattagattatgtagcctcaaaagatgctaactcgctatctgaatataagttaagagtagaaaaacttcataaatcaggtcaaatcagtaagactaaatacaacaaactcttaatgtctgaggcagaaatcccaagcggttttataaatagagacttacgagatactcaatacatagcaaagaaagcccgagagatgttaaatgagctagtaaaatttgttgtaccaactacaggtacaattacagctcgtttacgtgaagattggcagttgattgatataatgcaagaactcaactgggataaatatgatcaacaaggactcacaatgttttacaatgataaagatggaagacaaattggcagaattattgactggtctaaacgcaacgaccaccgccaccacgcaatggatgccctcacagtagcatttactaaacatagctttattcaatatctaaacaatttgaacgcaagagttcaaaaaggaatagacgaatattttgacttagatatggtagaattatctgacttgcctaaagaagaacgttctgcaacaatttatgctattgaaaaaaaatatttgcatcgtgacaaaaatggaaaacttcgctttaacccacctataccattaaatgaatttcgagctgaagcaaaaaaccatttagaaaacattttgatttctattaaagcaaaaaacaaagttgtaacacaaaatacgaatattacaaaaaaattgagcggaaaaaataagaaaacacaacttacaccacgcggacaactccatttagatactgtttatggcagttatcaaaaacccattataaaagaagaacaaattaatggtagtttcgatgaaagcaaaataaaaactgtaacaaacaatagttttagagaagctttactaaaacgattacaagagtttgacaatgatcctaaaaaagcatttactggtaaaaactctccatctaataatcctatatttgttgacaaagaaaaaacattacaaataccaaataaagtaaaaactttgacttttgaaaccgaatacaccatacgtaaagcaattgatcctgatttacgtattgataaagttgtagatacaggaataaaagagatattagaaaaacgtcttgctgaatttgataacgaccctaaaaaggcttttgtaaatttagatgaaaatcctatttatcttaataaagaaaaaggaattacaattaaaagagtctcgataaaaggtattagtaacgccattgctctacgtgacaagcgtgacaaagatggcaattttatacttaacgaaaatggtgagaaacaagctatagattttgtaaatacggggaataatcatcatgttgcaatttataaaaaaccaaaattaaatagaaaaggagaagttcaattagacgataaaggcgaacaagtttacgaattagaagaagttgttgtatctttctttgaagctgtaacacgtgtaaatctaggacaaccaattatagataaagagtacaaacaagatgaaggctggcaattcctatttacaatgaaacaaaacgaatattttgtatttccaaacgaaaaaactggttttaacccaaacgatatagatctgctaaacccagaaaactataatattataagtcctaatttgtttagagtacagaaaatttcaacaaaaaactatatgtttagacatcatttagaaaccaatgtcaatgaaactaaagaacttagagatataacttggaaaaatatacattcaactcaaaatcttgtaaatattataaaagttagggtaaaccatattggtcaaattgaagctgtaggggaatattaaaaataaaaatatgataaaaaaaactctctattttggcaatcctgcatatttaagtttgaaaaacaaacaattagtaatcaagatgccagaggtagaaaaaactgaattacctgatagcattaaagaaagtgctattgttactgtcccaatagaagacactggagtagtagtgcttgataataaacaaattactattactcatggtgctatggaagctttattagaaaataatgttgctttaataacttgcgacaataatcatttaccagttggcttaatgctccctctctgtggcaacactacacaaaacgagcgttttactaaacaaattgaagcttctgttcctctaaaaaaacaactttggcaacaaactgttcagcaaaaaattttaaatcaagctgctgtattaaagtcagttacgggctgtgaagttggcaatatgatgcgttgggcaaaagatgttcgtagtggcgaccccgacaatcttgaaggacgagctgctgtttattattggcgtaatctttttcctgatattccaaatttcacacgtgaacgcgaaggcatgtcgcccaataatttacttaactatggctatgctattttgagagccgttattgctcgaagtcttgtttcaagcggacttttgcccacacttggcatttatcatcacaatcgttacaatgcttattgccttgcagacgatataatggaaccatatcgcccttacgttgacaaacttgtgatagaacttatgtcaagcggaatagattgctcggaaattacaaaagaaatcaaacaagaattattacaaatcccaactcttgaagtaataattggtaaaaaacgcagtcccttaatgattgcttctacacaaactactgcatctctttataaatgttttactggtgaacttagacgagtggcttatccagttttagaacttaatggcaaaaatggatagatttagcgagtatagaattatgtggattttagtattatttgacttaccaactgaaacaaaaaaagaacgtgctgctgcttcaaagtttcgcaagcaactaattgaagatggttttaatatgtttcagttttctatttatactcgtcattgtgcaagtcgcgaaaatgctgaagttcatatcaaacgtgtaagaagatttataccagagcaaggcacagtaagcatactttgtattactgacaaacaatttggaaatatggaaattttctatggcaaaaaagagaaagaacctccatcgggctggcaacaattaaaacttttttagaaaagaaaaacttatattataaaaaacaaaatcccgatttttggtcgggattttttatttctaaaacagtctgtaagtttctgatttttagtacgatacccatatcgtactgtttcagaccacaaagatacaaaattttgaaaccaattcacaactaatggcattttgtaaaatcaagggcggtgactgtttcagaccacaaagatacaaaattttgaaaccaattcacaacctactccgagtgctaacaaggctatcacaactgtttcagaccacaaagatacaaaattttgaaaccaattcacaacttgtaattttagttgagtattttcaacttactgtttcagaccacaaagatacaaaattttgaaaccaattcacaaccaagcattgccttttcagagcacaataagtactgtttcagaccacaaagatacaaaattttgaaaccaattcacaacccaatttgtccgttgttacaaacaaatgaactgtttcagaccacaaagatacaaaattttgaaaccaattcacaacaagaacaaaattaacaatacgatatttaaaactgtttcagaccacaaagatacaaaattttgaaaccaattcacaacattgaccaagaaaaatttgattctcttgtactgtttcagaccacaaagatacaaaattttgaaaccaattcacaactcgttaattaaaatgtcataaatgtctctactgtttcagaccacaaagatacaaaattttgaaaccaattcacaactttagctcggttgtgatttccgtttcgagactgtttcagaccacaaagatacaaaattttgaaaccaattcacaacttataaccaactaacataaaaaaagcatgactgtttcagaccacaaagatacaaaattttgaaaccaattcacaacacgattgtttatattatcaataaaataaacaactgtttcagaccacaaagatacaaaattttgaaaccaattcacaacagttggtctattcgtttattttctaagttgactgtttcagaccacaaagatacaaaattttgaaaccaattcacaacggctcatcaaatgcattacaaatttgtgctactgtttcagaccacaaagatacaaaattttgaaaccaattcacaacatattaactgtttggataatttttttatttactgtttcagaccacaaagata

SEQ ID NO: 2418 - DNA, 14059 bp, synthetic construct
  misc_feature 1..14059: note = Synthetic
  source 1..14059: mol_type = other DNA
ccgtatgttcgagagcctcggtgtgatgacaaagaaggaactggaggctcgcaacgaagtgaagtgggaaacctacaccaagaagattcagattgaagctcgtgtgcttggcgacctctccatgaaccacataattcctgtcgccaccagctatcagagccaactcttgaggaacgttgagcgcatatcgggtgtgttcccaaaggagaaggccagccaactgaatgcgcgcaacctcaagctcatcgaggagatagcagagcgcacagccaccatcgaaacacaggtggaggagcttgtcgaggcccgcaaggttgccaacaagattgcagacgagtggcctctgcccaagtaccgcgaactgttgttcatcaggtaagtctaacacctaaaactttatatcaaagggaaccaagcaaacttggttcccttttcttatgactttcttttccggggaagcaaagctggaggaggcccgtaatcggaagggaacccactaaggagggagccagcccagagcaaaacggcacggcagaaggccaaaaagacgaaaaaaacgagcgggaaagaaaaaaaggaggcgaaatatttggctgagacaaagatacttggcatctttgcattagaataaaaggacctaccgccccaaagcgacaagcgagctgcacgcggaaggataggccctaccgcccagcacgcagcctgcagaaggagaggccctaccgaagagacaggaatcagaataaatagaaaatctcaaataaaaaaagaaatgcaaatatctaagttcaacgcccgcaagatcaacgccggaaagacgtccagccattgggggaaggatttcctcaccagcctgctgggcaccaccttgtctatcgtactgactttcggcacctcggcgctgctggagcacaagatgaaggccgacatccagcgacagaccgccatgatggtgattcacgacatcgacgcgtccgtggaattggtggaagatatcgccaactacgaagacgagaagaaccaagccgtgcagtacgtcctggcgcatctggaccagatagacgcattgcccgccgacacgctggcgctggcgctgaagatgattgccgacaccgatggcgacaacaccatcttcgacgactccaaggagaagatattcaatagcagccaggatatctggagcaatctggataatatggcatttgtggacaatatggagcggttctaccgcgagaggagttatctccagaaccagattgccctggacccgatttttgtggaacccatcaccttcgacgaatacagccagatgaaatacaactccccggtaagcgaccactcactcgactatgctgccatcctgaaagagaaactcatggagccgcgggtcaggtttcatatcgactattcaatgagcagggcacgggcgtatcgctcctttgcacagcgatggagggacatcagcgaccgcaacaaattcatcatgaatatcgatgacgcagaactggctgagtatatcaaggatagccagcggagtggcgagcccgtgggcaggcgtgaactcatcggacaatgggagcgcaaggtgaacgggggagatgactactattgcgaatacctgcaaaacgactctttccgccaggagttgcgggagcactacagcaatgtgttctacgatggcgatatccactggacaataaaaagcggggggacttggcacatcaagggcgacacgctgttcatggttaatgatcctcagtcgtcggaagtgctggtagatcggtccggcgtcacctaccgccccgaaatgcgggactccgtggagaatttcatcagcagatacttcgacgagaagagggcgacagaaaggttgaggaaggaactcgagatccatccccggatagatacaatctacgcaacgaccaacaagaagcacgacaagctggaaatgatcgtgggccgcgaccagaacggcagcgtgacttgccgttacctgaagcgcaggagcggcgggagcgcgtctgacaaatgacttcctcacacgttgaaaacgaaatgattggcctgcgcgcgtactaccataattgttatcgcgaaggaggcgacagcggctggctgcacaacaacctcaaccagatgaaaggcgcgcccgagccacatcagatcaccgcacgctggacgttccgcgagcaatgggaccccgaagcgcgaattcgcgagctctggaacgtgctggcttattaaccgaaccgccgaaaatcgcggttccatcgccgattaaaaagaaaaattcacctggaattcatcgtgaattcatcgtgaattcatcaagacttcactaaatttcacttgggactttactaaatttcacttgagactttaccaaattttaccaaagtccacaaacccgacggattcatcggggttctctatgtccgccaaagtcctcgcaaatcgcgggaagcagccggttcaatccacgacacgctgataagctaaacgctcgtcgccattggccagatagatgatgccgcagtaggcgaaaccgtgccgggtcatgaggtgctgcatgatgaggttgtcgcggtgggtgtcgatgcggaggtttcggtcgcgggagaaacagaaatccatgatgctgccgaagacgccgcggacctccggatagctggcgatgcgatgcaccacgtggtagggttgttcatcgtccagccatgctcccccgtagatcttctcataggtcggttcgggagagggaaggaacgcgaagtagccaacgagccggccgtcgtcctccaccacgaagccaccttgcacattcatatcattccggatggcggcctcggacggatagcctgccacccattggtgcatgttccccgattgacgcataatctgccgggcggcatccatcactgccatgatttcggccatattctcaggccgtgcttctcgaattgtccgttgcatagtgctggtggattgtgttcttattggaggatgacttccatggtcgtcttctgaacccccatccccattttccgatagaagctcagggccggttcgttcccctcccagacgttcaaggtgatgttgtgacatccgatggaacctgcaaatttgagcacatgatcgtacagcgcggtgccgacgtgtttgccgcgtgcctgctcgtccacacagatatcatcgatgtacagcgacttcgcatcttgcagcagaccgtggtctttcacctccgtgatctggcagaacgcgtaacccagcacctgcccatcgtcgaagacgaacacaggacgcgtttcatcctgcagcagggcctccagctcctgctccgtgtatttcgtcgtgtggggtttgaataagtcggggcgaatccggtaatgcaccatattcacttggtgcaacaattcaatcatgcgcccgatgtcttgcttttctgcctttctaatcatggccttgcgtgtttattatatgttctgattgctatttcgggcacaaaattacgcaaaatccatcagaaaagcgcgccgcggacacacattcaatgcgaaaccgccttcttttcgacgattttttgtacttttgcgccaagaatcaaacatccgcacaagcattatgagaagattgttcgttgcagccctcgtcgctgccctgtcctgtatcacggcaaatgcccagactgccctgaagaaagtctatgatgaagaaatcaatcccctgcagcagatagaccaagcggtggccaaagcccgcgccaagagtaagttcgtcgtctgtcaggtgggaggaaactggtgtccttggtgcctccgttttgccgatttcatcgagaaagacaccaccatcagccgcgtcattgccgacaatttcatctatgcccacgtgaactacaatccccgcaagtcccaggggacagaaaagcaagagcagggccgcgcgctgatgcaacggctgaacaaccccgcccgcttcggctttcccgtgtttgtggtgttagacacccacgggcgtgtccttcatattcaggattccagtttcctggaggaaggtcagggttataacccccagcgcgtcctccgattcttcaagagctggacgccagaggctgtgggaaagtgagacgggacgcgtaatttgctaatagagaacaacatgagcatacaagaatttcgtgactatatggcatcgggcaagcccgtcatcggcggctctgaagtccacatgatgtttcatcaactctcgcaggaagcgttgcggataactgccgaaatcaatggaagctaccacacacccgaggagctgcacacattgctggagcggctttgggggcgcgaagtgccagagacggtagggatgttccctcccttccacaccgactgcggcaagaacaccatcgtggccggacacgtgttcatcaatatgggttgcaagttccaggaccaaggcggcatcaccatcgacgagggcgcactcatcggacacaacgtcgtcctggccaccatcaaccacgacctggacccggccaagcggcagagcatgacctacgcgcccattcacatcggcaagaacgtatggatcggagcaaatgcaacagtcctcgcaggagtaacgataggcgatggagctgtagttgctgctggcgccgtggtcacaaaagacgtggagccaaacacaatcgtcggcggcgtgcccgccaaggttatcaagaagatagaggtatagacgataaaccggaagttgacgttccgattcttcctgtaatcatcaaccgaacttcccaattcccctcatcggccccaatgatttggtcctacgatgtgattttcaactcaaaagcatattatggaaaagagaaaacaaaaagcccccgttagaggacgagggcaggaacctgaatgtcttcacaacggaataatccttattgtgaattgctgaaattcggtacaaaagtagcacttcttgagcgtccagacaaacttttcccttcttttttgcttgtgaacaattcttttttgctatttttgcaccaaaatcatacaaaatagccacatgaaacgcatcttaggacttgatttaggtactaccagcattggctgggctctggtaaatgaagcagaaaacgagcaggagcaatcctccatcatccgattgggagtgagagtagtcccgctgaccgtcgacgagcagacgaatttcgagaagggcaagagtattaccaccaacgcagaccgcacgcttaaacgcagtatgcgtcggaatctccaacgctacaaactacgtcgcaccttcttgatttctacgctgaaggaagccggcatcatcacggacgacactattctcacggaagcaggtccccgctcgaccttcgagaccctccgggcacgggccaaggccgccagtgaagaggtaacactaccggaattggcccgcatacttctgatgattaacaagaaacgcggctataagagcagtcggaaagccaagtctgccgaggaaggaacactgattgatggtatggaagtggcaaggcttctccacgatcagcacctcactccaggccaatatgcctatacccttcttcgtgatggcaaaaagtatatcccggacttctatcgctcagacttaatggaagaaatggatgctgtctggtcattccagcaaacatttcactcagatgttctcacggacgacttttaccagcagctgcaaaacaagtccaagacccaaaccaccaagatattcctcgcgaagtatggtatctacacggcagaaaacaagggagcagaccgccggcttcagcaatatcgctggcgcgaggaagccctcaaaagacaactgacacgggaggaactggcttacgtaatagcagacatcagcggagcaatcacaggcagtagcggttatcttggagagatcagcgatcgttccaaggaactctttttcaaccagcagaccatcggacaatacatccttcagcatctggatgccgacccacattatagcttgaagaagcagaccttctaccggcaggactacttggacgaattcgaccgcatctgggaaacacaggctcggttccatcatgagctgacgccagaactgagaaaaacggtccgagactgcatcatcttctaccagcgcccactcaagagcaaaaaagcgatgctggacatttgcactttcgagcgccgacagattgaggtcacggaggaaggaaaaacaaggaaaaagactattggcctcaaggtttgtcccaagtcttcccccctttttcaggagttcaaggtttggcagatactgaataacctgcaagtggaatacgaggacacaagcctggacttattcgccacgaccgaaaagcgccgcttccttgacctcgaggaaaaggaactactggcacgcgaactgacctacaaagaaaaactctctaagcgcgaagtcctgactctactcttcggcaaggctgccaagaaatatgaccttaattataaagagatagagggcaaccggacactcaccatactttaccgggctttcctcgacatcgtcagccgctccggacaccacgaatacgatataaacaaactccatgctcaagagttagaggaagtcgtcggccaagtcttttccactctgggcatcaatagcgaaatccttcacttcgactccgaattggaaggtcacgctttcgaccggcagccgctctaccgactatggcacctgctgtactcatacgagggcgacaactccaagacaggaaacgagtcgctgattgccagactgcaagagctatgccactgcgaacgggagtacgcacagatcttggcgaacgtaaccttccaggaagactacgggagtctcagttctaaagccatgcgcaagatccttccgttcatgaaagccggtcatgattatagtgaagcttgcgagtacgcaggctataggcattccgagcgttcccgcacgaaggaagaattggcagaactcacatactctgaccgccttgagctgcttccacgcaacaccctacgcaatcccgtcgttgagaagattctcaaccagatgattaacgtggtcaatgccatctgtgaggaatacgggaagcccgatgaggttcgcatagagctggcacgcgaactgaagaagaatgccaaggaacgcgaggccatgacccaggccatcaacgaagccaacacccagaacgagaaataccgcagcacactcgaaagcgagttcggcatccagcatgtcagccgcaacgacatcctgcgctatcgcctctatctggaactaaaggacaatggcttcaagaccctctactccggcacctacattcccaaggaaaaactgttcagcaaggacttcgacatcgagcacatcattccgcaggcacgtctcttcgacgactcattctccaataagacattggaagcgcgcgacatcaatatcgagaagagcaacgccacagcctacgactatatcctcaacaaatggggtgagcagagagctgcagaatacaagaatacgattgatgacctctacaaacagggcaccatcagcaaggcaaaacacgacaagctgctcatgcgcgaggcagacatccccgaaggattcattgaccgcgaccttcgcaactcgcaatacattgccaagaaggcacgtgagatattggaagacttggtgccgcaggtcatccccaccgtcggcagcatcaccgaccgcttgcgtgaagactggcagctcgtagacatcatgcaggaactgaattgggacaagtatgaccggttgggactcacagagacttatcaggacaaagacggtcgcacgatccggcgtatcaaggactggaccaagcgcaatgaccatcgccaccacgccatggacgcgctgaccatcgctttcacgcaacccgctttcattcaatatctcaacaacctgaatgcccgcagcgacaagagtggaagtatctatgggattgagcagcgttgcctctaccgcgacagccacggcaaacttcgtttccgtgcacctatgccactcgacctgttccgtgccgaagccagacgacagctcgaagacatcctcatatccatcaaggccaagaacaaggtgatgacgcagaatgtcaacaagagcaaggtcaaaggaggaagccggaagaaggtgcagctgacgccccgcgggcagttacacaacgaaaccatctatggtcacacacgccaccgcgtctgtgaagaagtgaaagtggacggcaagatgacaccggagcgcgccctgctcattgcgaagaaagtctttcgcgaagccgtgctcgcgcggctcgcacaattcgacaacgaccccaagaaagcatttacgggcaagaactcacccgagaagaatcccatctggctcaacgggcaacacgcggaacaagtgcctcctaaagtcaagttggtttacttcgaggactactaccccatccgcaaacctatcagccccgacctcaaggtggacaaagtcatcgatgcgggtatccgacgcatcttgcttgcccgattggaggaatttaatggcgacccgaaaaaggcatttgccgacctggaggagaatccaatttatttaaataaggaaaaaggcatcaccatcaagagcgtgcgtatccgcggagtcctcagtgccattccgctgcacgaagccaaggaccacttcggccgaccaatcacagatgactctggccggaggcgccctgtggactacgtgcagacagccagcacccaccacattgcagtctaccgcgatgccgctggcaatctgcaggatgtcgccgtatctttcctcgaagcgacaacacgcaaggcgctgggcatccctgtagtagatacagaatataatgcagcagaaggatggcacttcctcttctccatgaaacagaacgaatacttcatcttccctgatttagaacatggatttgacccacaggccattgacttgttcgacccgaaaaacaaggcagagataagcaagcatctctacagggtgcagaagatgtcaaagacggaaggaggacgtgattatttcttcagacatcacttagagacgtccgtagaggacaacaaagaactgaaaggtattgcatttaagagaattaaatcactatcatcccttgaaggcatcgtcaaagtccgcgtcaaccacctgggcgacatactttcagtaaaagaaaactaacaattcgaatctgagcctgcatgtgcaggctcttttaatatccttaactatctatgattaagaaaaccctttgcttctccaaccctgcctacctcagcctgcgcaacggacaactggtaatccagattccagacatcgagaagaacgactccgtgacgccagagttcaagaagatgaacgagcgcaccctgcccatcgaggacatcggcgtggtggtgcttgacaacaaacgcatcaccattaccacgggagtcatggaagcactcctggagaacaacgcggctgtcatcacctgcgacagccgcagcatgcccgtgggactgttgctgccactctatggcaacacattgcagaatgagcgcttccgcgatcagctggaagcctcactccccctgcgcaaacaactgtggcagcagaccatccgccagaagattgccaaccaggaagtggtgctccgccgcaacacggacgccgagacccgatgcatgaaagtatgggtggacgacgtgcgcagcggcgatgccgacaacctcgaggcacgtgcggcagcatactactggcgcaacctttttccgcagattcctaacttcgtacggggacgggagggcgaaccgcccaacaacctcctcaactatggatatgccatcctgcgcgctgtcttagcacgggcgctcgtaagcacaggtctcctaccgactctgggcattcatcaccacaaccgctacaacgcctactgccttgcggatgacatcatggaaccctatcgaccttacgtcgacgagctgatcatcaagataatgcggaagcatgctgattattccgagctgacacgcgaattgaaggccgagctgctgactatacctgtcctcgacgtcaccatcgagggcaagcgcagtccactgatgattgcagcctcacagaccaccgcctctctctacaaatgtttcagcggtgaactgcgcaaactcagctatcctcagatggaattgtaatgcgctatgatgattgacgatacctctcgcttcagccaataccgggttatgtggattctcgtattctttgacctcccaaccgataccaagaaggaacgcaaggcagcagccaagttccgcaaggacttgatgggcgatggcttcacaatgttccagttctccatctacatccgccattgcgccagccgggaaaatatggaagtgcacatgaagcgggttcgagcactcctgccggaatacggaaaagttggcatcttgggaatcacagacaaacaatttgctgaaatacagctcttctacggactgaaggagactgcgccctctactcccggccaacaactggaactcttttaagcatcatctttggatagcggattccgtcttctaaggcagaatccgctatcattccatcattctttttttatttctaatctttgacgtaaatctttgtattataccatcttacgcacatcgtggtgtttataatggttcaaagataaagaatttcaagcaattcacaacggaaaatacggtgtggaaggcatggtcgaaggtgtttataatggttcaaagataaagaatttcaagcaattcacaaccgtttacttgtttcagcccgtagcagatggggtgtttataatggttcaaagataaagaatttcaagcaattcacaacctgaataacgatttctccgtctctatatgggtgtttataatggttcaaagataaagaatttcaagcaattcacaaccggaaccttatcctcataatggatataagcggtgtttataatggttcaaagataaagaatttcaagcaattcacaaccagggacggcggcggggcgggttacctggaggtgtttataatggttcaaagataaagaatttcaagcaattcacaactctattacctccaggcttataccggaggcgggtgtttataatggttcaaagataaagaatttcaagcaattcacaacggaagtggagaacatctttggcgggcacgtggtgtttataatggttcaaagataaagaatttcaagcaattcacaacgtgactttctggacttcaccgagtcgtacaggtgtttataatggttcaaagataaagaatttcaagcaattcacaacttttatgggtgtattatgtcgtactccaaaggtgtttataatggttcaaagataaagaatttcaagcaattcacaactacctcccgaaatcccataccggcagaggggtgtttataatggttcaaagataaagaatttcaagcaattcacaacgcgtcacggctattggcttgcggtctttcgggtgtttataatggttcaaagataaagaatttcaagcaattcacaacagcgccaccccttctacgaatcgtcctgcaggtgtttataatggttcaaagataaagaatttcaagcaattcacaacacgtccagatgcgtgtcgctgtgtgcgcctggtgtttataatggttcaaagataaagaatttcaagcaattcacaacatgcgagcacttattcaccaagccgaaaaggtgtttatgatggttcaaagatgaaaaattgcaagcaattcacgaccataatcggtgatatatgcaagggaaaagggaagaaagtgagaaaatggcattaattttataacttttctctcaaaaaacttgcataatggtattaaaagtattacctttgcatcgtctaacaataaggacagcgaataatgaaacgctacaaggttaaagaagtcatcaggctgctggaagaagatggttggtacctcgtcaccacagtcggcgaccaccgccagttcaagcaccccacgaagaaaggccgcgtgacggtaaggggccagcagagcgaagtcctcagtcaatttctcttgaactgcatctggaagcaagcggggtggaaatagccccgcacttccgatcaaatataaaagtcatccaaagaatcatagaatcatggaaaagattattgttaatgtgtcgtggtgcggcaagaacttcggcgcatccttcagcgaaaacgtgccaggtgctgccgtctttacggccaagacttttgatgagctccagcgccaggctcaggagaccttggacttccaccttcagggatatgccgaagacggcgaagctcctcagtggtggcttgaccacgactatgagtttgagtacaatttcctcgatgctgccacgttgctccacatctacagccccgacctcaccctggccgccatcagccgtgccacaggcatcaaccagacgcagctcagccactatgccaacggcgtgaagacccctcgcccggcacagcgccagcgcatcgtagatgggctgcatgccatcgggcgccgcctcatggctgtccgttagttcttattgtttgacagcatcgggaacgataacagccgcgcggccagcctccttccgtttggggctgaccgttttcttgtttcatcagatgtcccggaactcctcgatggcttcgaagcaggagcactccttgatgcgttcccggctatcgacgcggccgttgtggttgcggggtgtttatgatggcttaaagatgaagaaattcaatcatttcacaaaaaagatgatactacagaatgtcaaagagcttctattgtcggttaagacgctgcaaatataggaaaaaatatggcgggaatgaaataaaatgcgagaaaaagtaagtgaataagggaaatagttcaaaaaagggcgcgttgcgctgaaaaacgttgaataaagcaatgtttttaagatagcacaagacggaaggtcagggcaatagcccacacagcgccctccgattcttcaagagatggacgccaaaagctgtgggaaagcgcatagttcaaataaatctaccggccaagccgctatatggatatccgtgcagtccatcctcaggctcgacatatggtgtcgcaccacctgccggatggggtcggatggggcggatggggcggcgatttttcgaaagttcctgtgtgcgcgtacgtgaacaattttgcatcgaaaataaaagttcctgcgcgcgtgtgcgtgaagtattaaaaaagtgccgacccatccgacccatccgccccatcggtctatgtgcgcgctgcgctctttgatctctgaaatgtttgttttcccaaaaaatctcctcatctccttcaaaacaaggtaacagtctgacagataagcggataaattgaaggagatggtgaaggagatgcgaaggagataaggagatggcaaaggaaatgtgaaggaaataaggagattcacggaggagatgcggcaagcaatgactgaaaaatttggctgtccagaaaacaatgactccctttgacgcagaaaaggagaccacggtcttctctttgacgccccttgggtcgtcaagcaaaagatgcagatgtatcggccgaaagagcctgatgtttcctttgacgtcccttgggtcgtcaagcatcatggcctgaggtagaagcggtcacggcctgaagcagaggcggacacggcctgaggtagaggcggacatggcctgacgttgaggcggacacggcctgaagaagaggcgatcatggcctgaaatagaggcgatcatggcctgaaatagaggcggtcacggcttacatgctgaaaatgaagatgggagattatatatctattcgagtttcgcaagtatgtcaacagtcagtaagagagcgccccgcaggggccgtgagatgtcagcccagggtatcgccctgggtagcggattacagccatatacgcgccctgtaagggcaaaagaatggtcatcagatataaatcttttgcccttacagggcgaaattcac

SEQ ID NO: 2419 - DNA, 14054 bp, synthetic construct
  source 1..14054: mol_type = other DNA
  misc_feature 1..14054: note = Synthetic
atatgttgtgatggtgaggtgttgaggtgttgagatatgttgtgatggtgaggtgttgaggtgttgagatatgttgtgatggtgaggtggtgaggtgttgagagatgttgtgatggtgaagtggtgagatgttgagagatgtactattgtcaccatctcaccacaacaccacctcaacatggaattctcaccacctcaacatctcaccacaacaccacctcaacatggaattctcaccacctcaacatctcaccacaacaccatctcaccacctcaacatcacaccacctcaacatttatattcatacttcacttcggcgagctccttgttcgccttttctatcttctcgcccaagccggccttgtactgtgccatcttctcagcgatgctgtcgtcgcagagcgcaatcatctcgcaagcgagtatggcagcgttcatggctccgttcacgcctactgtcgcaacgggaatgcctgggggcatctgtatgatggagagcatagcatcgagtccgtcgagcatacccttgataggcacaccgatgacgggcagggtggtgcttgcagcgataacgcctggcagagctgctgccatgcctgctgcggcgatgattaccttaacgccacgcgccttagcgcctttagcgaatttttctactgcgtccggtgtgcgatgagcagagagggcgttcacctcaaacggtacctgcatgtcgttcaagaacttgcatgccttttccataacgggcaggtcggatgtgctgcccatgatgatgctaactaatggagtcataatattttattgtttattgttattatctttttttttctttttctaagccgaactaagcctctttaggcctttttaagcctttgctaactaagcctctctacgccttggcttaggtagggcctaagaaggcttagttcggcttattcttagaggagtctaagaagggttgggaggggctacagccccaatatcacagcaaaggcgataaccacgcctacgccgaagccggcaatcacctgcgagagggtgtgctggcgcagtatgatgcggctggtgccgacgagtccggcgagcacgagggtgagacatagccacgagatagggttgaacatgaagatgaacgagaaggcgagcagtgcgccaaccacgcccccgatggctgcggtgtgtgtggacaccttccaccacacgttgatgagcgagcatactatctgtatcacgagtgccgccatgagtatgttgcccatgaagtggggtatgttgtacaggcgcatcacgtagaagcaggcgtagtagctcacgatggagagcagatagggcaccacgcggcgctccttacggctgagctgtatgagtgtccagccgtgatagttgcggtagagttttatgagcagggtgggcatgaggatagtgaagaagtacaccattgcgagcacactgagcttgtacccccacggcatctggctgagatagctgaacgtgaagagtaccgtcataccgacaaacgatagatagaacggggtgaacaccgcgctgaggacgcgggctacgaggattatgttcttttctttcattgtttaattcttcctaagccttgctacgggtatgcccaactgttcgcgatacttcgctacggtgcgtcgtgcgatagggtagccgagttttgcgagtgccgctctgagggcgtcgtcgctgagtggttttgtcttattctctttgctcacaaggtccttcagtgcgagctttatcttgcgtgtagacatctcttcgccgtcgtcggtggtgtagccgtcgctgaagaagaagcgcagtgggaatgtgccccagttggtctgtgcgtacttcacgttgctcacgcgcgagatggtgcttatgtcgagtcccgtgcggtcggctatgttcttcagaatcatcggcttgaggtcagcctcgtcgccgtcctggaagaacttgcgctgccagtcgatgatggcttgcatggtgagtgtgagcgtgcggtagcgttgctttatggcttcgatgtagcccatggcacgttccaccttctgtttggcgtagagcagagcctccttttcgcggcgcgacatggtgtccttgttgttgcgataggtctccatgagttcgctgaacgacgacgagacacgcagctcgggtatgttaccattattaatatagaacgagatgttgccgttgtcgtcggtgtcgacgatgaagtcgggcgttatctgttgcacgtttctgccttctgtctcgccgagcgatgctccgggcttggggttcagtcggcgtagttcgtcgcagacgcgcttgttggtgtactcgtcgatagcgagcagcgagccgatcttgtcgaagtgtttcttcgtgaactcgtcgaagtgttcgctgatgacggctctcataagtggtttcagctggtcgtcggggcggcgttctatctgtagcagcagacactcctgcagcgagtgtgcaccgatgcctgccgggtcgaaggtctgcagtatgccgatgatgcggtcgatgtcgctcacctcgcagtagatgccatggtagatggtcagctcgtcgcatatcgactggctgtccttgcgtagcagtccgtcgctatcgagcgagccgatgacgtattccattatctgctcgtcggttttggagaggtctatctcgcccatctgctccttcagcttgtcgtagaacgagcgtgtgtcgccgtacaccatctcctcgtagtcggcggagtcggcaccggatgctccggtgtaggcagctgtcggcatatcctcgtcggagcctgtcatgcggtcgagtgcgttgttcagtgccgactcgcgttcctcgcgctccgtatgtgcagcgaaagcgtcagcctcgctcttctcgtcgtcgatgtcgctgctgctgtcgctgctgtcgtggtcggcagagggtgtgtatgtggagctgtctgtgctgtcgttgtcgaagatttcttcgtcggctttcacgagggcagggttgtcatcgagctccgcgttcacgttctcttcgagttcggtgagcggcatctcgagcatgtgtacctgcagcatctgttgttgcgacagacgctgcacctgctgcagcttttgttcctgggtttgtattagtttcatcgttttcttcttttttctaagccttggggtagtaagccgaactaagcctttttaggcctttctaagccttggggtagtaagccgaactaagcctttttaggcctttctaagcctttggggtagtaagccgagctaagcctttttaggcctttctaagccttagggtagtaagccgaactaagcctttttaggtctttctaagccaaggcgtaaagaggcttagaaaggcttagttcggcttaggcgcagccatagaagtactccttgagcctctccgcagttgttgtcagcacctcgggtgcctcgttgctatacttctgccataggcgttgcgcctcgtcgttgagtggcgagtggggtagtggttcgcgctttagtatggggtcgaacgtttggtatatcttcagcacctctaccacctcttcgggtttcagccccatgaggtgtgccgtgtcctgtacctcaggtgtctcgctgaccatggtgttggtcatcagttggaagtagaggcaaaggataatggtgagcatcaccggcgttagcttctctgtgggtgctacgggcagatagtcgtgctcgaagggttgtgtcaggtcaatgccgttgtagaaggtgctgcctgctccgaagcccgtcatctgtctgaggcgcttcacatcgcgtgacaagcggcgtgggttgtcggcgtacgtgtcccataggcgttgcagcgagggagtggtgcgctctttcagtgcctccatctgctcctgcagagtctttggcggtatgtgcagttcgagtgccaactccaccaccgaacgcgagtactccgacttaacgcctgccggactcttctggtagagctgcatgatgagcagccagtagtcgtcggtccaaagaggatgaattgccatatatatattattaataatgtattatttcgtgattgcaaagttacagaaagtcttgcacataaggcacgccaatcgtggttttcttgcaaattaatagtataaatagccaagttgattgaattttttaaaatattcttgcaaaacattagcgatttacaattaattttgtacttttgcggtagataaattaaaaaataaatgactatgaagaaaactttactctctatggcagcaatgttgctgctcgcaactggtgcttcggcacagaagttggaccttactgttgcaggtaaggcaaatgtagatagccgttttaataagtttgagcaggtagctgcgccaaaggctaacggtatgaagaagttaaaggaaggtgataaattgctgggcttcccttgttctgcaactcctgttgcatatgttggatggccaaaggtgcctgatgctgcaagtgctgcttctcagctgatgcttgacgaaagttggtatggttataatgttattggtatccgttatcttctcttgggttctttgggtgaaaatactaaagaagctcctgttggtgtatatgtttggggtattcctgaaagtggaaaacaggaggatcttttggctgctgaaaagctgttgaatgaaggcgattatgaactttctgtatttagggatcagcagctgacagaaaactggaatgaaacatatttcgacgaaccatttgaactttcagataaaacagtagctttgcgttatggttttatgtatgttcaagatacaaatgatgatgatgagaatcttgcagctgctccgttcttaatgggtaagtttggtgacgatgaggaattcccagatccaaacagcggaaatgctcctttccttgtgtttggaacatttgataagaaacaagattggtacctatattcagcttccgactatccttatgccctctgtgttcaggttatagtaagaaccccgaatggtgagacagctatccttggtgtagatgcttcaggcaaggcttatgagaagcagtactactctctcgacggcaagcagctctctgctcctcagaagggcatcaacgttgttaagatgagcgacggcacatctaagaaggtgcttgttaagtaaatatctgaaaacacatataaatgaaaatcccaacggaggttcgcctctgttgggatttttttttagggggtgcacttgtctccgctcggcttcgccgcttgccagagcaagaagtgcaccaaccgagcagaaatgcactaaccgagcagaactgcacaatttactttgttgagggtgtgtcaaaactaaaatatttggcaaattgaatagcaaacggttctaatcgtaggaggctacggcattcctgccgtagccattagtaactgaaatacaactgtttgcaatgactacggcaagaatgccgtagtctcctacagttagccattcatcacaattctatagttttgacacaccctcccctgatcctggaaagtcccgagtaagccccgggaattacatagccaagatcaatggtgttcatcgtgaggtgatgtgttggcatctcctttccacaacccatgcaggttgcaatactcgcgagctgatacctctttggcatctgttaggaagattacctctggcttctcgcctggctgtagctcatggcgaagtacatcggtaggagtgagcaactctatccattggatataatgctctgggagcatcggatgctctacgcttccaacttttacacgatagccgccctcgattggttctataacgggcacatgcttctcttttgccgcatccgtggtattctccttcatcagtttcatgggctgaccgcagcagctgagcatggctccaggattcactacctctaccacgttgccacaaaccgtgcaacggtagatttctcttgttttagtcataatcgttcctcctaaaattttgaaatttaaatgacgtctttattctttgacgattataaagatactcgttttctgtgagttacacaaattttagagccttttttattccaaaataaagttaaagcttgtagatattcacttgcgaaactttagtaaccgaaggttttcgttaagccagataagcagagctaagtttacttaagctttgccatggcgagaaaatgtgtttgtgaaatgtaacaatctacaccttagaccgagggttgagtgttggaaaaggcatacaagcatggtgcgctcacgaaaggcaacatcaacaaaagaggttacaataagtttttatccatggatggtgaagtgaaggtagccatcaactatgaccgtattgccgacgactccaaatgggacggcctaaaaggatatctcacaaatacggatataccaatacaggatgtatacacagcataccacaacctttggcacgtagaacgggctttccgtatagccaaatcaaagatagagatacgtcccatgtttcactttacacgcaaacgcatcgaggctcatatatgcatctgctttgtggctttgaaagtgtacaaagaattggaacgtatgctgaaagtctcagagattaagatgagtgtagacaaggtgcttgcattagcaaagaccatcacaaccatacaaattaaactacctctgaacaaggaggtttacacccaaacaatgctgatggcaagacatcagaaaatcgccaaactctttgatgaagatttttggggtacgcaatgacgaagtcaggaaagagccgcaaaccccttggagtagcgggttccttcagccttcaggtcgtaagagtcggagaagtatcggttattctgcttgtcgtaccatttgcgtcttctgacgatcagatcaatacctttgtcgcggatcgggaagtcacgtatggttacggcttcacagaaccctttggattcaatctcagggttctctttatattaagccttaaccgattcgtcaagatagatgcggctaagggatgcctcttcttctacacgtactacttcaaaatttgtaagtatttctgatggcaggattaactgtgccaatgctaatagtccttgattattcattgcacaaaggtataaattttctatagaatcaaaaagctttccccctagatatatcgggtgagccgtctccgctgcaccaaccaagcaataattttacttgattgttatttgctgtgaagtcatccttagaaattgatcatgtttttatgtatagaaacaaaaagcccaccgttaaggacgatgggcgaacctaatgttttcacaacggaataatccttattgtgatttgctcagatttatatggcaaagatacataaaagaagattatcaaccaaacattttaatagaaatgtttgtctaatcgtttttttatgtatatatttgccaatagcattttatttttagatatttaataacctaaacctttaatatagcaataaatcatgaagaaaatattaggccttgatttaggaacgacaagtataggttgggctcttgtcaaggaagcagaaatcgaagaagagaaatcgtcaattataaaactcggtgtacgtgtaaatcctttgactgtcgacgagcaatcgaactttgaaaaaggtaaagccattacaacaaatgcagaccgcactcttaaacgtacggcacgacgtaatttgcagcgttacaaattgcgtcgtgagaatctgttgtctgtattaaaagagcatggatttattaccgacgactccgttctatgtgaacaaggaaaccgtacaactttcgagactcgtttgctaagatctaaagccgctacagagaaaatctcgttagaggaacttgcacgtgtgtttataatgattaacaagaagcgtggttataaaagtagtcgaaaagttaactctggtgaagaaggcagtcttattgatggtatgacggtggctcgcaaactctatgatgaacaccttactcctggtcaatatgtttatcaattgttatgcgaaggcaagaaatatattcccgacttctatccttcagacctcgatgcagagtttgaagcggtgtggaattgtcagaaacaattctatgcagagatattcacggatgaactgcgagaagctttgcgtagcaagaacgaaaagcagacatgggcaatatgtgcagaacctttaggcctgaaaggcatcaagcgcaacggaagtactgcagatcagcgtgtagagaattatcgttggcgtacagaagctatcagcaaacagatgccacttgagcaagtcgctgttgtgcttcagaagataaatggtcagattgcaggaacaagcggataccttggcgcaataagcgaccgtagcaaggagttgtacttcaatcatcagactgtcggacagtttcagatgaagcaattgagtgataatccgaataccagtttgaagaatcaggtgttctatcgtcaggattatcttgacgaatttgaacgcatttgggagacacaggccaagtatcatagccagcttactgcagacttgaaacatgaactgcgcgatattgttatcttctatcagcgtcctttgaaatcgcagaaaggacttgtcaactattgtgagtttgaaagcagacaaaaagaagttgttgtcgacggcaagaagaaaactataaatatcggtttgcgtgtttgtccgaagtcatcgccattattccaatgtttcaagatatggcaagcaataaacaatctgcaagttacaggagaggtagtccccaaggcacaactcgacctttttggtgacacaaccgaatgtgagcatggcacacgcacgcttacagaagaagagaagtgcgacttgtatcgcgaattgagcataaaagagagtctgtctgaaacagagattataaagttgctgttcggtagcaagaaaggattgagccttaacttccgcaaagttgaaggcaatcgaacaatgtctttatttgtcaaggcttgccagacagtgcttgttatcaatggttacaacgattatgatttctcaaagcagccttatgataaggcaatgcagattataacacaagtttttgaagctttaggtttcaacacaagtttcttgacattcgacccgactcttgatggcaaggactttgaacgtcaaaccgcttatcagctttggcatctgctttactcgtactctggcgacaattcggcaaccggcaacgaaaagcttattgaaagactctgcgccattcttaatatgaacagaaattctgctgccgtatttgcatcgataactttcgagccagactatggtagtcttagtgctaaggctatgcgtaggatattgcctcacatgatggacgggttagagtatagtgtggcttgcgagtatgcaggctatcgtcactctcgccgttcgctcacaaaggaggagatagccgcaaagtctctcgttgacactattccactcctgccacgcaacagtttgcgcaaccccgtggtggagaagattctcaaccaaatgataaatgtggtgaattccgtcagcgacagatatggcaagcccgatgagatacgtattgagatggctcgcgaactgaagaagaatgccaatgaacgtgaacagatgacgcgcgacatagcacgggcaaatgctgaaaacgagaaataccggaagattttgcaggagaagttcaataaaccgaatgtcagtcgtaacgacataatacgctatcgtctatatctcgaactggaggcaaatggcttcaagaccttgtatactcagacatatataccacgcgagaaacttttcagcaaggaatttgacatcgagcacataattccacaggctcgtctgtttgacgactcgttctctaataagactcttgaggcacgcagtgcgaatatagagaaaggcagcacgactgcctacgactatgtgcttgcaaaatacggagagcaaggggacaatggatccgttaaatacaaggaacgcatagacagtctttataaggagggcgtgataagcaagacaaagcacgataagctgctgatgaccacagcagaaatacctgacggctttatcaaccgtgacttgcgcgacacacaatatatagcacgcaaggcacgcgagatattggagagtgcggtgcgtgtggtagtccctacaacaggagctgtaaccgaccgattgcgtgaagactggcagcttgtagatgttatgaaagagctcaactgggacaaatatgatcagctcggactaacagaaacctataaagaccctgacggacgccagatacgacgcataaaggattggactaaacgcaacgaccatcgccatcatgccatggatgcgcttacgatagctttcacacgtcatagcttcatacagtatctgaacaatctgaatgcacgtagcgacaaggctggcagcatatatgctatagagaaaaaagaactctaccgcgacaataacaataagttgcgtttcgtccctcctatgccacttggtgagttcagagccgaggctcgtcgccatttgaaagatgtgttcgtgtctatcaaggctaaaaacaaggtggttacacgcaacgtaaacataactcgtggtgctgacggcaagaagcatcgtactgtgcagcttaccccacgcggtcagttgcacaacgagactatatacggtagtcgacgccgatacgtagtgaagcaagaaaaagtgagcagtgcgtttaacgaggaaaaaatcagcactataggcaatccacagatacgagaagcgttgttacgtcggcttgcagagttcggtggtgatgcaaagaaagcattcacaggcaagaacagtcttgagaaaaattcaatctatctcgatgatagccatacgaagcaagtgccacagaaggttaaaacggtaacattagaagaggtgtttacaatccgtaagccgatagacaaagacctcaatgtagagaaggttgtagaccatcgtgtacgaaagcttctgcaagaacgcctcgcagaatacggaggagatgccaagaaagcgtttgcaaaccttgacgagaacccgatatggctcaaccgcgaacgtggaattgccattaagcgtgtaacgatatacggcgtaagcaacgctactgcattacacgacaagcgagacatgcatggaaagaagatgctcgatagtaatggcatatccataccgatagactatgtgagcaccagcaacaaccatcatgtagccatattccgagacaaagatggcaatctgcaggaacatattgtgtcgttctttgaggcaacggaacgggcacaacagcagttgccgattgtcgactacgaatacaacaagcatcttggatggcagttcttgttcacaatgaaacgcaacgaatacttcgtatttccgaacgggaagacaggctttgacccgaatgaggttgacttgcttgatccgaacaatgctgtggagataagcaagaacctgttcagagtgcagaagttatctacaaagaactactgtttcaggcatcatttggaaacatctgtagaaactcctaaagagttgtctggtattacatacaagtggcaacttggtctgaaaggtattgttggcatcgtgaaggtccgtgtcaaccatcttggagagattgtcgctgtaggcgaatactgacaacgttgtcacgccaaacgagtatagcaagctgagtttgcctatgctcgtttggcgagacaatacacaatatcaatactaaccaaccaataaagcaacaccctatgattaagaaaactctttattttggcaacccagcgtatctttcattacgaatggggcaaatggtcattaaactgccggaagtggaaactgacagcaatttgcccgaccaaataaaaaaacaggcagaaataacaaagcccatagaagatattggagttgttgtgcttgacaaccgacgcatcacaatcactcaagggctacttgagtctctgctcgaaaacaactgtgccgtcatcacctgcgattcacatagtctgcccgtaggtcttatgcttccactttatggcaactccacacaaaacgagcgtttccgtgaccagttggatgcttctcagccattgaagaaacaactttggcagcagacaataaaaatgaaaatcagcaatcaggcagctgtccttgctacatgcacttgcaaaaactcaccaacaatgctacgttgggctgacgatgtgcgcagtggagatccggataatgtcgaagggcatgctgcagcatattattggaagaacttatttgtcggtattgatggtttggaagactttacacgaagtagagaaggcgaagcaccaaacaatctactgaattacggatatgccatattgcgtgctattgttgcacgtgcattggtgtcaagcggaatgttaccgaccttcggcatccaccatcataatcgctataacgcctattgcctcgctgacgatattatggaaccctatcgtccttatgtagacgagctcgtatactctatagtaaaagacaaggggataaacaatctcgatttgtctaaagaggtaaaagcccaattgctatcaatacccacattagatgtcgtgataggtggcaagcgcagtccgctaatggtggctgttacccaaaccacagcatctctatacaaatgctttacgggtgaattgcgacgcatcgcataccctgtacgctaaactaaattataattttgcaatgaatcgttttagtgaatatcgagttatgtggatacttgtgttttttgatttgcctacagaaacaaagaaagacataaaagaatacaccatgttcagaaagcggttgcaacaagatggcttcaccatgtttcagttctccatttatgtacgccattgcgcaagtatggagaatgcagaggtccacatgaagcgtgtcaactcttttcttcctgaatacggaaaggtcggaataatgtgcataacagacaagcagtttggaaacattaagcttttttatggcaaaaaggcacaaactccgaatgctccaggtcaacaattagagcttttctaactatcgttctttgttaaaagtattaatcaccctataaaatagaaaaagaggtcttcttaaaatttgaagaagacctctttctgacaccaactttttataattctaagaactatgctaattcgcttatttacaagtaaatgcgcattctatgttggtgattctaccgcaaaggtagttaattctgagcaaatcacaacttatacttatcttaaggggaatgcaaaactgttggtgattctaccgcaaaggtagttaattctgagcaaatcacaacgggtgtcagcgaactattgtcgtctcattgttggtgattctaccgcaaaggtagttaattctgagcaaatcacaacggacacgcttccgacctctaccacagaagagttggtgattctaccgcaaaggtagttaattctgagcaaatcacaacgggcgcgatagcacatcgataatgtcctgcgttggtgattctaccgcaaaggtagttaattctgagcaaatcacaacgctttccgcttggttccatctgctgccatagttggtgattctaccgcaaaggtagttaattctgagcaaatcacaactggcgtttgtctgtccgataattttgcgcagttggtgattctaccgcaaaggtagttaattctgagcaaatcacaactatgtaattggcgttacttttttctctttagttggtgattctaccgcaaaggtagttaattctgagcaaatcacaactatggggcgcacacaaagagcacaaagcaggttggtgattctaccgcaaaggtagttaattctgagcaaatcacaacacgctggatgcttgttcttattgttgttcgttggtgattctaccgcaaaggtagttaattctgagcaaatcacaactatataggtaaaatagaaaaagcccacaagttggtgattctaccgcaaaggtagttaattctgagcaaatcacaacataaa

SEQ ID NO: 2420 - DNA, 13894 bp, synthetic construct
  source 1..13894: mol_type = other DNA
  misc_feature 1..13894: note = Synthetic
aaccatagccggcgagtacaacaagattttcagtaaataaaaaccttttttaacgcttttcaaaaagtattcaaaaacctttcaaaaacatattaaactatgagaaaacagttatttttagacgaaaaccctataatctcattaaaaccataacttttataatataatattaatgtcgtatatataaaaataaaaggaatatattaaaaaaataaaaagggtgctaaattaaaacacccttttcaaatacattatataagtatgataaacagtttgcgaggttatatgcctaacattacgccaaaggcaaatgggtataagtccttattgtatgaatccttgaatatcggcgtaagagcatgcgttacataaagcgtccaaccataaacctcaacacctaaaaaagcgtcccatttgaaagaattgaagtctttgaaagacgttcccgtcgattgctcaactttttcgccattgactttatatgaatatctatatcccgtacttgaattgcgaacatttactccgcacacagcaccggcatgcaccgtaaaatgcttaaaaggatgataatttatcattatcggaaatgttatatagttggcacataaactgaatttctcatcagatatattgccttgcggaataacacctgtaaaaacatcggtcaaaggctcatcaaatctaaatacattactttgaaaacctataccaatagaaggccagacagggatagaatttactttgaaattaaagttcaacataatatcccacttgttagaccatttagtggaataattatcgcttggagttgaaaacaaactgctgtttgatgtactccaaccggtataaccataaccaaatcccaacgttgcatatatttcccaatcggatagtttagatttggagttctttttaatggctttttgaacatcattatctataatattttccaagaaactacccgtaccaatcgtagaaattatgaaattgtgccattgtccgtcagagtaagttgagatactcataagcctacgcaaagttccttcgttaagagttttatcttggcgttctatacgaagtgtatcagcacagacaaacaaagtatcatcgcgaaaagcgggtttttcctcgttatacaaataatctaaatcaccgcttatgacttgatagatgtaactcatatttgtggcgttggcatgattttgtgcctgttgtttggaaatgacagatatattgcccaccaaacgtttggtctctccctgagggataatcattacatcgcccgtatcatttgtattagaatagatacgaagagtatccgtcccaaaatcttgcgcatttacattcgcagcaaataatgtaatgattagcatacttaatacttttaattttcttttcatttttttattggttttaagttatttccaactattctattatgttttttcactttttataagtcaatatcgagagttgtaaaatctaaaattcctttgttagttacaaattagttgcttttagcgattattatggtctcctcttctctgtcgccgaaattagctaaaattctcttagatataggattgtttttaagttttgctatattttcaaagctttgtttggctttgtttgccagttcgtccaaattggttttctctctgatgaatttaagaatatcaggtctttctttttgcgatggttcttgcgtttcggtggtttctattatcacaaaactatcggtactttcctctattgtatgagtgttttgtgcaatcaaatcctcagttatcggctcaattatagtagttgtcggctcatcaatataagtgtttgtgtcagtatctacgttgttttgagcaatatcgtcaaaaaaagacgtggtttgtggagcagtcaaagaagtatctgcatcaatcacttcgagggttggtgtagttgctgaattagtgtgagtgattactgaattagtgtgggacaccggtaaattagtgtttaacactgctgaattagtgtgagtgattatttgagcggtgtgagatactaccgaattagttggtgaagaggtctcaatttttggtgaagtcttggcgatttgtacaggttgtttggtggaataaaatgcttttattccgatgattaaagtaagggctgctgccgttgccgttacccatttgatatatttgcttataacgatgatgctcgggcgtttggttttggctatatcatacaacgattgcttgtcatcaaagaccattgtcggcttgtctatcgttatattgctgtcatataggtcaagtttttgcttatcttccttatgaacgagaagatatgcttccacttgctgcttttcacttgccgtaagattgccttcggcatagtcaaaaagtattgcgtctatattttctttgtttattatcataattttattccttactatctttgttattcgcttttgagagatttcaattttattttcgctctaaaaatatttacctttacattggcttcgcttatgtgcaatatgtcggatatttccttgattgaaaaaccttgccaatcctttaatatcaaacattgttgcattgtttgcggcagttgcttcaaaagataatccaccatttgctcgttttccaaattgtttttctctatctgttgttcaaacttcgcttcctgcctgacttttttgtatcgcaaagcgtttaacatcttgttgtgagccgttgtaaaaagccaactttttgctttttgattatctacttttgctctgttctcccaaagacttatgaacgtgtcctgaacaatatcctttgcctcgtccgtatcctgcatattcttggcaagataacgtaaaacgtcgtcggagaaattgtcaatatgtcgtttgaagtctctttcagtcattctaaaaatgcttgctttacaattaaaacccttttgtatgggtaaaagttacaaatgatacttaaaaaaatgaaaaaaagccttacacgttcattaaaaacatataagaccaaaacaattaatcaccaaataaatttcttctcacaataacgaaacctatcaaatgatactgattacaaaagaccttcattctcatttttcttatgcgttaaaagtgtatcagtatatggtttcgctgaaaaataaacctctgttactcttattaaagcagcagaggttttaattatatcatttaatcaataatgtcgaagcctgtatatttttgcaagcactgaggaatttttattccgtcctttgtttggttgttttccaacagtgctgcaacaactcttggcagtgctaacgccgaaccgttcaatgtatggcaaagttgcatcttaccattgtcgtctttgtagcgaactttcaatctgtttgcctgataactttcgaagttcgataccgaagaaacttccaaccaacgtttttgtgctgcggaatacacttcaaaatcaaatgtcaaagcagaagtaaaacttatatcacccccgcaaagacgcaatatcctatatggcaaccccaatttgtccaacaatcctcctacatgctttttcataacttccaattgctcgtaggaatgttccggactgtcgatgcagacgatttccaccttatcaaactgatgcagacggttcaatccccttacgtctttaccgtaagaaccggcttcacgacggaaacactgagaataagcacagcgacgaataggaaaatcctttttatccacaatcgtatctctgaatatattggtaacaggtacttctgccgttggaatcatatagaaattgtccgccgttacaacatacatctgtgcttccttgtcaggtaactgtcccgttgctatggcagatgcttcattgaccattaaaggcggctgaatttccatatatccgtcgttttcgccttcttgcaaaaagaaattaatcaatgctctctgcaatttggcacctttacccttatacacaggaaaacctgcccctgttattttgttacctaaatcaaaatcgactatatcatattttttgcacaaatcccaatgtggcaaacaatcctcactcatctgtggaatagtaccaataatcgccacaacctcattatcttcttcgccctttccgttaggaacgctttggtgcggaagattaggtatggaaagcaataggtttttgatttgcgtttcaagtgaagaatgtttttcttgaagttctttctcggttgctttaagtgttgaggtttgagcctttttattttctgcttcttctttgttgccttgtttgaagagcatacctatttccttggcaatagcattttgtttttgtttgttatcgtccaattgtttttgaatatcacgacgtaaattgtccaagtcaagtagtttttcaatgctctcttgcggcgtcttaaaattctttacctttaatctctcgattacaaggtctttgttatcacgtataaaattaagttgtaacataactatattatatttaatgttcttttcgctcccaagaaacgaaaagtaacctctatgatttacgacttgcaaaattacgattttttattttaatatcatttttttaatatcatttatcgtcttaacggtgttaaacactaataaaataatgttaaacattggtaaattagtgttaaacatcagtaaaatgatatgtagcactattttcctcttttggcggacaaaatgcccgataagtgtcattatggcatttaattgactattattcaattttttaactgacaaaatggcaaaataaatacgtggtatcaaaattgtaaatactcctacgaagcgtttgagaagcgacaaacaaaaaagcaacgcagaggcttcaaacagtagaatagaaaaaacaattaaaaaataggaggaaaaaattatgttaccagtaatgagaaacaacagttatttaccagaattattcaatgatttctttggtttggattatggtaaagaatttagagaaacaatgccaaaaatcaacgttattgaaaacgaaaaagagtatcgaatcgatatggcagtggcaggtgctgtaaaagaaaacttttcggtaagtttggaaaaggaaaatgttcttagcgtaaagtttgaacaaaaacaccaatccgaagaagaaaacaaagaagagaaatatttgcgaaaagaattttcttattcaaagtttgaaaagagtttcgtaatccctgacaacgttgcaaaggagaatatctcggcaaaagcagagaacggcatcttgtcaatatctcttccaaaacatgaagtaaaacccgaattggaaaataaacaaatccaaatcgcataacctacgccaacaaaacttttagacatagttattttataaacacaatgcgattaaatgtcctatacccataggaaactaacaaaacaaacaagcacactcattaatcgcaagccccaatcaaattcaccatgtattttgattggggctttaattatgcttattgtctgaggttttagttttgtgaggtgtattttgtataaaatttttgcaatgttttattgtattttgcgtttatttccaaaaaacaaaactacaatgaatattgaaatcataaatatcggcgatgagttgttgattggtcaggtggtcaataccaattgttcttttatggcaaaggaacttaacaacatcggtataaatgttaaatacatcactgtcattaacgatgacgaaaaagagatagaaaaaagtattattttggcattgcaacgtgctgacggcgtacttatcaccggcggtttgggaccgaccaaagacgatatgaccaaacactgtttgaatgctatgtttggcggcactcttgtcgaaaacaaaagtgtgagcgaccacgtccgccgtttctttgaggctcgaaaccttccttacacctcaaccaatcattctcaggctatggttcccgattgttgcgagattatcttcaatcatttcggcactgctccgggaatggtcttcaagagtaaagaattgtttgagggcaaaccaaaacttgtcatctcacttccgggcgttccattcgagatgcaagagatgtttaacgacgtaaaacaaatccttatcgaccattatcgtcctcaaaccataatacataaatccataatccttagtggaatcagcgagagctttctttccgataaacttttgaactttgaaaatcatcttgcggacttgaacaaacaaaatccggagcgttgtttttcgcttgcatacttgccggatgcgggaatgatgaaactacgtttaagtttgcacggcggacaaagagcgattgaagaaacggaatttgagcaggtatattcgatgctgcgaaaagagacttccgcatattttgtatgcgaagaagacaagaatatagcccaaattatcggacaaatcctaaccgccaaaaaccaaagccttgcttcggcagagagttgtacgggcggcaatattgctcatacaataacgttaaattcgggagcgtctgcgtatttcaagggtggcgttgtcgcttattgtaacgagataaagaataaagttttgggcgttgagcaaaatgttttggacacttttggggcagtgagtgagcagacggcaaaacagatggcacaaggcgttttgaaattatacgacacagattttgctattgccacaaccggtcttgcaggtcccaatagcgacggttcaaccaatgaagtgggtacggtgtatattgcaatcgcaacaaaaaatggcgaaacaatagtaaagaaaacgtgctacaaaacctcgcgttccaatttcatttcccgagttaccactttcgctttaacggaattactaagcgttataagataaatatttattaccaaaatagtattaaacatcagtaaaatagtgttaaacattattcgattagtgtttaacactaattttgtgattacacatcatataaaaataaacaataaaaaatgctcaccgttgaaggacgatgagctgacctgatgttttcacaacggaataatccttattgtgatttactaaaatccgtgctgcaaaaatacataatttatttataataataacattttcaactaaatttttataattttgcagtaattaaattaaaaaataatcattatgaaaaagattttaggtcttgatttaggcacaagtagtataggctgggcgttagtaaatgaaaaagaaacaaacgatgaacaatcttcgataataaaattaggtgttcgcatcgttcctgtcgaacaagaggagaaaacgaagtttgaagagggcaagccaataaccaccaatgccaatagaacattgaaccgcggtatgcgtcgtaatcttcaacgttataaactaaggcgaagcaaccttaaagatattcttaaaaaagaaggttggattaatgataaaaccatactatgtgaaagcggcaatgatacaacctatcaaacatataggctaagagccaaagccgcaacagaagaaatatcgttggaagaatttgccaaagtgcttttgatgattaacaaaaagcgtgggtataaaagcaatcgaaagaccaaagcagaggacgaaggcacggctatcgatagtatagaaatcacacaacaaatgtatgacaacaatcttacggttggcgaatatgttaataatttgctacaaaaaggcgaaaagaatataccgacattttaccgttccgatttggttgcggagtttgagaaaatatggaacaaacaaaaagaattttatcctgctgtcttaaccgacgatacaaagaagaaattgaacgagacggcaaagtttggagcgtatcaagaagtttttggcattgagggtaatgttaaagaaaaaggttgggaattaaaagaaaagacctatcaatggaggagtttggctgtaaaagaacagataggcttagaacaattggcagttgttttacaagcaataaatggagatataaggaaatcgtccggtcttttggctcaaatcagtgacagaagcaaagagctacacattgagaatatcactatcggacaatataaattgcgagaattggaaaacaatccgaattgcagccttagaaacagaaccttttataggcaggattacttggacgaatttgaaaagatttggacaaagcaagctcaatatcacaaagaactaaccgatgaattgaaaaagaaaatcagagatgaggttattttttatcaacgcccgttaaaatcgcaaaaaggactgataagcatttgtgaatttgagaatagaaaaatagaagtaaatggaaaagataaaattgtaggcttgcgcggttgcccgaaatcttctcctttattccaagagtttaaaatttggcagaagattaacgatttggaggtaacgcgaaaattacaggtaacagacaaacaggacgagtctcaattgagtctgtttgaagacaatgacagtaaatccaaaacaaaagaaagaaccgtatatgaacatccgattctttcaatggaggaaaagaacaaactgttcaatgaattgcaatataaagaaaaactcaccaaaacacaaatcctaaaactgctgtatgaaacggataaaggttacgaccttaatttcaaagaaatccaaggtaacacaacctttgcagcattgttcaaagtatataaaagtattgttgtggcaagcggttatgatgaaaaacaattcgataaacaggatattgaaatgaatttaaacactattaaaacggtgtttaacactaataaaatagtgtcagatattattttcttcgatactgataagcagggaaaggatttctatgagcaacctgcgtacagactatggcatttgttgtattcttatgcaggcgacaactctgtatcgggtgatgatagtttgatagaaaaacttaaagaaacttttggttttgatgatgcggcagcgagagccttgtcgaatatttcatttaagtcggattatagcagtttaagtgcaaaggctgttcgtaatatcctttattctatgaaaaaagacggcttacaatacaatgaggcttgcgagatggcaggctatcgccattctaaaaactcactgaccaaggaagagattgagaataaagttttggtggataaattagaactgctaccgaaaaacagtttgcgaaatcctgttgtggagaaaattctcaatcaaatgattaatgtggtaaataatgtgtccgatacttacggcaaacccgatgaaattcgtattgaattggctcgtgaattaaaggcaaatgccgaagaaagagacagaatgactaaaaacattactactgccacaaaagcgagagaagaatataaagaaatattaaaacaaccgcctttcaatattgccaatccgagccgtaacgatattttaagatataggctgtatgaggaattggtggaaaatggatacaaaaccttgtattcaaacacgtgtatccgcagggagaaattgtttggcaaggaatttgatattgaacatataattccgcaggctttgttgtacgacgattctttcgcgaacaaaactcttgaattaagaaacataaatattgaaaaaggtaagaagaccgcatacgatttcgtggcagaaaaatatggcgaagacggcatcacgcaatatgaaaacaaaatcaactccttggtcgaaaaaggtgcaatatcaaagattaaaggaaaaaatcttttaatgaaagtatctgagattgaaggcggatttattgaaagggatttgagagaaacacaatatatttccaagaaagcaaagaatattttggaagattttgttaagaccgttgtcgcaacagggggtcaaattacggacaaattgcgtagcgattggggacttgccggtattatgaaagaactaaacgttccaaaatacaaaaaggctgacgaaaacaaagtgcattatgaaataagaagcgatggtcatagcgaacttgttatagacggttggacaaagcgtaacgaccaccgccaccatgctatggatgctttgactgttgctttcactacacgaagccatatacaatatcttaacactcttcacagtcaaaattcatacaaagaatttgaagatataatagacaataataaccataaaaaactattgccgtctattcctattgatgtacttcgtagcgaagcaaaacaccatttggaaaatatattggtttcgtatccgagcaaaggcaaagtcgtttcaaaacatatcaataagactaaaaacaagaacgcaaaacctcaaattactcttactccgcgtgggcaactgcacaatgagactgtttatggtacggctaaaagatacaagacttgcgaagaaaaggttaatgctgcttttgacgaaaacaaaatctcaacagtagcaaaaaaagaatacagagaagccttgcttaaacgcttacacaaatatggcaacgattctaagaaagcctttacaggaaagaacgctttatcaaaaaatcctatttacttagacgaattgcaaaacaaatgtattcccgaaaaagtcaagactgtcgtacttgaaaaagtttatactcaaaggagggatattaataaagatttgacacaaaaacatattgataaagtattggatacaaaagtaagagaaatactcaatactcgtttgaaagaatacgacggcgatgccaaacaagcctttgccaatcttgacgaaaaccctatttggtttaataaagaaaaaggtgttgccattaaaagcgttgtcatagaagttaatctcaaccctattgctttacacgacaaacgagataattttggtaatcttatattagataaagacggcaacaaacaaccgtcggattatgtacagccgtacaacgttcatcatgtagaaatttttgaggacgaagaaagtaattatcaagtacgacctgtatattttattgatgctgtaatggctgcaaaaaatggcgacccgattgtaaatactcatcacgagaaaggttggaagtttgttttctcaatgaaacgtaacgattactttgtattccctaatgctgaaacgggttttaatcctaacgaaatagatttaacagaccctgcaaattacgataaaatcagccctaacctttacagagtacagaagttggctgcaacatcaaaagactattggtttcgtaatcatttagaaacaactgtaacaaatgacgtaaaagacgtaacatataaaaacattaagtcgttaaacaaccttaaaggcattgtaaaggttagaataaacaatattggtcaattggaaataccgacaaacaaatgataaaaaagacattgtatttcggcaatccgacatatctttccttaaaactcaatcaattggtgattaaattccccgacgttgagccgaaatcttctaatgaggaggaaggtatgcctcccacaaagccgaaaactcaaccgatagaggacataggtgtaatagttttggacaacaaacgtataacaataacgcaggctttgttggaagcgttacttgataacaattgtgcagtgataacttgcgacagccaacacttacctaccggtcttttactgcctttaagttgtaataccttgcaaagtgagagatttgccgaccagttgtcggcgtctttgcctttgaaaaaacaattgtggcagcagacaatgaaagccaaaatcaacaaccaagcctctgttcttttcaataatacacaccaggaagtgggttgtatgagaaaatgggcggataacgtaaaaagcggtgatgccgataatttggaaggcagggcagccgctttttattggaagacattattcattaattttcctgagttggatggcttcaaaagagatagattcggctttcctcccaataatattttgaattacggttatgcaattcttcgcagcgttgtagcacgttcgttggttgcttcgggattgttgccgactttgggcatacaccaccacaatcgttacaatgcttattgtttggcagacgatattatggagccttatcgtccttttgtggataatttggtttataaaataattttgagacaaggtgcagacaatttagaaatgaacaaagatattatgacacaattactatcaattcccacacttgacgttaaaatcgagggcaagcgcagtcctttaatggttgccgcaagtcaaacgactgcgtctttatataaatgtttcagcggtgagataagacgcatatcttatcctgaattatgatggacaaaataagcgaatacagggttatgtgggtattagtgtttttcgatttgcctaccgagaccaaagcggacaagcagcgttatgttaagtttcgcaaaaatcttcttcttgacggcttcactctttttcaattttctatctacatacgtcattgtgcgagtatggaaaatgcagaagtacatatcaagcgagtaaattcctttctccccgaatacggtaatgttgccataatgtgcgtaacggacaaacaattcgcgacaatcaaaattttctacggtcgtaagccacttcctcccgacagccccggtatgcaattggaattgttttgatttttaatagaagtatattgaattttgtgttcaataaaggcggggtattgatttgcgaaggcgggttgtcgtccgcaatagcactaacttgcgttgtgagtagtggaaacgagcgtcacgagtagcactaactcgtgttgtggatatcgcaatccgctatcaatggatatcgcaatccagagcggtggatatcgcaatccatatcataagttagtactaatgcggacgcgagtcagtgctattgcggaaatcagtcagtgctactgcggaaattaacttcaaataaagaaacagaaaatagagactatacattatatatatacgtagaaaataaaaccaaatcgagcaaaaagtttcatctataatttccctaaacgttttaatgaccgatttgcggttatatcataatatcgttacagtgatattctaatattattagtttatgtaacgatattttcagtttgttcttcaaatattgtctttttttgttcaagttctctttttttgagtcaaaatcctacttttttgttcagaaaatatcatttagagtcccaaatttgggcgttttttaggttgaattttacttttttaggttgggatttctttattttttgattagaatttagtttatattgttcggtataggataaatattttggtcattttagtttgtatcctgcggttaagtcgcttgaattttcaattcaaaaaagtctgataacttactattttgtagtagattaccagacttctgttgtttttgcaaatgcaaagttacggattttagagcaaatcacaacaacgtgctaaatttttagcacttgaatctagttgtttttgcaaatgcaaagttacggattttagagcaaatcacaactattaaactttaatgaggcttttaaaaaaggttgtttttgcaaatgcaaagttacggattttagagcaaatcacaaccggtcaacatctatcttatcaatattgcgagttgtttttgcaaatgcaaagttacggattttagagcaaatcacaactggcgaacttcgggcaacatctatcttatcgttgtttttgcaaatgcaaagttacggattttagagcaaatcacaacaccttcattcttgcaatttgggaaaaaatgttgtttttgcaaatgcaaagttacggattttagagcaaatcacaacggaggaatatatttttaacaactattataggttgtttttgcaaatgcaaagttacggattttagagcaaatcacaacgcagctggcggtggttcttattcttctaatgttgtttttgcaaatgcaaag

SEQ ID NO: 2421 - DNA, 13779 bp, synthetic construct
  misc_feature 1..13779: note = Synthetic
  source 1..13779: mol_type = other DNA
ctttttattttggttaaacatgtttgttgttattcatgcaaaactaatttaagaagacctttttattccctattcagacacactttttgaaacactatcggttaatcttattaccgatagtattctaccccatattgggctttggtaatgccacttataatggcccttcaggagaaaattagaccctacttcttccgttgtgtccgcaagaattttctgcccttccggagtgggaaatggtgcgatcataagagcaaaggcagagacgttatgacaacacctctgcctttggtttttttaatcaaagggttctcctcttactgacactttctgaagtatcggtcaaaccaccgctccgtttgtttatagagtggtttggtgagctctgtgaagagaaattgcggtgagggcatgatggggggcttgtttttgcatagcacaagctcctcttccgatagggctctttcatctccgttgaaactaccccattcgtagtgccaggtataacttccggaagggctatgggaatctaacacatggtaatcgctaaaatcttttgcctcaataatcatggtgcctgtggaaatgatttccataatattgatattgagttgagcttttaccttatcatataccggatagatgatcccctcaatggttgtttctccaatttttacactatcctgactagtaacttcccgctcaatctgtttttgacgggtgttgcctaccgtgaagcttttccagtccactgtgattacttggtcagggttgaaggggagtctctccgcttgttccggggtatagaccttgatgtatttatactttttgtccaacgatcttatatggcgattgatgttactgcgaaatgcctcgtcggatagttcgtagctcttatgtttgtaggggagcatctctaccacaatatggagcatggctactttctctgcgtcattgagtaacttttttgccgcttgatgttgaggtgccatttccagaagtttttccaattcctcaatggctcttttggcatttttacgtcctccagattggtagagggatagggcattctggtagcgctctttcaccgcttcttcctttatgttctccaaggtcgagacactatactcaaagggggttggaattagtttcctggctccgggacaatgcaggatctcatgagccaggtggttggcctgtatcatgtaatcgtaaatggtattccacttctgaatggcggaggaggcctttgtgcgctcaatactttttttaagatcatcgatggccaaggggtaagcctcttttaagacgttgctggccttctcgtgctccggcgcttgtcgtagcctcttggtggcttgtagcgtggcttcatagtagttgcccttcttgagggctgatcttccgctactacaggctcctaaaaagaggcttgtgagtaccagtaggtagagtagatgggttttcatagttcttttgctttctcttaatcacgaatacgcattttgtcaccttcgtttcgtaagatgtaatcaagatattcctggggatatccgggagctttgatgcggtaattctcatctttctcatatccgtcgttgtacttcattaccaaaaagtcacccaactccacatagcttttatgcactttctcgcctatctgagaggagagactggtaagcagttccgtgcgatgtgttgttggaatatccttatagatattccggagaatgactactttgtcaacgatggattgttcaagttcattttgaaccttctggatatcctgcttcatccgttcatacttgatgttggcgaagttggctacaaagttaaaggcccaccaagccgatcttctgtcgtatcgattgatatcccctgtaacgtatggtttcgggagtttggtgactcccataaaaaagggtacgtaacaggtgaagtaggtgtcgtcttcgccaaaccagagggtgcccatgtcatcgggaagttcggcattggcttcagccagaatggaaaaggcgctattgtaggtggagatggggcgctcccaactgtaggttgcactatcggttttaagtaccagaggagggcaacggttgggacttccaaaatctccggcagcaattcctttggtcatatcccaaggggtctcctcatagtggtcgcgcaccatctgcatcacctccctgagggtaagcttgtgatcgggtttgatacagagggggtagcgcttagctcccggctttccacggtgatattccggagagaagtgttgggagggtgcagattcgctaaataggtgccatacgcgtgtggcacagtattttaattcatccgctcctacgggattataggcttcattaaaacggaatggctctcccgattgggggtcgtagtagcctttttcaatggcgaaagagattacattgtcggaatagaggcagttttccggatcatcaaggggaaactcgccgatacgagccatattggcgtgggctgagatcataccatcgggaatccgtacggcaacccagatggccccttcgccaccatcgcccgtgccgaccatctccaaaatccaggcctcgtgtttatcaataatagagaaagattccccttcggcgccatatccatactgctcggccagggaggtcatcaccgtgatggcttcgcgagcagtgcgagcacggagcagggccaacttcatcaagtgccaatactctaaatatttgctgtggttccacaactcttctctccccataaaggtggtttctcccaccgccacctggtgttcgttcatttgaaagccgatcaccttgtaggtgtggggaacctggtggatctttccttcagcaccgctacgggcgacaaaggttaaagagtcgcccggtaggtgatccatggcaggtgtgatctccggagtatagagccactctccatcgttggtatagaccaaaagggtgctcccattagcggaagctcccggtgtaacaataaagttggtacaggcatagctcccaacactccatagcagggtaatgcttagtaaaaaaagggttctcatggttcgataagatttagtggccgccaccctccatcttaaagtggtcatcggtctcctcaacaattcgcttgtaccatgcttctccatatcccggttgagacacgctgggcgctacgtatttgtgattctttggtaactcctttcgaaccttgatgtttccatccatatactttacaaaaagctctcggtaaagggtcttccatgtgtcaaaggtgtgaactgctacctcattgctgtagtccgtaagataatcgattcccatctctttgtgggtgttgtaaagagccgtagcagctttgtcgatggtctttgtatagtcgatatatttgtgctcaaggctcttttgtgccttttgtatctcggggaagatggtgttatagcgtgtataggctaagttggaaacctggttgaagacccagaaggcagcatcgtcgctccactccatgatgcttccattgcccacctcatagacgtgcggtaccttggtgattccgcagtacatgggggtaaagacggtggtagcagcatcatccacaccgaaccaaaagattcctccaatggggttgggtaaccagttgcggctttgtgttacaaaaacaaatccagactgttgtgtagctacggcccgttcgttgcagtaggtggttccgttcactttccatgttaaaggtctccaacggtaggggttctcaaagggaccggcaccaaggtctttggtcatatccaatacggttccttcaaaatggtcgcgcataaagtccatcatctcctccacggtgatcttgtgatccggttcgatccagaggggcatccgtttttttaggttatggccggtggcataatcctcatatttctccattttcttgttgaccttccggaacatactccatacgcgtgcttcgcagaaacgagctcctccaaaatccacaggagcataggtgtcgctgaaactaaactttctgtcttttccattgaagtatttcatttcacgggcaaaggagatcacatcgtctgcgtatacggtagtgatacctttgttgaagatatcctgaatattctttgaggagagggaacttttgttgttgtcgagggggaaggtggtgatgcgtgcctggttggcatgtccagagaccattccgtcggggatcattcgtgcaacccatacggctcctttatggccattccctttgccaatgacctccataatccaaacctcattggggtcggcaatggagaaggattcgccggagctggcataaccgtaggtctccattaactctgccattaccttgatggcttcacgggcattcttagcacgttgcaacgtaacgtatatcagggagccgtagtccatgatcgctcctttctgagagcccagctctttgcgccccccataggtggtttcaccaatggcaagttgatgttcgttcatgttgcccaccacattgtaggtgtgggatacttgcggaatctgtcccatgtatttcccggtatcccactcccaaatgtcgagcatggtgttgggggcccagtctgctgctggccagtagtaaagttccccatacaatacgtggctatcagccgcataggagatcatggtagagccgtcggcagaggctcctttggtaacgaggaagttggtacaggccaagctatttatccataaacctgccacaagaattgtcaataaagagagatgttttttcatattttagtcctttagtatttatgcaattgatcaatatttcacgtgctacaaagctataaaaaatgtcgaaatagggtaggggtttcctcaatttaccgtctcggaacttttgggcaaacccttttagattaccgatcaatagatgggctatgccactctgacttcgacaccgggttaccccagaaggaagggatggcgtgaaattttagcgagagggatgttcgcaattattttgtgagactatcggcctcaacgctttgcaaaccgtttctcgttgtagggggctagcggctaaagagggatggcttcctccagttgattctcctctacccggaggttatcaatgataaagagttgtcgctcaggcgtatttttccccatatagaaggccagaatttctgaaatctgggaagaagattgtaacagtacaggttctaaccgcatcttggggcctataaagtgcttgaactctccgggagagatctctcccaatcctttaaaacgggtgatttccggatttttccctagctttgagatcgcttcaatacgctctttctcagagtaacagtagcgtgtctcttttttgtttcgtacccggaataggggtgtttgtaagatatagatgtgcccacttttgaccaggtcagggtaaaattcgaggaagaaggtgagcagaagaagtcggatatgcatgccgtctacatcggcatcggtggcgatgataatgttgttgtagcgcaggttgtccaacccctcctcgatgttgagagctgtctgaagcaggttgaactcatcgttttgatagacaatcttcttggactttccgtaactgtttaggggtttccccttaaggctgaagacggcttgggtattgacatccctcgacttggtgatggaaccggaggcggagtctccctcggtgataaagagggtggattcgagccgtttctcatggttggtgtggtagtgaacccggcagtcacgaagtttcttgttgtgcaggctggccttttttacgctctccttggccagttttttgatgccggcaatctctttgcgctctttctccgattggacaatcttcttttggaggatctctgcggtctcttggttgatatgcaggtagttgtctaggtgtttttgtactaaagcgcccacatagctgcggatggtttgtcctttgggctccatatggagagagcccaactttgttttggtttgggactcaaaaaccggttccgacaccttgatactgatgacggcaatcagtgactgtcggatatcgtgggtgtcaaaatcctttttatagaaatcctttacggttcgggcaaaggcctccttaaaggcggagaggtgggtgcccccggaggtggtgtgctgtccgttgacgaaggagtaatactcttctccatattgccgggaggagtgggtaagggcaaattcaaaatcatcctctatgatgtgaatgatggggtagagggcttcgctttcggtgatattgttggagagcaggtcgtaaaggccatttttgctgtggaatttctttccgttgaaggtgatggtcagcccggtgttgaggtagcagtagttccaaagtagtttctcaatatattcggggataaagcggtactctccaaagatctcctggtcgggaacgaaggtgatgcatgtgccgttgggctcgggtgagagggtaatggtctcctcctgggtgaggtttccctgggcataggcgacggtgcaagtctccccatcgcgaaccgattgtgctttgaaataggaggagagggcattcacggctttggagcctaccccgttgaggcccaccgattttttaaagaccttggagtcgtacttggctccggtattgatccggctcacacaggcagccagcttccccagtgggatgccgcggccataatccctgatggtgacctggttattttcaatgttcagggtgatctccttgccatagcccatcataaactcatcgatggagttgtcgaggatctctttgatcagcacatagatgccatcatcctgtgaagctccgtcgcccagtttgccaatatacatcccggggcggagccgaatatgctcgttccactctaaggtctttatgctctcatttgaatatgtttcactcatgggctttatcaattgttgcggattgttacagcggaaacaacaccccctgtttccctgacaaagatagggatattttgtcttgggtagctcgttctcttctcgggaaaaagtaaagcgacaacgcttggttgccgctttcaatgttttcacaacggaataatccttattgtgagttccttcaagtattgtgtcacaaaggtacacttttttgggtgataaagcaaaagctgactttttacaaacgtagtttctccataaggtgcggaagaaccgtctgaattcgtttgataaacaggggaataaatcctatatttgtggggatgttttataaaagctaagaggaaaatcataaaacaggaggtcatatgaaaaggatattaggattggatttggggaccaacagtattggttgggcattggtagaagaggcagaaaatcatggggagcagtcaggaattgtaaagttaggagtaagggtaaatcccttaacggtggatgaaaagaacaaatttgaaaaaggagaacccctctctacaaatgcggaaagaacgcaaaaacgtggggcaagaagaaacttacaacgttataagttaaggcgagcggcattgattgaaattttaaaggagaatgggttgattaccgatacaacgcctttaacggaaatagggaaaaatacgacgcatcaaaccttagcgttgagggctaaatcggctagagaacaagtttcgttggaagatttagctaagattcttcttttgattaacaagaaacgggggtataaaagtagtcgaaaggcgaagagtgaagacgagggacaatcgattgatgggatggctgtggccaaagagttatatgatgaagatttaacaccggggcaatatgtatttcaattgctgagccagcataaaaaatatattcctgatttttaccgctctgatttacagaatgaatttgataaaatatggagattccaacgacagttttatgccgatacgctaaccgatgccttgtatgaacgtttacaggggaaaaataaaacccaaacttgggccatttgtaaagagccatttcagttagtagggattaaaatcaaggagaatggaaaggaattaaaagggggtgacttaaaaaagaagcattatgaattgcgttctaaaggactttctgagttattggatttggaattgttagcgattgttctgcaagaaattaacaataaccttaatcaatcaagcggttatttaggagctatttccgatagaagtaaggagttgtattttcgtaaagagacggtaggtgagtatttgtggaagcaggtaaaagaggatcgccatacctctttgaagaatcaggtcttttatcgtcaggattatttggatgaatttgagcaaatatggaacacacaggcttcctatcataaggagttaaccgatgaccttaaagaggagattcgggatgtgattatcttctatcaacgaaagttaaaatcacaaaagggcttgcttgcattttgtcaatttgaaagttgggaagtggacaaaagggataaagcgggaaataggattattaataagcttaccgggcaacccaaaaaacagcgtattggaaggcgtgtggttcctaaatcgtcgcccttgtttcaagaatttaaaatttggcaagcgatcaataacttagcgtttcaacgaaaggattccgtaaaaaagagaggtttaggtaatcaggatggggaaggttcttacatcttagggaatgtggagcgaacattattgtttgaagaactcaatttaaggggaaagtttagtgaaaagcaggtgttgaaagtattgggtttatcatcaaaagagtggaaaaccaattatcccgaagggttagagggtaatagaactaatcaggcgttgtatgaggtatatcagagtatagcagaacaagaggggtatggctttgattgggcaagaaaatcagccaacgaaatcaaagaagagttaaaagctattttctctgctacaggaatcaatgccgcaatactggattttgatgcgaatgtggagggggaggagtttgataaacaacctgcttatgccttgtggcacctgttgtacgctaccgaagaagatgagaagattacggaagaggataggttgctgtatgggaactctcaggttgtgctaaagaaaaagttggttgagaaatttggtttcaagccggattatgccaaactactatctggcgtagctttgccacaagattatggccatttatcaagtaaggcgattcgcaagattattccctatttgcaagagggacataactattatgaggcttgtcaattggcaggatacaaccattccaagagtttaacaaaagaggaaaatgaagctcgagacttggtagaaagattggaattgcttcccaaaaatagcatgcgaaaccccgtggttgagaagattcttaatcaaatgatcaatttggtaaatcaggtagtggatgaatatggtaaacccgatgaaatccgtatagagttggcgcgtgagctaaagaaaaatgccaaagagcgaggggatatgaccaagcaaattaacgaggccacccgtagaaatgaagagattaagaagaaaattaccaaagaatttggtatccccaaccccacaaagagtgatgttgttcgttggcgcttatgggatgagttagccatgaatgctcataaagacctctttagaggaaaagagattagccctaaagatttgtttacaggccttattgaaatagaacatattatacccaaagcattgcgctttgatgactctttctccaataaaacactggcttttaaacaggtcaacctgcaaaaagctgacagaacagccatagattttattacgcaggattatctttctgatttggaggatttcaagtcgcgagttgaaatgctgtacgataatggaaaggggagtattagcaaagctaaacgcaacaaactattaatgtgtcaagaagatttacccgatgggtttattgaacgcgacttgcgtaacagccagtatattgccaagaaagcgaaagatattttacaagcgttggttcgcaaccctgttgttgcgacatcgggaacaattaccgatagactacgtgaagattgggatttaatcaatgtgatgaaagagttgaatatgcccaaatacagagcgttaggcttaaccgagtttgaacaacgccttaacaagcaaacaggagagctggttaaacatgaggtgattaaagattggacaaaacgtaacgaccatcgtcatcatgccatggatgcactaaccgttgcctttactacacatagccatattcagtatttgaattttctaaatgcccgtagagatcaacaccatagtgaatatgccaacattatgggtattgagcagaaaattacagaaacctatgagcagaagaatggaaaggggaaacgcaagtttatcccgccaatggaggactttcgaggggaggcaaaaaaacatattgaagctattttgatttccataaagaccaagaataaggttgttactaaaaatagtaacaaaagtagaaaagccgggaaagataagtatcatatcaaagaacaactaacaccaaggggacagttgcataaagagaccgtgtatggtaggagtaaacgtttgatgaaaaagcccacaaaactgaacaaagggtttacgttagcgcaagcttctttgattgcaaatcctcttcaaaaagagttggttataagtcatctaaataagttttcgaataatccggatatcgcatttgatcgtaaatctatcaagaaaatgcccctcatgtatcagggggcgatcttgaaagaggtactctgctatgaagagatctttaccattagaaaggaggtcagtcccggtttaaagattgaaaaggtaatcgatgaaaaggtcaaggctattctgcaaaagcgcttagctgagtttggtggcgatgctaaaaaagccttttctgacttagagcaaaaccccatttggttaaataaagagaagggaatagccattaagcgcgtgaccataacaggggttagtaatgcggaagcgctacaccacaaaaaagatcatttggggcgtgtggtactggatgagaaaggccatcctcaagcggcggattttgtcagtaccggaaataatcatcacgtggctatttatgaagatagcgagggaaaactacaagagaaggtgatctctttttatgaggccgtagcacgtatcaatgagggattgccggtgatcgataaggccttcaataaagacaaagggtggaagtttttatttaccatgaaacaaaatgagatgtttgtctttcccaatgatgattttgatattcagcacatagactttttggatcaagataatgcacgattgattagtaaacatctgtttagggtgcagaaaatatctactaagaattatatgtttactcatcacctggagacaaaagctattggtagcgatgatctcaaacatagaaaaatgcttttcaggcattcttattattttctccaaaatacggaatcgttaagaagcattaaaaaagttcgtattgaccatttggggcgtattgttcaggtgggggagtattaaaaacgataaaccgatgctaaaacgtacgatctatattgggaatccttcttacctaaagctgaagcataagcagctggtaattgtcaacccggagaccaaggatgttcggggaacggtgcccatagaggatatggcgttattgctgctggaccatccacagatcaccctctcttcattactaattgatcggttgatgagccatggggtaggggttgtccattgtgatacccatcaccttcccaatggtctgcttcttccattggtggggcactcggagcttacccaacgctggaatgtgcagcttggcgcctccatgcccttaaagaaacaactttggaaacagacggtgctggccaaaatagagaatcaaaaacggatcctacaacgctatggcggggcgactgctcccatggagcaatatatggctcgcaccacttcgggggatgaagagaatatggaggggaaagcggctaaccactattggaaacagctgtttgagaattttcaacggcaccgctttgggcatccccccaacaactatttcaattttgggtatgccatccttcgtagcattgtggcccgggctttggtcagtagcggattgcttccggctcaaggcctgttccataaaaataaatacaatccctactgtttggcggatgatgtgatggaaccttaccgcccctttgtggatcagttgattatggcgtacttggaggaacacaccccggagatggagctctccacccaagagaaggggtatctgttacagattgccacgcaagatgtgtttatcgaccataaggtgcgccctctgatggtggctgtgagtaccactactgccagtctttacaaatgctttacgggggagcggcgcaccattctctatccgcttgtgattacctaatgttaaaaatgatgctgcaagaccgttataatgcttatcgaattatgtggattctcgtacttttcgaccttccgacggagaccaaggccgaccgaaaagcggccacgaagtttcggaaaagcttgttggacgatggttttaccatgtttcaattttccatctatctgcggcattgccccagtcgggagaatgctgaagtgcacaagaagcgggttcggggaatgttgccctcctacggcaaagtctgcatctttgagattaccgatcggcaatttgggcagatagagatctttgattgcaggaaagaaatagcgaagcccaagacggttcagcagctggaattgttttaaaaattgtctctctaaggaaatctaaaagtatctgatgatcagatacttttagatttaggttgagactcatctccaaaaatacaatacttgaaaggaaatcacaacgtgctgcaaagaatagcggcaaaagagaaagttgagactcatctccaaaaatacaatacttgaaaggaaatcacaaccaacctagactatctttacgatctgataaggttgagactcatctccaaaaatacaatacttgaaaggaaatcacaacaccaattccgtcattctctttgattccattgttgagactcatctccaaaaatacaatacttgaaaggaaatcacaacaaagaaatcttttttgtcaattcctccaacgttgagactcatctccaaaaatacaatacttgaaaggaaatcacaacttgcccgattttcaaaagaatttccgcagagttgagactcatctccaaaaatacaatacttgaaaggaaatcacaactatactctcgcctctcaaaaaaagaaaaaggttgagactcatctccaaaaatacaatacttgaaaggaaatcacaactcccgaagaagtcaaaacccttgcggatgcgttgagactcatctccaaaaatacaatacttgaaaggaaatcacaacgatccgtgagtttttccttctgtcgtttgagttgagactcatctccaaaaatacaatacttgaaaggaaatcacaacgcccccggagttcatccgtataatggaggcgttgagactcatctccaaaaatacaatacttgaaaggaaatcacaacagtaacgtagtgcccactgatcaaggaagcgttgagactcatctccaaaaatacaatacttgaaaggaaatcacatgtaagcagtaacttgcaatcatcaaattttcgcaaatggaaatcatcaaattttggcaaaagtaaatcgtcaaaaaagaagagtgcgacctttgaat

SEQ ID NO: 2422 - DNA, 13764 bp, synthetic construct
  source 1..13764: mol_type = other DNA
  misc_feature 1..13764: note = Synthetic
ttccagccccactccatgcgggcgcaggtgtcgtcgaggcggttgggccacgactcggcgatgccctggcgcagggggtcgacgtcgtataccatctcaaagccaggtatgtactccttgatcttgttgtagatgatttcggggtcaaagctcatcgaggcgatgttgaacgagttgcggtgcttgagcttggcggggtcggcctccatgatctcgatggcgcctcgcaaggcgtcgggcatgtacatcatgtccatgaaggtgccggccttgatggggcaggtgaatttcttgccctgcacggcatagtagtagatgtcgacggcatagtcggtggtgccgccgccgggaggcgtcacataggagatgagccccgggaagcgcaccgagcgggtgtcgacgccaaacttgagggcgtagtagttgctcagcagctcgccggtgaccttggtcacgccatacatggtcttgggctgctgcagggtgtcttgcggcgtgccgtccttgggcgtgttggggccaaacgagcctatcgagctgggagtgaacacggcgcagtgctgctcgcgcgacacctcgagcacgttcatcaggccgcctatgcctatcttccaagccagctgcggcttgttctcggccacggcgctcagcagggctgccaggttgtagatcgtgtcgatgtgatacttgcgcacagcgtcggctatctgctgcgcgttggtgatgtcaacgatctcgctggggccgctctcggccagatcacccttgggctcggcccccgggatatagcctgctacgatgtggtcaccaccataaattcctctcaatttcatggtcaactccgacccgatttggccagttgaaccgataatcaacacgtttttcatatcgtcgttttaaagataatttggtttgactctattgtggccctgcgaccagcccggcaacacgcgcccgcccgcccgcaatggcactatgatgcaaagttacactactttgttgaaatttcacctttttccgcccattttttttcaccaatctcacccctcccctatcattttgtcgcccaccagccaattaaattcctcaaaaattctgcaaaagccctacaaaaaaagagcgagtagaacccgcccttgatgttttcacaacggaataatccttattgtgaattgcttcaaatttgtattgcaaatatatgcctaaaactgatatattccaaaaaaattacaagaaaaatgtattcacctcattaattttttttatttttgtgaaaataaacacaaaagcaaaaaacaatcatgaaaagagttttaggccttgacttaggaaccacaagcatagggtgggctgtagtagaccaggctacaagccaagaagaaaaatccaatatcatcaagttgggagtgagagtaaaccccatcacagtcgatgagcaaagcagctttgagaacggcaagagcatcacgacaacagccgatcgcaccttgaagcgcggcatgcgtcgcagcctgcagcgttacaagcaacgtcgcgagcatcttgtgcaactcttgaagaagcatggctttatcaccgacgacacgctcttgaatgaaaacggcaatgcaactacattccagacctatcggttgcgggccaaggctgcacatgaggaaatctcacttgaggaatttgctcgagtgttgctcatgataaacaagaagcgtggctataagagcaaccgacgcaccgatagccaagaggacggcgagctcatcgatggcatggcagtggccaagaaactctacgacgagcatctcacaccgggcgagtatgtgtatcacattttgcagagtggcaagcgcttcatccccagtttttaccgctccgacttacaggatgagtttgacaaaatttgggatgctcaaaagcagttctaccccgagattctcaccgtcgaactcaaggacaagctagctggccgtcgcaagaatgacaccgaaaaaatcttctatgcaatacatcacattgctgctgcaactattaaagaccgcaaaacggccacaatcaccatctacaagtggcgtgtgcaagcgctacggcagcggcttgagttggagcaggtggtgactgtgcttgccgctgtaaatggcgcgattgctggagcaagcggttatctaggcagcatcagcgacaacagcaaggagctctatttcggacacatgaccgttggagagtacttaatgcatggtcttgaacaagacccgcacttccgcattaaaaatcgcgtattctatcgccaggactacctgaatgagtttgaacagctatgggagactcagcgccaattccatcccgagctcaccaaggaacttaaagaggagataagagatactgtgattttctatcaacgcaagctcaagtcgcagaagggacttattgcattttgcgaactcgaagggaaggaaatcaccgtgaaggttgatagcaaagaaaagaaagtgatgacagggcccagggtgtgcccgcgcagcatgccgctgtatcaagaattcaaaatgtggcaggtactcaacaacttgcgtgttcagtgcaaaatcgatggcaccgacgccacactcaccctcgagcagaagcaacgcttgcacaatgagctcaacatcaatggcaacatgaaggcctccagtgtgcttaaagtgcttggattgaaggcgaaagaatatggcatcaactacgacgaggtgcctggcaataccaccaatgccgctctattcaagaaatataaggatatcgtggagtggacaggacacgatgttgagaaatttgacaaactctcggccgacgagaagttgtcgctcgtgaaggcagttttcaagggtctcaattacaataccgacattctcgacagtggtttaagcgaggatagcaaggccttcaggctgtggcacttgctatattcctatgagggcgacaattccaacacgggcatcgatgggcttgtcggccacatcagctcgttgacggctctgcctgtcgactatgccaaggctgtggcccaagttaaatttgaggacgattacgggtcgctcagtgccaaggctatcaagaagattttgccctatatgcaacaaggcatgatgtatagcgaggcgtgcgagaccgcaggctaccgtcactccaagtcgtcactcacacgcgaggaaattgccaacaagcaactgctggagcatcttgaggtgttgcccaaaaactcactgcgcaaccctgtggttgagaaaatccttaaccaaatggtgcacgtggtgaatgcttgtcagggtgcctatggcccgttcgacgagatacacgttgagatggctcgtgaactcaagctcaccagcaaacagcgtgaaactcgcactcagaacctgaatcagcgcacccgcgagaccgaagaaatcaaacagaagctgatcaaggaattcaacattcccaatcccagccgcaacgacatcatcaagtatcgcctctacatggaacttgcgcccaatgggttcaaaacactctacaccgatactccaattccccacgagaaactcttcaccagggagtttaatatcgagcatatcatcccacaagccaagatgtttgacgactcgttcaccaacaagacacttgagacggccgaggccaatctcgacaagtcaaacatgacggcttacgactacgtcctttctcgacaaggcgaggaaggcgcaaagcgctacaaggctaagattgaaaagctttttggcgcttccaatcccaagaaatgcgagcgcttgctcatgccagagaaggatatacccgacggcttcttaaatcgcgacttgagcgactcgcaatatattgccaaaaaagccaagtcgatgctcgagaaaatcactcgggtggtcgtgaccaccacgggagcaatcacagcacggctgcgtgaagactggcaaattgtcgatgtgatgaaagagctgaatcttgacaaatatgagaaacttggtcttgtggagacctacaatgaccgagatggccgcaagattaagcgcatcaaggactggaccaagcgcaacgatcaccgccatcatgccatggatgcgctcaccatcgctttcacccagctcagccacatccagttgctcaatcacctcaatgcacacgagagcggcgacatcaaggccaacgcctatgcactcatgcgcaaaaacctcaccaagggtggcactttcattccgcccatggagaacttcagggccgaggccaaaaagcatctcgaggccgtgttggtgtcgattaaagcaaaaaacaaagtagtgactccgcacgtgaatcgcatcaagggatccacccgccaccaggtcacgctcacccctcgtggacagttgcacaacgagaccgtctacggcaagaagcaattctacaacactaaaatggagaaggtggggcgaagctttgatgctgccaagattgccaccgtgtgcaagaaggcctatcgtgaggccttgctgaggcggttgcaagagtacgggggcgaccctgccaaggctttcacgggcaagaattctctattgaaaaatccgctctatgtcgacagcaggcaactcgatgtagtgccaagtagcgtgaagactgtggctctcgactctgttttcacgataaggaagcctattgacgcttctttgaaactcgacaaggtggtagatgctggtgtgagaaaaatacttaagcagcgtgtcgacgagtatggcagtgccgagaaagccttcagcaatctcgatgaaagtcccatttggctcaacgagcaagcgggcatagccatcaagcgcgtgaccattaagggtgtaaacgtcgccacccctttgcacgagaggcgcgacagcaagggccgcttcgtcgaggatgccgagggaaatcgtcagcccatcgactatgtgagtaccaacaacaaccaccatgttgcaatctttgaggacgagaacggcgacttgcatgagcacatcgtttcattctacgaggcggtggcacttacccagctgggcttacccatagtcgacaagcaccacaatagcgacaagggctggaaatttctgttcaccatgaagcgtaacgagtactttgtggtgcccgacttggagcatggtttcaaccctgccgatattgacttgatggatgagaaaaactaccccgagataagcaagcacttatatcgcgtgcaaaaactggccacaagatattatgtattcaggctgcatcttgacaccaaggtcgaagagcagaagcctctgcgagacattcagtggaaacgcattcaaaacgaaaatggcttgaagggctttgtgaaggtgcgggtcgatcacctgggccgcattgtggctgtgggcgagtataactgacagggcagtgcaccatgattaagcgtactttatatttcggaaatccggcttacttgagcctgagcaacgcccagctggtgttgcgcttgcccgaggtggtgaaaaacgacaccttgccgagcgtagtcaagaagcagtttgagcgcaccatccccattgaggatataggcgtcatcattctcgataacaaacagattaccatcacccagggcttgctcgagaagctgatggagaacaattgtgccgtcatcatctgcgacagcacgcgcatgcctgcaggcttattgctcccgcttgatgtgcactcggtgcaaagcgagcgcttcagggcacaagtcgatagctccaagccgctgcgcaagcaattgtggcaacagacggtggcagccaagatcgccaaccaagcagccatgttgcaccgcgtggagccggctgtagaggtgagcaacatggccgcttgggcccgtgcggtgaggagcgacgatgccatgaatctcgaggctcgtgctgcggcctactactggcgcaacttctttcccgagtgtgagggctttgtgaggcatcgcgagggcgatgcgcccaatcaattgctcaactacggctatgccatattgcgaggtgtcatagcccgggctcttgtgggttcgggcctgttgcccacactgggcatccaccatcgcaacaagtttaatgcctattgcctggccgacgacatcatggagccctaccgcccctttgtcgacgaggtggtgaagcacatggtgaaaaaatatggacttctcaacgatctcacaaccgagatgaagcgcgacttgcttgcaattcccactctcgatgtgaaaatcgagcacaagcgtagcccactcatggtggcagcatcgatcaccacctcatcgctggctcgttgttatgcaggagagtcaaagttgatatcttacccagagcttgcttgacgtgctgactatagatggaccgctttagtgaatatcgcgtaatgtgggtgatggtgttctacgacttgccgaccgaaaccaaaaaggagaggaaagtggcggctcgatttcgcaaggatatcatgaaagacggtttcaccatgtttcaattctctatctacttgaggcattgcccgagtcgggagaatgctcaggtacacatcaatcgtgtgaaatcaattctaccagaatcgggaaatgtgggaattttgtgtgtcaccgataagcaatttggagcaatggagctgttttatgggaccaaagaaaaagtcaaagagtttggtccccagcaattggaactgttctaaagaaaaaagcctgaatgattcaggctttttccctttagatgacgtcatttttttaaaacaccaaacctttgtattattctaatttacaattgtttacaaacaatgagatgtgtcatccaatacaaagatacaaatttgaaagcaattcacaacttcaaaaatttgcttaaattcatcatcatagatgtgtcatccaatacaaagatacaaatttgaaagcaattcacaactatcaatatactcattttttgtaaggtccgatgtgtcatccaatacaaagatacaaatttgaaagcaattcacaactttgtcaccgacggggagaaattcagcgggatgtgtcatccaatacaaagatacaaatttgaaagcaattcacaacaagcaactgcgtctccaattctgttataaagatgtgtcatccaatacaaagatacaaatttgaaagcaattcacaacatgttgtacaattatgttatatagctatgtgatgtgtcatccaatacaaagatacaaatttgaaagcaattcacaacctgcggcgggtttcatcgctttggctgggtgatgtgtcatccaatacaaagatacaaatttgaaagcaattcacaactggtcgttgtgcgtatatacgctgtcgcccgatgtgtcatccaatacaaagatacaaatttgaaagcaattcacaacacgtgtccttgagcagctgcaaaaacatttgatgtgtcatccaatacaaagatacaaatttgaaagcaattcacaactgcgcaagctgcacggcctggtcgtgctcgatgtgtcatccaatacaaagatacaaatttgaaagcaattcacaacacgcgtttgagggctccgacctggccttgcgatgtgtcatccaatacaaagatacaaatttgaaagcaattcacaacgacatcaagcaagattgtgtctacagccaggatgtgtcatccaatacaaagatacaaatttgaaagcaattcacaactctctccttgcccgtgctctcgtcgatggtgatgtgtcatccaatacaaagatacaaatttgaaagcaattcacaactgcaaagtcaagcgtgcccaatcgtcgagggatgtgtcatccaatacaaagatacaaatttgaaagcaattcacaactttgataagcaggtgagcacgcccacgttggatgtgtcatccaatacaaagatacaaatttgaaagcaattcacaacatgcaccgcgctatctctccacgaatttgagatgtgtcatccaatacaaagatacaaatttgaaagcaattcacaaccctttagttttagcgttgccactccctcgggatgtgtcatccaatacaaagatacaaatttgaaagcaattcacaacataatcaattgtttttataatagttattcagatgtgtcatccaatacaaagatacaaatttgaaagcaattcacaacacaagctcgggcgtaaagtagtaggtcttggatgtgtcatccaatacaaagatacaaatttgaaagcaattcacaaccgtgccacgcctggcactctcgagctcaccgatgtgtcatccaatacaaagatacaaatttgaaagcaattcacaacgagggacgctgccgcgatttgattctctctgatgtgtcatccaatacaaagatacaaatttgaaagcaattcacaactattgaagccgttgataaatctccttcatcgatgtgtcatccaatacaaagatacaaatttgaaagcaattcacaacatcgaggatcacaagcgaggcgttaaggccgatgtgtcatccaatacaaagatacaaatttgaaagcaattcacaactcatatcaattcactaaatttcgcggttagatgtgtcatccaatacaaagatacaaatttgaaagcaattcacaactgtccatcttcttttcttcatttgcattacgatgtgtcatccaatacaaagatacaaatttgaaagcaattcacaacggttgaaggctcgcagcctcggtgtgtacagatgtgtcatccaatacaaagatacaaatttgaaagcaattcacaacctcctaagagtgaatttttccaaagagctggatgtgtcatccaatacaaagatacaaatttgaaagcaattcacaacttatgaagtaatggctctccaccaagaatagatgtgtcatccaatacaaagatacaaatttgaaagcaattcacaacattatgaattatattaattttcattaagatgatgtgtcatccaatacaaagatacaaatttgaaagcaattcacaaccatcgggagtgctttgcccttcttcctttagatgtgtcatccaatacaaagatacaaatttgaaagcaattcacaacacccgaacaaaataaacgcaacacggggcagatgtgtcatccaatacaaagatacaaatttgaaagcaattcacaactattataaagatgaagtcaaaatatatcaagatgtgtcatccaatacaaagatacaaatttgaaagcaattcacaacaaaccaatatgtcgcttgattggacatcgtgatgtgtcatccaatacaaagatacaaatttgaaagcaattcacaacggtgcaggcctatgccgacaaagcacgtaagatgtgtcatccaatacaaagatacaaatttgaaagcaattcacaacacttgatgacaagtggtatgatgacaaagcgatgtgtcatccaatacaaagatacaaatttgaaagcaattcacaacttgttagtgaaagcgattgacagcggagagatgtgtcatccaatacaaagatacaaatttgaaagcaattcacaacttgccatgacccgtatatcatagttcatcagatgtgtcatccaatacaaagatacaaatttgaaagcaattcacaacgaacagcatcttgttcctgcttccgcccaagatgtgtcatccaatacaaagatacaaatttgaaagcaattcacaacggcatacttgtcgccttgctgcacgcgccagatgtgtcatccaatacaaagatacaaatttgaaagcaattcacaacgaacagcatcttgttcctgcttccgcccaagatgtgtcatccaatacaaagatacaaatttgaaagcaattcacaacggcatacttgtcgccttgctgcacgcgccagatgtgtcatccaatacaaagatacaaatttgaaagcaattcattcactgtgtccgccagtctcaatcaggcaactcaatgttcaatcttggcgatgcaataggtgagcagttgtgaaaaacagttcaaggcttttcattaccacatactattgtgtgcctgtggggcgggtgtgtgtgtgttttttggaggaaaatatttttgtattgttgcagaaatatgtaaatttgaggcgctgaagctgtgcctggcccggcttcgacgagacaactattttgaacacaggcgtggctgctctcctgccagggggggcggggcgctgcctgaaaccgactttaaacaaaaccgcttgactgctgatgaaactgaaaggcctcaagaataccaccaacgggtgcatgtgcctcctgattgtgggcgcactgttttctttcatagggtggcgcatgggcgctgccaacatgctcaacaccgtgatgcacacggcccacgacttgctgctcaacacgtgcttctacttgatgagcatatgcgtgatcacgggcgccataggcaagctctttgtcgagttccacgttgtcgacctgcttgagaagatgctcaggccgctcatgaagccgctcttcaacctgcctggcatggcctcgctgggcgccgtgctcaccttcctgagcgacaatcccgccatcatcaccctgtcgaaggacaagcgctttgcctcgcatttcaagaagtaccagtttatctcgctcaccaactttggcaccgcctttggcatgggcctcatcgtgatcgtgtttatgataggggcaggctactatgtggagccgttcataggattcttgggcgcctttgctggctgcatcatctcaacgcgctgcatgcagcacttcgtgctcaaggcctacccgcagtatcgcgacgagatggccgtagacttcgagcccaccacggtcgacgacgggtcaaaccagacgcccatggagcgcaagtcgaccttcttgcgcacactcaactcgctgctcgacggcggcaagatgggcgtggaggtgggcatgtcgatcatcccgggcgtgctcatcatctcgtcgctggtgatgatactcaccttcgggcccagtgcctcgggcgcctacaccggggcggcctatgagggcatcgagctgctgcccgacgcggccaacgtgttctcgggcttcttcgacgccgtgtttggcttcagcgacccgcaccagattgccttccccatcacggcgctgggcgctgtgggcgccgccttgagcctggtgcccaacttccaggcccacggctggatcgacggcaacgccatcgccgtgttcaccgccataggcatgtgctggagcggcttcctgagcacccacacggccatgctcgactcgctgggctaccgcgagctcacctccaaggccatcatctctcacacgataggcggcctgggcgccgccctggtggcccactggctctacctgctctacaccctggcggcatgaaatgcgacgccgccgagaaaaaagcgagaaatcgtgctggcgttacaatattttttgtaattttgttattgttctacacagaactcagagtatataaacctcataaaataaaacaactatcatgtacggtaaaattcaacaacatctgcaaaaggaactcgccgacaccaaggctgccggcctctacaaggaagaacgactgatcacgaccccacaggctgccgccatcaaggtgaagcccgagaccgacgtgctcaacttctgcgccaacaactacctgggcctgagcgacaacacgcgcctcatcgacgctgccgtgaagatgatgaaagagcgcggctacggcatgtcgagcgtgcgcttcatatgcggcacgcaggacatccacaaggaacttgaggctgccatagccgactacttcaagaccgacgacgccattctctatggctcgtgcttcgatgccaacggcggcctcttcggcgcactgctcgacgagcacgacgccatcataagcgacgccctcaaccatgcctcgatcatcgacggcgtgcgcctgtgcaaggccaagcgctaccgctatgccaatgccgacatgggcgagctcgaggagtgcctcaagcaggctcaggagcagcgcttccgcatcatcgccaccgacggcgtgttctcgatggacggcaacgtggctccgctcgacaagatatgcgccctggccgagaaatacgacgccctggtgatggtcgacgagtcgcactcggcaggtgtggtgggccccactggccacggcgtggccgagcaattcaacctctatggcaagatcgacatcttcaccggcacgctgggcaaggccttcggcggcgccatgggcggcttcaccaccggccgcaaggagatcatcgacatgctgcgccagcgctcgcgtccctacctgttcagcaacagcgtggctcccggcattgtgggcgccagcctcgagatgtttaagatgctcaaggagagcaacgccctgcacgacaagctggtcgacaacgtgaactacttccgcgacaagatgattgccgccggcttcgacatcaagcccacgcagagcgccatatgcgccgtgatgctctacgacgccaagctggctcaggactttgccgccgagatgcagaaggaaggcatctacgtcaccggcttcagctatcctgtggtgcccaagggcgaggcacgcatacgcgtgcaactgagtgccggccacgagcgcgaccagctcgacaagtgcatcgccgccttcatcaaggtggcccagcgcctgggcgttgagctcaagaaataacgcgcgtgacagggcggcaccccactgtggcgcccccgcgcgataaaaagaaaaaagaaaaaagaaaaacgcttaagaaactgcttttcttttaccccccacggccttgggaccccatcccatcgcctgggggttttccttttgccccatggccgcgcccggccctgccgccagggcccgaaatcgcgcctcgcgggcaatttatcgcacgatattttgaattatcctcgggaaattgctacttttgtataaaataataacttgattacaacataagaacagaaaaaatggcaaataacaacaacgctaaccagcaacaaatccaaatcgaagtgcctgccgaggagatgcagggaaaatatgccaacctggcaatgatcacccacggacccaacgacttctttatcgacatgatactcatggcccccaacatgcccaaggcacgcgtgcagagccgcatcatcatgacccccgagaacgccaagcagctgctcaacgccctggcgcagaacgtgcagaagtatgagcagaccttcggcgagatcaagccccacatgccccgtgccgcccagccgggcaacgacggcatcatcgacttccccctgcccaagggccaggcataacgccggcactagccgcactttagtttttttcttgaaatcacaacgcaatgcaaagcaacctgtttatttataacacgctcacgcgcagcaaggagctcttcaagcccatcgacccgccccacgtgggcatgtatgtgtgcggccccaccgtctacggcgacccgcacctgggccacgcgcgcccggccatcaccttcgacgtgctcttccgctacctcaagtatctgggctacaaggtgcgctacgtgcgcaacatcaccgatgtgggccacctggagcacgatgccgacgagggcgacgacaagattgagaagaaagcccgcctcgagcagctcgagcccatggaggtggcccagtactacaccaaccgctaccacgccgccatgcaggccctcaacgtgctgccccccagcatcgagccccacgccacaggccacatcatcgagc

SEQ ID NO: 2423 - DNA, 13650 bp, synthetic construct
  variation 2558..2620: note = n is a, c, g, or t
  variation 12959..12977: note = n is a, c, g, or t
  source 1..13650: mol_type = other DNA
  variation 3210..3271: note = n is a, c, g, or t
  misc_feature 1..13650: note = Synthetic
  variation 12805..12814: note = n is a, c, g, or t
ccacattcaaaaacctgtggggaaaggcggcagggactttcaagaggttcccggtctcgtcttgcttcatggcagcggcggcgattctggctgtcgtgctcgttcattcggatgacaaaatcgagggaaaagactctttctttctgatgttctggacgataacatccggactgctgaatctggcggtcagactcgggctcacggactggagaaatggcgaagaaaaaaccttcaagccgctttggattctgaccatcaacgttttgtggcttggaatctgccttctgttccgatggtactggccgttggacatgagttggttcaatgcggcgacaacccttgtgtggatcatcgtgtctgggatattccttgcccccgtctggcggaaatctgacaatgacactgggctttggaaccacacaattgactgcgtcaccgcagcattcaccgcattcgtggtcgggctgcttctggccggaggattggatctgctcgctctcgcgttcaaaatgctcttcggtcttgagattggctggaaagtggttgcggacgtgttctgggtcagcatgatattcattgctccgatggtgttcatgcaattgattcctgctaagggcagatatgatgccgacagaccgggaaaggccggactcggtctgatcaactatctgctgtttcctcttttaggagcatacgtcctgacactctacgtctatgcggcgaagatcatctttgaatggaacctgccgcgggggtgggtgtcaacactggcgatggcttcaatgctttgcttggtgctgatgatattcctgatttatccggtgcaattccgcgaggaccgcgacaaatggagattcgaccgcaaggcgctgaggcttttgcctgccatattcctgccacttcttatgctgatgacggtcgggatcgtcaaaagggtaagcgactacgggatcaccgcaccccgactttatctcatacttttcaacgcttggtgctatgttgtctgcataggactgacggtcaacaagtcaaaaacattccgctggataccgctgtcctttttcgctcttgcgatcctttcgtccgtcggacctcagaatttcgccgcactgtcccgcagagccctagtcagcgatgtcaagaaagctatgtcatcggtctcccctgacatcaggttccctttggactcggcaagatattcagagattatggaatcatgtgattcagcgtctgtggtgggaattgaccggaaaatggaatatctcttcattcaatatcacgagaaagtcgtgcgtgagattgttgacacggcggttgggttctggaacttcggcagttgggcagacagatgccaggcagataccgtggcagtcgatgacagcgcattccgatggctggagatcaacacggaaggggcttttaagattccggatgggtgcacccgctttgaaagcattaatttcaatggctcagtacccttagcggacacagtctttgtgacggtctcagccgattcggtaaggttggcgattccgctgagtgaggttgacagggcgcggaaaaagaacggaagcaaccccttgtacttccacggggacaacggtgtgttctttacagaccacatctcgaccgacaacgaaggagactcgatgcgtgtcaacctcaaggggatcatgtttctgaaataatattctatgatattcccggaacaaggatatttggaacatcgctttatgccctgcttttgactctgcctgctttttgtctctaccccgagatttggtatattcacggattattgctttatttgttggcaagactgaatgccgcggggcaaagaatccgcaaagcgagttaggttatatcgcacctgacccgcttttttgtttttacctgcgtcactatgtctcgggggcaaaatagccgttgctgcacccgtaaccactgattattaacatcgcgggggcgagaacggcctgaacgcacccgccaaatatttttgaactatgaaaagagcttcttatgccgagtctgaacggatctgcgagacaacctttgccaaaggttgcccttggtggcatctttacacaccgggaatagacactccgctgctcttcgcggacgctgaggactttcgttatgcgatcaaccttctggccagatgccataaagacatcgagaccgtgattattgtcgcctttgagatcatgaacaatcatattcatctggtagtgagcgggaatgaggatgacatcaggcgttttttcgctctttttaggagacatctgaaatggtacctgacctcaaagggacgaaaggagtccatccggcgcttcacaatgtctttaaaacctatcaaagatctgagaacgctgagaaatacgattgtctacgtcaacaggaatggctatgtggcggatcctgaccgcacgccttattccgacccttggggaacagggaggttctatttcggagactatcagatcgggagaccgttgggtgacttctcctacagggaagccagaaagttgcttcggagcaggggtggagaattggcnnnnnnnnnnnnnnnnnnnnnnnnnnnnnnnnnnnnnnnnnnnnnnnnnnnnnnnnnnnnnnncgagcttggcaaagcgatgttccgcaacgcccatcactacttctcgatgatcagcaagaatgtcgaggcatacggtgaactggcaaacgagcttgacgatggggagtttcttacagaccaagagcttttcacacaggtcagcaaacttcttatgcaaaattacggcaccaactcgctgagagaactgacgaggcctcaaaaactggatctggcccgcatgctgcgtcagagctaccattcttccaacggccagattcgccggattctgggtctcacccagtacgatgtggattcactatttcccttgtccgccaaataggaacgatggaggcagcgtaggcggttcgggggcaatatcctcctttctgcacccagagtgtgctgtcgaaatggctttgggtgcaaaactggtctttttgccccctgaccacaaggttaaaggcggcaagtattcactggtatttatcgccggaaacctgcggctcgggtgcgggaatacaccatccgcacccgactctatcacaccaggcagccgcggaggcaaaaaggttcacctcgcacccggagttaccggtgtcagcaaccgcggnnnnnnnnnnnnnnnnnnnnnnnnnnnnnnnnnnnnnnnnnnnnnnnnnnnnnnnnnnnnnncccgaacataccggtgtcggctgctgcgggggcaataagggcagcctcgcacccgaacataccggtgtcggcggctgcgggggcaataaggccgacattgcacccgaggatagaatggcaaacagggtggggtggtaaccgcgatgtcaactacgaaggttctcgccgggatattcattggtatattcattgacagacatcttgtggttgttggcgggaaaaggttatctttgcaggaaaaaaactgcgatgaacacgatctggatagtactgccgattctgatagttctgatgttccaactcgggattgagctggatgtggcttcgttcaggcaggtcgccagacacccgaaagcggtcgcggcagggcttgtcgggcagttggtgatgcttccggtcatcgctttcatcgtagctgtggccttcaacctaccggctgtagctttcatcggattgatgttggtggcttgctgccctggcggtagttcgtccaatgtgttctctatgctcgccaaagggaatgttgcgctgtccgtcacattgaccgcacttagcagcgtcgtgacacttgtgacgatcccggtcattatggaattcgtgaccagattcgtgtccttgaaagaagagactgtgatttcccttcctgtggggcgtctgctcgtgcagaacatcgtgctggtgttcctgccgatggctttagggactggattcagacggtggttccctgctctggcgaaacgggtcggagccgttatcgggcgtctggcctttcctgcgctgatgcttctggccgctgtgtttttcatccagtacgccagggagatcatcgacaacatcggcgtgctcggactttcatgcggagctcttattctcgcggctatgggatgtggagccattctcgccggaatgttcaggctcgacaaatcctccagacggacaatcgtgattgaagttggaatgcagaacgccgcacaggcaatcgccatggccgtttcacctcaggtgttcaacaatggcgagatggctatccctgccatagtctatgcattgatgatgaacgtcatcctgctcacatacctcgctgtcatccgacggaaaagtcagtaattggttctgcccttggagttatttgggaatttacttatttttgtccggtcaagcgaaggcgatcctcgtttggtcggtcgcttttgtggcggcaaaaaccatctgattactaacacatttatattcataaatttttgaatatgaaagaatatattcttgcccttgatcagggcacaagctcgtcgagagccatcgtcttcaacagaaagggggaagccaaggccgtgtgccagaaagagttcacccaacacttccctaaaccggggctggtggaacacgacccgatggacatctggtcttccgaatatgcggtcatgacggaagccgtggcgtcgctgggacttggaggatcggacatcgccgcgatagggataaccaaccagcgcgagaccacaattgtctgggacgcggagaccggaaagccgatctgccatgcaatcgtctggcaggacaggaggacttccgatttctgtgattccctcaaggccgccgggatgacggagcttatccgaaagaagaccgggttgatcattgacgcttatttctcaggtacgaaaatccgctggattctggataatgtgccgggtgccagagagcgcgcggaacaaggcaagctgcgcttcgggaccgtggacagctggctcgtgtggaatctgaccggtggccacgagcacgtcacagatgtcagcaatgcgtcccgcactatgctgttcaacatcaacactctccagtgggacgaggaactcctagacattctaaatattccgctctcgatgatgcctcaggtgaagtcttcctcagagatctacggtcagaccagtctgctcggcggggaagttcctgtggcaggcatcgccggagaccagcaggcagccttgttcggtcagatgtgcactgaaccaggctctgtgaaaaacacttacggaacgggatgcttccttttgatgaacaccggcgagaagccgatcatgtcgcacaacaatcttttggccaccatcgcatggaagatcggagacaagataaactacgctttggaggggtcgatattcgtggccgggtctgtggttcagtggcttcgcgacggtctcgggataatcaagagttcctcggaggtcgaggtcttggccgaatctgtgccggacaacggcggagtgtacatggtcccggcccttacaggtttgggcgcaccgtactgggatccatacgccaaaggaagcatattaggaatctcccgtggcacaacttcagctcacatagcccgcgccgctctcgaaggaatagctttccagaccatggacattgtcgccgccatggagaaggattccggcatccacctgggcgaactcaaggtagacggcggagcgtcccggaacaatctgatgatgcagttccagtccgacattctcggtgcaaaggtcatccggcctaaagtcacggagaccaccgcgcttggagccgcctacctcgcaggcctcgccgtcggcttctgggagagcattgacgaagtgaagaaacaatggcagtcagagcgtgtcttcaccccatccatggacgaagccactgtcaaagccgccaaagcaggctgggcggaggcaatcagcaggacacttacgaaataaaagaattaacgaatatgaatccttatctcgccgagtttctcggcactcttgtcctcatccttttgggtgacggagtctgcgcgtgcacaagtctcgaaaagtcaaaaggtaaaggagccggctggactgtagtcacaatggcctggggcttcgcggtcatgtgtggcgtgttcatcgccggtccatattcaggggctcacctcaaccctgccgtctcgatcggtctcgcagtggccggttcgttctcctgggcattggttcccggctacatcatagcccagatgctcggcggatttttcggagccgccctcgtgtgggcattctacaaggatcactatgacgcgaccgaggatacggacacaaaactcgggacattctgcacgatgccagcgatccacaatcccggcaggaacttcttctgcgagttcgtcggaacatggcttctggtgctctgcatcctgatgttttccgctccaggcaactctgctgacatcggcctcggcacagtcggagccttcccggtcaccatgttgatcatggccatcggaatgtccctgggcggagcgaccggctatgcgatcaacccagccagagacttcgccccgagaatcgcccacgccatcctcccgatgaagagtcccaagcgtgacagcggctggtcctacagctggatcccggtcctcggccctatcgccggcgcagccttcgcggccatcacattcatgctgattttttagcccacttctacataataatatttccatccccggtatcacgccaaacacggatccggggatttttcttaccccataaaacaaaaaagcgagtccaaagacccgctctaaatgtttgcacaacggaataatccttattgtgaattgcttcgttattgtaaccgcaaagttaatcaattatatctttcatgcaaatatttacgaaaaattatttgtccattaaagaattaagtgtaacttaggtgagaattaatacaataacagccatataatgaaaaagatactaggacttgatctgggaaccaccagcataggctgggcaatggtaaaccaagcggaaaataacgaagagagatcatccatcatcaaagccggagtaagagtcaatcctttgacgaccgatgagaaagacgccttcgagaaaggcaaggccgtcaccacgaacacagaccgtcggctgaaacgctcaatgcgccggaatcttcagcggtacaaactaagaagaaatgagttgatctccatcttaaaggaacttggctggattgacgactcgaccatattggcggaacatggcaacaaatcaactttcgaaacttacatgctgcgctcgaaagcatgcacggagatgatatctctgtcagaattgtcccgcgtcctgctgatgatcaacaagaagcgtggctacaaaagcaacaggaagctgaatgccgacgaggacgggcatcttgttgacggtatggcggtcgcgaagatgctatacgatgaggacaaaactcccggacagtattgctacgagcttgtcagaaaagggaataacgcactgcctgaattctacgcctcggatctggtggcggaattcaggaaagtctggaagacgcagtcatcttactatccggaatacctgacagatgagttctggcaacaggccgaaggaaagagcaaatcatcgttgtcgaagctattcttcgccaagtacaagatcacaaccgccgacaacaagggcaaggacaaaaaggtcaaagcctacgaatggcgttcatcggctattgagagacaactccctatggatcaggtggcttacgtgctttgcgaaatagccggcaacatcgggtcctcaagcggttaccttgggaatataagtgaccgcagcaaggagctgtacttcaacaagcagactgtcggacagttcctatactcgaatattcagaaagacccgcacttcagcacgaaaaaaaaagtcttctaccgacaggattaccttgatgagttcgaggtcatctgggaaaagcaagcctccttccatccggaaatgactgccgatcttaagaaggaaatcaaggacgttgtgatattcttccaaagaagactcaaatcccaaaagggattgataggttattgtgagctggagagccggaaggttgacgttgtcgtcaatggaaagacggtccggaaaatccgtggatgcaaggtcgcgcctgtgtcttcaccgctgtttcaggagttcagaatgtggcagaagatcaataatgtcatagtcacaaacaaggcaaccggcgaacagcgtccattggagcaagaggaaaaggaaaggctcgccgaagcgcttcatgtcaaagacagaatgtcatcaaatgacattctgaaacttttgttcaagaagccaaaggagctggaaatgaacttcaatgccattgaaggcaacgaaaccctgtcaaaattatattcaaaattcctcgaaatcatctcaatgaccgatggaatggattatgaatattccaaaatgcgcccggaggagcttatacatacgttaaaggtcggattcgacaagaatcatttcaattccgaagtccttgaatatgacgcacttctttcgaaggaggaatatgagcggcagcctcttttcaaactatggcatctgttatattcatacgaaggggataactcgcagactggtaatgagagtctggtcaagaagatcggtgaactctgcgctatgccggatgatcttgccaagatggcagcgtcgatatccttcaaacaggattacgcctccctgagccacaaggcgatgcggaatattcttccatacatgatggatggcaatgaatatagtgtcgcctgcatctgcgccggctacaatcattccaaacagtccttgacaaaggaacagattgacaacaaaatccttaaggaacgccttgatgagataccgaagaactccctcaggaatccggttgtggaaaagattctcaaccagatggtcaatgtgatcaatgctgtcggtgataggtacggcaagccggacgagattcacattgagttggcacgcgagcttaaatcttcccaggaagaaagggcgaaggcaactgaatcgatcgcgtcaaacaacaaggagaacgagcggatcaaaacaattcttgaagacaggtttcacctaacctatgtgagcaggaacgacattctgaaatacaaattgtacgaagaacttaagaacaacggctataaaacattgtattccaaccaatatgttccggaggagaagttgttcagcagagagattgacattgaacatatcataccacaggcggtgctgttcaacgactccctttccaacaagactctggaatacagggacataaaccttgaaaaggggaaggatacagcctacgattatgtcaagaacaagtatggagaaaccggtcttgaagattacaggctgcgcgttcagaaactatttgagtcaggcggcatctcacggacaaagcgggacaacctgcttcgcgacgcctcaaacattcccgagggctttgttgaacgcgatttgagggacacacagtacatcgccaagaaggctcgcgagatacttcttgaatatgtacgcgtggtggtaagcaccactggttccattactgacagactgcgggaggaatggggcttggtaaatgtcatgaaggaactgaatatgccgaagttcgaagccgccgggcttgtagagacgatcacatcgtccgacggtaaggatattcgtaagataaaggattggacgaaaagaaatgaccatagacaccacgctatggatgcgatcaccatagcgttcacaaaactcgcacatattcagtacttgaacaacctgaacgccaagagtgacaagtcttcctccatatacgggattatgatgaaagagacttatctttccggttctaagagattgatagttccgccgatgcctctcgaccagatgaggcgggccgttcgtgaacagcttggaagcattcttgtgtcgatcaaggctaagaacaaagtgatgaccgagaactataaccggatcaagacaaaggaggaagtcaaggtaactaaatgcctgacaccacgtggtcttctgcacaaggagcaggtttacgggcagaggagacgctatgaggcgtattttgtgaaagtcaacgcgaagatggacgaggatcagattgcatctgttgcatccagtgagatcaaggcgacgttgttattgaggttgtcgcagttcaatggcgatccgaagaaggctttctccggtgtcaattctttggacaagaatcctatatggctggacgacaatcattcgagaaaggtccctgaaaaagttaaatgcgtccggttcgtgaatgtatactccatcagaaaaccgatcgatccaaacctgagcgttgagaaagtgatggacggcaaggttcagagaatattaagggcacgtttggccgagttcggaaatgacccgaagaaagcgtttgtaaatctggacgaaaatccgatctggttcgataaggagaaagggattgtgctgagaagcgtgaccatagcggagaggtttgatcttgatcctatcagaatcaagagggataactttggccgtgagattcttgatcgcgagggtaatcctattccgtctgatttcgtgaatttcagaaacaatcatcacgcagctatattcgaagatgcggatgggaatattcaaggacatatagtgccattctatgaagctgtcagaaggaaagcatcagggctgtcaataatagataagaagtataactctgacaaaggctggaagtttttgtttacaatgaaaagcaacgagatgttcgtatttcctaatgaaaagactggctttgatcccaagaaagtcaaccttatggatccaggcaattattcaataatcagtccgaatttgtttaggctacaaaagatgagtaataagaaggtttgccaagagtattattttaggcatcatctagaaacaacattaggatatgacttgtcgttaaaggatattacatggaagtgtgtgcaatcactgaatatattatcgggcattgtcaaagtccgcatcaatcacataggagaaatagtctcagtaggcgaatatgattaagagaacattatatttcggaaaccccgcctatctgtcctataggatgaagcagctggtcatccgtcttgtggcggatgatccggatgagtattctgaacaggtacgcacgattcccgtcgaggacatcggtgtaattgttgttgacaaccagcaggtgacatttacttccgggctgatgtccgcgctgttggaggagaatgtggccttggtcacgtgcgattccaaacacatgcctactggcttgatgctgacgcttcaaggccattcctcacaaaacgagcgtttcaggaaccagcttgacgcttccctgcctctcaaaaagcaattatggcaacaaaccgtcgagtgcaagatccgcaatcaggcggccgttctgaaatatgtctccggagaggaagccagaaatatgctcgcttgggccgcttcggtcaaaagtggagactcggaaaatctggaggggcgcgcagcggcttattactggaaaaatgtgttcgagacccgttttatccggaaccagttcggtgaatacccgaacaatcttctgaattatggttatgccattctccgtgccattgtcgccagagccttggtagccagcgggatgctaccgctgcttggaatccatcaccacaacaagtacaacgactattgccttgccgatgacatcatggagccatacagaccatttgtggacaggctggttcttcgaacgatggacgaatttcctgacgacaaggaattgagcaagagcattaaagcgaggctcttgaccattcctgtccttgatgtgaacatagacggacacaagagtcctttgatggtcgctgtgtccactaccacagcctcattgtacaaatgttttagtggagtatgccggaagatagtttttccctcaatgtagaaaccagatacagtaaatatcgggctatgtgggttctcgtcttgtttgatttgcctgtcgcgacaaagaaagacatgaaagccgcctcggctttcaggaagagtctcattgaatatggcttcacgatgttccagttttcaatctacctaagacattgcccctcaaaagaaagtgctgatgtttatatcctacgtgtaaagcgcatactacccccaaaaggaaacatcggtatcctatacatcaccgacaaacagttcggcagcatggagttgttcatcggaaaagattcctcccctcttccccaagtagagcagcagctcgaactcttctgacagaatctccaaacccttgataaacaaagaaatcccggtctgaaaagaccaggatttccgctttctatcacagttcataaccctctgaccaacaacatcttgcagagattgagctgtaaattcacccaaaggtacaaagaacgaaagcaattcacaactctgtcctgaacataaaattaaaagtctgcgctgtaaattcacccaaaggtacaaagaacgaaagcaattcacaaccttgtacgcctaaagcgtttcgccaaaagagctgtaaattcacccaaaggtacaaagaacgaaagcaattcacaacaagggtcaaacgtgcgttagaagcgaagcggctgtaaattcacccaaaggtacaaagaacgaaagcaattcacaacatcttgccgcaattcttcggccttttgcttgctgtaaattcacccaaagnnnnnnnnnnaacgaaagcaattcacaacccggttcctgtatttccgtttcgcgttccggctgtaaattcacccaaaggtacaaagaacgaaagcaattcacaacttcccgtcaatattgacatacgccccgaacgctgtaaattcacccaaagnnnnnnnnnnnnnnnnnnnaacgaaagcaattcacaactcgctgatgctgaatgattgtgaggtgaatgctgtaaattcacccaaaggtacaaagaacgaaagcaattcacaacaagaagggcgtcgaggaactcaaggctctagctgtaaattcacccaaaggtacaaagaacgaaagcaattcacaaccatgcatcggtctgcaatgtcagtgaggttgctgtaaattcacccaaaggtacaaagaacgaaagcaattcacaactttctttgctaaaactaaaattttaccctcgctgtaaattcacccaaaggtacaaagaacgaaagcaattcacaaccccggagcgaaaatataaggatactcctggctgtaaattcacccaaaggtacaaagaacgaaagcaattcacaacatactggaacattacaaagacgatgacatgctgtaaattcacccaaaggtacaaagaacgaaagcaattcacaacagttccagtgtcagcggcattcgccttttcgctgtaaattcacccaaaggtacaaagaacgaaagcaattcacaacactcataagctattgctctgtttttcctgtgctgtaaattcacccaaaggtacaaagaacgaaagcaattcacaacataatcattatgaacatgagtcgatttatagctgtaaattcacccaaa

SEQ ID NO: 2424 - DNA, 13382 bp, synthetic construct
  source 1..13382: mol_type = other DNA
  misc_feature 1..13382: note = Synthetic
cgtatttcactgcgcgttgcatctcgtcgctggcagccggggcttgccaggtgagtgtgttgtgctttttcttgagcttcaccacatcgcctggagccttgttgtcgagccagggatacatgggcggcagggcaagcgtcgactgctggcgggccatgagcgagtcggccacgcccttgtagttgcccgtgaggtcatagcagggccaccacaccacgccgcccacgtgggcgaggctgcgcatcttgtccagtttctggccgagctgagtgggaatgttgctgttgcgggtgtcggcatagttcatggtgttgcgtatggccaggccatagtacatgtcgcggccgttggcgttgtcgttccaccagtccatgagcaccgagtcgctggcggctttgtgctccatctgccagtagagttgcggcaccatgtagtcgacccaccccatgcgggtccacttggggcagtcggcatagagggcatcatagcattgcaggccgttggtgtcgctgcccctggggtcggttttcttgttgcgccatattccgaaggggcttattccgaagcgcacccagggcttgatgctggcgatggtgcggtgcatcgaggcgatgagcgagtcgacattggcccggcgccagtcgcccttgtcctgcccgttgccgtagcgggcgtagctggtggtgtcgggaaagtcggtgtccttgatgggatagggataaaaatagtcgtccatgtgcaggccgtcgatgtcgtagcgggtcacgatgtcggccaccacgcggttgatgaagtcgcggcactcgggataggctgggtcgaagtagtattgcttgccgtatttcaagaaccactcgggatgcttgcgcaggagggcactgtcgcatatttgcgactccgagcccactcgatagggattgatccacgcgtgcagctcaagtccgcgcttgtgagcttcggtcaccataaactccatagggtcccagtaggggtcgggggcttgtccggccttgccgcttagccacagactccagggttccagcttgctggggtagaaggcatcggcctgtggccggcagtggaagatgatggcattgcagtgtgtgagctgggcgctgtcgaggatgttgagcaggtaggccttgttctcggcagtggtgtggttctggtagtagcggtcgcccacggtgggcagccacacgccacgaaactcgcgtttcgggttttgtgccgcagtgtgcatcgttgctgcacatgtcgcggcgatgaggataagcagtaatgtttttaatttcatcgttttttagtgttgattgtattgtcgggattgattagtcgcaatgggcgtcttctatcttgaaaccgcgcaggaaagcatcggcaggcattcgcttcttgccagctacttgcaactgcgtgatttcgaggcgtccgtcggcgcaggccacccacaggtgccggccgtcgcttgtgacggtgccaggcagttcaccctcgggcttggcttgaggctggcccgtggcaaacaccttggtcgagtgtgccttgcctgcggcatctacaatctcggtccaagctgcagggtagggcgagaggccgcgcacgtggttgtagagggcttcggcagtgcggttccagtcgatgcggcaggtgtctttgaatatcttgggcgcaggtgtgggttgctggccggcggtgagcatttgggcctggggcgtggtcttgacggttccgtcgataattgagtcgacggtgtcgatgaccatttgggcacccaggtgcatgagcttgtcgtgcacgatttccacattgtcggtgcgggcaatgggtatcttgcgttgctcgatgatgtcgcctgtgtcgatctcgtgcttgagaaagaaggtggtgacgccggtctcggtgtcgccattcatcacggcccagttgatgggagcggcgccgcggtacttgggcagcagcgaagcgtgcaggttgaaggtgcccagccgtggcatggcccacaccacctcgggcagcatgcggaaagcaatcacgatttgcaagtcggcccgcaggctgcgcagggcttcgacaaaggcctcgtctttgagcttcacgggttgcagcaggggcagcccctgggcgagggcatagcgtttcacgtcgctctggtacatgtggtgaccgcggccggccggcttatcgggcatggtgaccacgcccacgatattgtagccgccttccacaagccgctgcaggctctcgacggcaaagtcgggcgtgccgaagaatacgattcttaagtcttttttctccattttgtagtgttgttgtatattgttgtagtcgaatgtttgttgccagcaggagccagcagttgcggccgggctttcttggcccggtgtatcatctcgcgggtgaagatgcgcgcgccgcggtcgttgaggtggccggcatcgtcccagcaaggggctttccccacaaggttagggtcttgggcaagatagatgtagggcacgtggtgcgccttgcacaagtctactacgggcttgtgcacgctcagcatgtcgggttgcgggtcgaagtagggcgatgtgaccacgatgagccgcgactggcattgttccacaagtttcttgaggtagctcatttttttggcatcgagctcgcgggtgaacctggggtagggctcgtgctggggcttgatgacgccgaattgcggcacatagccgttgtcggccagcttgttgttgtaggggctgtcgctccggtggctggccagccatatctcggcaatgagcgagttgtaggggtatatgcccgagagcatgcgcacgcgctccatggggtcgatgtcggccagcatgctgtcgcgacacctgagctgcctcatggggcgtatcttgttgacgggattgtcggcctggctgtggcgcatggcgtcgtagccgtactgcagctcgtagacgaccaccctgggcctgtagcgttgcagcagtgcacgcagcagcgcgtagttgagaaagatgttgctgccctcgatgccgcagttgtagcagctcatgccagtagagtcggtgatgatgcgtggcacatagtggtgcaatgcgcgcgacgagcccagtatcacgatatcggcccgggcgctgtcggcaatatagttgagcttgcctatctcgtcgcggtgcacacggctgtaggcatcgcccagcacgggccccagtgcctggtcgcaggcggcaatcaccgccagcatgatgagaaatgtgccaataaaccgtcgcatgcgctaaaattttacatatataaattgcccactgtcgatgacgccgatgagcaagatgagtatcacaacgatcccgtagcctgccagcgagactggtcgcggcagcttcagcacttgccactcggcctgcacgtcgcgcagcatgaccaccacaaaggtgaaggccatgtagcacatcacgcttgtggcgtgtaccgagttggcaggtagcatgatgtggaatgcgttgaatggcgctgtaaacagctgggtgaatatctggatatagttggactggaaaaatgtcaagttcatggccatgagcaccagggtgactgctgtcacggccacgcgcgccggcacgtgacgcctccactgcttgagcggcagcgcgtgactcagggtcaccagcacgccgttgaccaagccccaggccacatagcacacagtgccgccgtgccagcaaccgctggccacaaaggtgaccatgatgttgaaacaggtgcgccatttcgagcaccggctgccgcccagccgaatgtagacatggtcgcgtagccaccccgacagggccatgtgccaccggtgccaaaactcgcctgcacccattgcaaacagcggctgtgagaagttggccttcaagtcgatgcccagcaggcggccgcatccttgggcaatgtaggagtaaccggcaaagtcgcaatacatctggaaaagatagcacacttgggcaaagagaagcgagaagccgttgtgactcatggcgtggccaaacacgctgctggtgtagatgccaaagcggtcggcaactgccaccttcagaaacatgccccacaccaccagccgggcgccgctgccagccagtgtcttgtcgaaacccagccggtgctctctgaactgcggcatcaggtcgaacgagcggttgatgggacccgaaagcaccgttgggaagaagctcagatagagggcatggttgagcaacgactgctcgcgcggcaccttgccccgggccacatcggccacgtagcccacggcctgcagcgtgtagatcgacaggcctgcgggtatcatccagttcagcccgttgaagtcaagccccagcccgcaggcgtgcaacgctgccagcacaatggcatcggcaggagcgataaacttgtagaaggcaagcggcaacagcatcagcgccaggcaggctgccaggcccgcctggcgcctcttgccgcacttggtggccagcaggcctccagcgtagctcacgcccgcaatccacagcagaaacacactgcacagcgggcgccacatggcatagaaggccaggctcactgccagcatgaaggcattgcgccaccgccgtggcaatatccatgtcacgagacacacacagggaaaaaacaatatgaacttaagcgtattgaatgccacgtcgctgcatcgttgtcttgcactgtaaatgctctctacagtttcccatgccgtcagtcataactgtagtgcttgagcacctgcctgtaggagttgaatatcttggattttgacacgaagcccacatacttgcccttgtcgaccacaggcaggttccaggccttggtgtcgtcgaaggttttcatcactttctccatgggggtgcccagctccaccttggccggcggcatcgacatgaagcgctctaccttcatgcgacggtacaagtcggggcggaacatgatgttgcgtatgtcgtcgagcagcaccacacccagcaggttgttgtcgttgtcggtcaccggaaacaggttgcgcttgctcttggatatcacgtctaccatttgcttgaggcacatgtcggggtgcacgggtatgaagtcggtctcgatcacactgtccatcttgagcagggtgagcaccgactggtccttctggtgggtgagcagctcgcctcgcttggccaggcgcttggtgtagatgctgtagggcgtgaacacgcggcaggtgccgtaggagatggctgccacgatgagcagtggcagaaatagcgagtagccgcccgtcatctcggccgtgaggaagatggccatgagcggcgcctgcatcacgccggccatcacgccagccatgcccagcagggcgaagttcttgatcgaaagcggcacgctgggactggcaaagcccacggcgttgagcgtgtaggcaaagaagaagcccgccatgcagcccacatagagcgacggggcaaaggtgccgcccacgccgccgccgccgttggtggcactggtggcaaacgacttgaagaggcacagcccgcccacaaagaggatggtcgacatcgtgttgttgcggaatgaataaaacaggctgttgtcgaatatcgaggccacatcgccgttaagcagattgttgatggccccgtaaccctcgccgaagagtggcggaaacaggaagatgagcacactcagcaccacgctgcccaacatgaatcgctgccaccggccctgcatgcgcccaaacacgtcttccatcaggcctatggtcttgttgaagtagagcgacacaaagccgcacatcactccaagcacgatcacataggggatgcgcgaggtgtagaacggttcgctctggctgaagaaaaactccacattgtagcccgtgaacacatagctcaccgtggcacctgccaccgaggccatgatgagcggcatcacactgccggccgtgaggtcgagcatgagcacctcgacggtgaacagcaccccggctatgggcgccttgaagatgcctgcaatgcctgccgcagccccgcagcccacgagcatcatgagcaggtggggcgacaggcggaaggcctggcccaggttgctgcctatggctgccccggtaaacacgatggggccctcggctcccaccgagccgccgcacccaatggtgatcgacgaggccacgagcgaggcatacatgttgtgggtcttgagccggctcttcttctgcgcaatggcatagagcacacgcgtcacgccgtgcgagatgttgtcgcgcaccacatagcgcacatagagccccgagagcagaatgcccacgatgggaaacagcagatagtagtagttggcctgggtggtcacgcccacactgttgatcacggttgagatggtgcttatcaagaacttgagcagcacggcggcaagacccgatgcaatgccgatgacgatggccagcatcaccacaaaggttttctcgggaatgtgcttctcgcgccacagtatcaggcgcaagtaccaccccttgctttctttctcgttgctgctcgctgctgctgctgctgttatttctggttcagccgttgttgtcatcgctttttcattttattgagttaaacaccccggccggtgaatacaatcttcacggtgtagactatgattttcaagtcgttgatgagcgacatgttctcgagatagagcaggtcgtagcgcagccgctcaaccatctcgtcaacattttgggcatagccgtatttcaccatgcccatcgaggtgatgcctggccttatctggtgcaccagcgagtaggctggctcgcgctcgagtatctgttgtgcatagtatcgcctctcggggcgcgggcccactatcgacatgtcgccgcgcagcacgttgaaaaactgcggcagctcgtcgacgcggtacttgcgcaggtagtggcccacccgggtgatgcgcgggtcggcatcgctcgagagctgcggcttgccttgctgctcggcgttttccaccatggtgcggaacttgatgatgtagaacggcttgttgtgccgccccaggcgctcttgcttgtagagtaccggcccgtgcgagtcgcacttgatgatcaggcctaccgcaatgtagaccgggatgagcactaccatggccacggccgagatcaccacgtcgcaaaatcgcttcatgttctgccctccggcgctcatgttgctgctcgagatgtcgatgagcgggtcgccgtagaggtcgctcaggcgtgcgcgcgagagcaggatgttgtacttgtcgggggtgatcttgatgggcaggttgatcgaaaacaggcggttgatggcactcagcagctgggccgagtcttgcttggtgggcaccacaatgagctctttcacgccctcgcgctggcacaccccggccacctcgtcgaggctgtagcgaggcttctcgatgtctttcaccccgttctcgccgggtatgtgcacatagcccacaatgtcgtagcccagcgaggcacgcatgtgctcgagcttgcccacaaaggcataggccgcagccccgtcgcctatgatcagggttttgaaactccactgccggctctttatcttgtgcgaggtgtagcccgtgatcacggcccgcaccacataggtgagtacaaacatgatgcccagcagcacaagcacgctctcgttgttgaaagcacggttgtcggcggtcatgtcgttcatgagcgctatgataaaggtgatgagcgcgttcacgcaggtcgacgacagcgtggtcatgagctcgctgagccgcgacttcctgaacacctcgttgtagtagcccgagaggtagtatacccccatcatgatgagcggaaacaccacttgctcgagcttcaccacatcgctcgtcaagaaggtgtgcagcgactggtagccgcgcacgccccccatcgcaaagcgggcgcagttgtagcccagccatgcgagattggcagtgatgtagtcgcctgccacatatttcagccgttgtgctcgttcgcttatcatcggggtgattgtcgtagtgtgtgtgcgcgccttagcgctatcgattgctcggcaaggagctatcgcagtatcttgaatgtgccgtcgctgctcagcatgataatgttggaggccgagtgcggcgccgtgtcgtcttgccggtatttcaccacatagtccacaccctgcacaatggcagggttgatttgggcaaatgtcgctgccgctggctcgccgctcacgttggccgaggtcgataccacaggcttgccgaagcgcgcgcacagctcttgcgagaacttctcgtgcgatatccttatgcccacgctttcgttgtcgcccagcaggttgggtgccaggttgtaggccccgtcatagatgatggtgagcggcttcacggctacatcgatgagctcgcgggccatctcgggcacgtcgaccacatagtggtcgagatgctcggcactgtcgagcagcacgatgagcgccttgttgtcggccctgtgcttgaggcggtacactttcttcacagcctcgggattggtggcgtcgcaccctatgccccatatcgtgtcggtggggtagaggatgagaccgccccgctcaagcacttcgatacacgttgtaatgtcttcttccattcagtttctttgtcagctttgagagaggcctgtcctggccccgatacaattaacaaaggtaactcaaaaaccggacataaaaaaaacaaaaattggtttttgacggcctgttaacagtaaaaatgttaaatttcttaatttcctgccgcctgccatgtccactggcaaggattattgtgttatctttgcattccataccggctccatgtggctgccacgccgcatgcgggctgcaagagcgcgtgaaatctatttttttatgtcagatagtaacattttaaagaaaagaaaggtcaaaaaaatgaaaaacattctatcggttgccctggtggccgccgccctgtgggcagccatgccagccacggctcaaagcaaagttatctacaccggcgacattgccaagaaagtgatgggctaccagggcccaacgccattgaacatcaccataatcaatggcaagatcgagagcatcgaggccctggccaaccaagagtcgcccaaatacatgcgccgggccgagcgcggcatcttcccgcactacataggcaagaccgtgagtcaggccctcaagctcaaggtcgacgccgtgaccggcgccacctatacctccaacgctctcctgcagaacatcaagctcggcctggagcaggcccgcaagagcggcaaaaaaacgggcacagccgccaagaagtcgcgcaagcgctcctcctcgcgccgccgctagccccacagccccgtcagcccaacctcatagccccggcaccccagcgccggggcttttatataagccttaattgcaaaaaaaaagagcgagtaaaacccgctcttgatgttttcacaacggaataatccttattgtgaattgcttcaaatttgtagtgcaaatatatacttgaatttgatatattccaaaaattttccaagaaaaatgcattatcctcaatgatttttttttatttttgtaaaaaatagaaaaaacaaaacgatcatgaaaagagttttaggcctggacttaggtaccaccagtataggatgggctgtagttgaccaagctgcatctcaagaagaaaaatcaaagattattcaactgggagtgagagtgaatcctatcacggtcgatgaacaaagcagctttgaaaacggcaagagcatcaccacaacagccgatcgcaccctcaagcgaggcatgcgtcgcagtttgcaacgctacaagcagcgtcgcgagcatcttgtcggtctgctgaagaaacatggaatcatcaacgatgatacgctactgaacgagaatggcaatgcaaccacgtttcagacctatcggttgagggcaaaggcggctcacgaggaaatcttgaggaatttgcccgggtgctgctcatgataaataagaaacgtggctataagagcaaccgccgtgccgataatcaagaagacggcgaaatcatcgatggcatggcggtggccaaaaagctctacaacgagcatctcacacctggagagtttgcctatcacattttgcacagtggcaagcgctatatccccagtttctatcgctccgacctgcaggatgaatttgataagatatggaattgccaaaagcaattctatccacaagtgctcacggccgaactcaaagacaaactcaccgaccgcagcaagaaagataccgaaaacatcttttttgcaatacatcacatctcttcagctacagtcaaagaccgcaagacggccacactcaccgtttacaagtggcgtgtgcaagcgcttcggcaacagctcgatttagagcaggtagttgcagtgcttgccagcttgaacggcgcaattgcaggagcaagcggttacctgggccacatcagcgacaacagcaaggagctctacttcggtcacatgacggtgggggagtacttgatgcgcggtcttgagcaagatccgcatttccgcgtaaagaatcgcgtgttctatcgtcaggattacttgaatgagtttgaacagatatgggagactcaacgtagatttcattctgagctcacccctgaacttaaagaaaaaataagagataccgtgatcttctatcagcgtaaactcaagtcgcagaaggggctcattgcctattgtgagcttgaagggaaagaaatcactgtgaaggtcgatggcaaggagaaaaaagtgatgacaggccccaaggtgtgtcctcgcagcatgccgctgtatcaagaatttaaaatgtggcaggtgataaataacttgcgggtgcaatctaaaatcgacggtaccgaagtgcctctcaccatggagcagaaggaacggctgcatgacgaactcaacgttgagggtgacatgaaggctgctcgggtgcttaaggtgcttgcattgaaggctaaagattatggcatcaactgcgacgaggtgccaggcaacacaaccaatgctgctcttttcaagaagtataagagtatcgtggaatggacaggccacgacgtggaaaaatttgacaagctgtcggccagcgagaaaatcgcacttgtagagtcggttttcaaaacgctcaagttcaataccgattttctcggtgacggctgtgacgagcaaagcaaggcattcaggctgtggcatttgctttattcctatgaaggcgacaactccaacacgggcatcgacaagcttgtcgcccacatttgctcgttgacagcgctgccggccgactatgccaaggctgtggctcaagtgaaatttgacgacgattacgggtcgcttagcgccaaggctatcaagaagattctgccctacatgcagcaaggcatgatgtacagcgaggcttgcgcggccgcaggctaccggcattccaagtcgtcgctcacgcgtgaggagattgctgctaagcaactgttgcagcatcttgaggtgttgcccaaaaactcgctgcgcaaccctgtggttgagaaaatcctcaaccagatggtgcacgtggtgaatgcttgccaagatgcctatggccccttcgacgagattcatgtcgagatggcccgtgagctcaagctcaccagcaagcaacgcgaggagcgcaccaaggccttgaaccagcgcaccaaggagactgaagaaatcaagcagaaactgataaaagatttcaacgtccctcatcccagccgcaacgacatcatcaagtatcgcctttatatggaacttgctcccaacgggttcaaaacactctataccgacactcctatttcgcacgagaaactgtttaccagggagttcaatattgagcacatcattccacaagccaagatgttcgacgactctttcaccaacaaaacgcttgaaacggccgaggccaatttggacaagtcaaagatgacggcctacgactatgttctctcacgacaaggcgaagagggtgccaagcgctacaaggctaagattgaaaagctctttggcgcctccaatcccaagaagtgcgagcgcctgctcatgcgcgaggccgacatccccgatggttttctgaatcgcgacttgagcgactcgcaatacattgccaggaaagctaaagaaatgcttgggaaaatcacgcgagtggtggttcccaccacaggtgcaatcacagcccggttgcgtgaggactggcaaatcgtcgatgtaatgaaggaacttaacctcgaaaaatatgagaagcttgggcttgtcgagacctatagtgatcgcgacggccgttgcgtgaagcgcatcaaggactggagcaagcgcaacgatcatcgccatcatgccatggatgctctcgccattgcttttacccaacccagccaaacgcctatgcactcatgcgcaggaccctcaccaagggcggcaccttcattcctcccatggagggattcagggccgaggcacgcaggcatctcgcggctgtgctggtttcgatcaaagcaaagaacaaagtggtgacgccgcatgtgaaccgcatcaagggtgtcgcgacacaccaggtcacactcacgcctcgtggccagttgcacaatgagacggtgtatggcaaacggcagttctacaatacaaaaatggagagagtgggtaaaaattttgatgtcgccaaaattgctactgtgtgcaagaaagcttatcgcgaggccctgctgaaacgcttgcagcagtacgggggcgacccggccaaggctttcacaggaaaaaactcgctggagaaaaatccgctttatctcgacagcaggctactggagactgtgcctggtagtgtaaaaaccgtaactgtggagtcggtctacacggtaagaaaacccatcgatgccaagttgaaacttgacaaagtggtcgatgcaggagtgagaagaattctccagaagcgtgtcgacgagtatggcagtgtcgagaaggcattcagcaatctcgacgagaaccctatttggctcaacaaggaggctggcatcgccatcaagcacgtaaccatcaagggggtgaacgtggctaccgccttgcatgaaaagcgcgacaaccgaggccagtacatagaggatgccgatggacagcgccagcccaccgactttgtgagcaccagcaacaatcaccatgtagctatctttgaggacgagcagggtaacctgcacgagcacattgtgtcgttttacgaggctgtggcccttgcccagttgggtctgcccattgtcgacaagctttacaacagcgacaaggggtggaaattcctgtacaccatgaagcgcaacgagctcttcgttgtgcccgacctgga

SEQ ID NO: 2425 - DNA, 13293 bp, synthetic construct
  source 1..13293: mol_type = other DNA
  misc_feature 1..13293: note = Synthetic
aggcgtcaggtgctccggtatcttttgccgctcctttgactttcaacggattcgtccattccggtcagctggtgtacaatgatatgtttaccatctatccttttgagaatcagctttatgtcgtaaagatgaaaggtgatgagatcaaaagctatctggaatattcgtatgatatgtggataaataccgtcaagagttctgatgatgaccatctgcttaagattgtacgcggtgaggatccccgcactggccagaaaagatattcatttgtcggacggtcgtataattttgattccgcagccggtcttttctatactgtggatgttaccaggccttacggttcaagggtcagcataacgtctcttgcggacggtacccctttctccggagatgcgtattatgatgtggcgatgacttcataccgtgccagcggggcgggctttatgacaggagccggtatcagtgaagaggaaatgcagacacgtgtcgtggctcgttatcctgagatccgcaatctgctttacgactatcttcaggagtatggaatgatagattcggctgtcataggagaccgctctgtcatcggagaatggcatttcattcctgaaaatatagccggacctctccttgacaaggatatgtcgctccttttcccgaaacgcagataacacctgttgcatattgttgaatcgtgccggaatccgtatggactccggcaccgattttttactgacctgtccaatcggcgtggatgttgtattttgtagggaaaataaaaatattgatattatgaaacttcattcaggattaccttattggatagtcaaaaatcagctttttgattattataaccctttgcggaaagacgtatccgcagatgttgtcattgtaggctccggaattacaggggcacttgccgcacacgaattgtgcaaagccggactggactgttgtgtggttgacaaaagaagtatagcgactggcagctcggcggccagcacggcattgctgcagtatgaaatagacctgcctctgcatcagcttgcagacaagataggtgaggaaaacgcggcttttgcatatcgttcctgccttgaatcaatttctgatcttgaaaggatactgaaggaaaccggggtcaatgccgattttgaacgtgtgcctacggttttctatgcaagcgatgccaaaggtgaggacatcataacaaaggaatatgaaatgcgcaggcgtcataatctgcctgttgatatgctgtccaaggaggatctgaagagacggtacggtatggatacttatgccggggccctgacaaacggtgaatcagcgcaggctgatgcctataaggctgctgtcggtctgctggagcatcatcttggccgtggtgatctgagggtatatacccatacggaaatcgctgatatagaagagggaaatgatggctgccgcttgattaccgttgacgggcataccatattctgcagatatgtcgttgtcgctaccggattcgaggcagggcgtttccttccggaaaatgtgatgaaactgacttccacatacgcattgatttctcatcctgtcgacagcaggcttatctggccggaccgtgcccttatatgggaaacggctgatccttacctttatatgcgcacgagcagcggaaacaggataatcataggcggtgaggatgagaatttcgggaatccgaaacgtagggacaggctgttgcgcaaaaaggtcaggaagctggaagagaagttccatagtctgtttcttgatattcctatgacagcggagatggcctggtgcggaacattcagcacgactgatgacggtcttcctttcatcgggccttgggatgacggggaccgggtgtattttgacctcggatacggtggcaacggcattatattcagtgtgataggtgctcagataataaggagggcattgacggggtgtcccgacagtaatgatgagatattcggtttcaagagacttgactgattgcatatttcattatatataagccgctggttcaaatatacgtcctggtctcggcatagcaggataccggatcatagtgcttgcgatgttgtgaattgctttcaaactttctgtctttgaaccactgacaatagttatgatgtggccaaagatatgttacacaacaaattagatggtgttgtcagaaaataaaaaatgcggcagattctgttgcattttttattttatcataggcttggagattctgagtaggtcacggggaaaatctcgtgtctccagctgagcttatgtaattgttgtgtagtccatcaacaatacacggcatcgggagtaccaatcctgccttcctgggtgggctcttataacgcattgtttgtcaattggttataaaacggtatgctctatatgggatatactgttttgtaatatattgattttcattgaattgcagagacccacctggtcgcaggtctgggccatagccatcatactgggttcagtcaatcactgtggggcctattgattcatacaagtaaatcgcaaatcgctctgtaaactgcaatctgcctccgagacccttaccctataacctgctgaccgtcaggtatatacaaaacagtatgccttgtatatgatatactgttttacaacttgttgatatgtagtttgttacacggacccaccggcattgtggccggtggactccgtatgtatgttgattactccgtgaggcacattggctttgctgctgtgtggctggtatgatgctccattgttgactttatggtctcggcatagcccaaataaatttggtctctgctctcaactttgactatatttgtgctgacactggatatacgtatgtgtatatttgacaaaagttatatataatgaagaaaatatcattgatttttgctgctgttgccttgttctgtgcaacggagatttcagctcagattacagtcgtgaagaacggcaaggccaagtcaagaatagtattgacaacggaggaaaaggcagattcggttgctgcttctctccttcaggattttgtccataggatcagcgaggctatgattcctgttgtcggctatgataatatcggaaaagcaccgcacaagggtgatatccttattggaaatggccttcagaatttccttggtgcagttcctggggatgacggaaagaatatttctgacggcttgaaagaagacggtttcagactgctgactggcaacggaatgctccggattgcaagcggaggagacaaaggaagcatctatggtgtcgttactctgcttgagaaatatctgggtgtcagctattggggagaaaatgaatattccctttccaagtcgtcggacattcagctgccttatataaatgagattgacaatccggctttcagataccgtcagagccagttttacgggatgcgaaatgattctgtatataagctttggatgagattggaagaaccctcggatatgtttgccggaggatattgggtacatactttcgacaaacttcttccgtcatcgcgatatggcattgaacatccggagtattattcgtatttcggcggcaaacgtcatccgggcaaggcaagccaatggtgtctgagcaatccggaagtctttgaaatcgtgtgcgaacgtattgattccattttcaaggccaatcctgggcgcaatatgatttctgtcagtcagaatgacggcaactttaccaattgccagtgtgatgcctgcaaggctatagatgaatatgagggcgcgttgtcgggaagtgtcatacattttctcaacaagcttgcggagagatttcctgacaaggagttctctactcttgcatacctttatacaatgcagcctccaaagcacgtaaagccgcttccgaatgtgaatattatgctttgcgacattgactgcgacagagaggtgactttgagggaaaatgcgtccggacttgagtttgtggaggcgatagaaggctggagcaggattactgacaatatcttcgtctgggactacggtatcaatttcgacaattatctggctccgttccctaatttccatattcttgcggacaatatccgcctgttccgggaccacggtgccaatatgcacttttcgcagattgcaggcagtcgtggaggagacttcgcggaaatgcgtacctggttggtttccaaattgatgtgggatccttcgcttgatacggatgaacttatgcatacgtttctggagggctattacggtgctgccgccccttatctctacaaatatatcaaagtgatggaaggggctctgataggaagcggtcagaggctgtggatttatgattctcctgtgtcgcataagcacggaatgctcaagcctgagctgatgagacgttatatggctctttttgaccaggcggagaaagctgttgccggtgacagtgtaaggctggcgcgtgtgcagaggacgaggcttccgcttctttattctgaacttgagattgcaaggtcggagaaaaatatggatatatccgagttgagtgaaaaactggattattttgaacagcaggtaagactgtttgaagtgccgactctcaatgagagaagcaattctcctgtagagtattgcgagcttttccgcagcagatatatgccgagtgccgataaaagcattgcggaaggagcctctgtaattttcattgacgctcctgagaaggcatatcaggaacttggcaggacggcattgacggacggtctgtatggcggtgcaggttttgtcgagggatgggtcggctgggaaggccgtgacgcttcgtttgtaattgatcttgatgaaatcaaggaaatacataccatagaaactgattttctgcatcagctcggagcgtgggttcttcttcctgtacaggtgtcgtatgagatttcatctgacggtgaggaatatgctttggcttctgtcagggatcttcctgaggacaggagtgcgaagatacagtttgtgggagtaagacacgatttcactgaaccagcccaggcgagatatatcaaagtgaatgtaacaggtaccaagacctgccctcattggcattacggagtagggcatccttgctggttcttcatcgacgaggtcagcgttttttaggcttgcagcacgttgccgtctaatattgtggccgcctaacatcgttgccatcttaatattgtggctgtccaataccgtggccatcagactggagaaggtctgatggccacagtatattattacccagtgtatggtttgtctggaacagatagcacaacaaagaaatatttgacacaggatttggtggattgggattcttgctcccctccagatgagtacttatggtgcgtctattcaaaatgctgtgtataagtatattgcagggaattaccttggctcggaaacttcgggcaaacaaaaaaagaaaagcgagactccgatggagccccgctttaaatgttttcacaacggaataatccttattgcgaattgcttcaaactttcacaaaggtagaaaaatatttttgatttgcaatttattgcgtaaattcaaaggtttttatatcgcaaacctctatgaaaagaatactcggactggacctcgggaccaacagcatcggctgggcggtggtcaatgaagctgaaacaaatgaagagaaatcgtcaattgtcaaattgggcgttcgtgtaaatccattgactgtagatgaaaagagtaattttgaaaaaggtaaaagcataactaccaatgctgaccgtactttgaaaagaagtatgagacgcaatctgcaacgttataagctgcgccgtgatgctcttgtcggacttctgcgtgaaaacggctggatcactgaagatactgtctttgccgagcagggtaattttaccacattccagacattgggactcagggcaaaggccgcttccgaaaagatttcacttgaagagttggctcgagtgctgctgtccatcaataaaaaacgcggctataaaagttcccgtaaagtacagggcgacgaagaaggtcagctgatcgacggaatggacatcgcaaaagtcctttacgaggacgggaagactcctggagagtatgtttacgaaaagctctcgtcggatataaactacaaagcacctgacttctaccgttctgacctgcagaatgaattcgaccggatatgggacgcacaaaaggcgttctatcctgatattcttacagatggactgaaggaagaactacggaacaaaaacgagaaacagacctgggcgatatgccgggaaccattccagatagaaggtatcaaaaggacagcaaaagggaaggaactggtcaaggaaaattatgaatggagggtaagggcgttatcggaaaaactggacttggagtccttggccgtcgtcctgcaaaaaatcaattcacagatcaggaattcatcaggatatcttggagacataagcgaccgtagcaaggagctctatttcaacggtcagactgtcgggcagtaccagatggcacaacttgagaaaaatccgaaccatagtctgaaaaaccaagtgttctacagacaggactatatggatgagttcgagagaatatgggaatgccaggcacggtatcataccgaattgactccttcgctcaagcatcagctcagagacatagtcattttctatcagcgaccgcttaaaagtcagaaaggcttggttagcatctgcgaactggaaggcagacaggtagaagtggaggttgacggcaagaaaaagagaaaaactataggccctaaggtctgtccaaaatcatccccactgttccaggagttcaagatatggcagatattgaacaatgttaatgtaaacaggagatatcttacgcaggaggaaaaggaagaactgtacgaccgtctgtgtacgtgcgataagctttcaaaatccgaagtgatgaaatatctgaagcctgatgagtataatactgagtgggctcaggactccttgttcgcgccggatgaaatgtatgatccggaaatactttcaagaaagcatcgtaacaaaaaagaaatcaatctcaattacaaggaactcgagggaaacaggactatggcggcattgcttgcagcctattccaaaataatcgtggcgaccggacacgaagaatatgatttcagcaagaagaagttttccgaagccgtcaaaatcatttcggatgtcttcagaggccttggctatagaaccgatttcctgcattttgattcatctttggagggcaaggcatttgaagaacaggcgtcgttcaggctatggcatcttctttattcatacgaaggtgacaattccgtgtcaggaaactacaggcttatttccaaaatatcggaaatcactggcttcgaaccggaatatgcaaaaatattggcggcagtatcatttgcaccggattacggcagtctcagcagccgggccatgaagaaaatcctgccttatatgaaagagggcaacacttatagccttgcctgcgaatatgccggatacaggcattcaaagcggtctttgacaaaagaagagcttgaaaacaaggaatataaggacaaattggagtctctcccaaagaacagtctgagaaatcctgtcgtcgaaaagattctgaatcagatgataaatgtcgtcaacggtgtgatcgatgaatacggcaaacctgatgaaatcagaatcgagcttgcaagggagctcaagaaaagtgcaaaggaaagggaggaaatgaccgcagccatatcaaagtcatcaagagagcacgatgaaatacggaaaaagcttattgatgaatttggcatagagaatccgagccataacgacatagtaagatacaaactatatgatgagcttagaataaacggatacaagactctgtatacaggaacccgtatttctcgggagaaactgttctcgaaagaatttgatattgagcacattatccctcagtccaggaggtttgacgattcgttttcaaacaagactatagaggcgcgtcaagcaaatattgaaaagggaagttccacggcatttgactatgtcaaagctaaatacggagaggaaggtgcaaacggataccgtggccgtgtagagaaacttcttgcagaaggcaaaataagcaggaccaaatataggaatctgcttatgaccgagtctgaaatacccgatggcttcatagaccgggatttgagggattcgcagtatatagcgaagaaagcacgtgagattttggaaagcattgtgcgcgatgtggttccgacaaccggttccattacggacaggcttcgtgaagactggcaacttgtggatgtgatgaaggagctgaactggaaaaaatatgacagtctcgggcagacatatacatattacgacaaggacgggaggaccgtcaggaaaatcaaggactggacaaagcgcaacgaccacagacatcacgctatggacgcgctcacaatagcctttaccaaaagaagctatatacaatacctcaacaatctgaatgcaaggataagcaaaagcgtggatgacgctccgtcaattgatttgagcgactatgagttgaggtacattccgaagtctgaaatgacaaaagtcgtacgggctatcgagcatagttgtctttacagggacaacaagaataaactgcgtttttgtcctccgattcctcttgatgaattcagggctgaagccaaacggcagcttgaaaatacgcttgtgtcaatcaaggctaagaataaagttgtcacaaggaatacaaacaagacgaaaaaacaaggtggtgtaaattctaaagtacaattgactccaaggggccagttgcataatgagactgtctatggcagtatcaggcaatatgttacaaaggaggaaaaagtcgggtcaggatttacccgtgagaaaatcgcgactgtagccaatgccatttaccgtgaggccttgttgtcaagacttgcaactttcgggaatgacccacaaaaggcgtttacagggaaaaacagtttggaaaagaatcctttgtatgccgatgatctgcatacggttcaggttccgcccaaagtcaagactgtaaattttgaaaatgtatttacaattcgtaaagaagttaactttgaaaacttcggaaaatcaggaaataaaaaattagacaaaaatggagtaatcggaaaattacattcaataatagatataaaaataagagaaatacttattaagcgatttgaagaatctaattttgacgcacaaacggcatttagtaatcttgatgaaaacccgatatggctaagtaaggaaaaaggtatttcaataaaacgagtggcaatccgcggagtaaacaatgctgaacctttgcacgaaaagcgggacaataatggaaatgttatcgttgacagtaaagggcaaaggataccttcagattttgttcagactggaaataaccatcacgtggcaatttatcttgacacggatggcaatcttcaggaacaggtggtgtcgttctatgaagccgtcgcgcgtgtcagtatggggatgcccgttattgacagggaatacaagaaagatgaaggatgggaattcctgttcacgatgaagcagaatgaatattttgtattccctaatccggaaacaggttttgaccctaaggaaattgacttgatgaatccgggcaactactcgattataagcccgaatctgttcagggtacagaaaatagcaactaagtattatgtatttagacatcatttggagacaactgttgatgatagcagtgttttacgtgacacgacttggaagcgtatacagaattgcaatggattaaagggtgttattaaagtccgtataaatcatataggacagattgttcaggtgggagaatattaacatttaaagtgcagaggatatgagcaacatcaaactttttcaggacaagaaaattcgttccgtatggaatgaggaggaggaacaatggtatttttccgtcgtggatgtcgttgaggcgttgacggatagcgtagatcccaaacagtatattaaaaagctgagaatgagggatgaacagcttgatttcaactggggtacaatttgtaccccagttgaaatggttgccatggacgggaaacggagaaaaatacaggcagccaatataaaaggccttttccgcatagtgcagtcgataccgtcgccaaaagcggagccgttcaaattgtggttggctcaagtaggatatgacagggtcatggaaatagagaatcctgaacttgcacaggaaaggatgaagtcgctatatgagcagaaaggatatcctaaaaattggattgacaaaaggttaaggggcattgccataaggcagaaccttactgacgagtggaaacggaggggaatagaaaccgacagggagtatgctatccttacggctgaaatttccaaggcaacttttggcttgactccgactgaatataaggacatcaaagggctgcacggcaaaaaccagaatctccgtgaccacatgaatgacctggaactcattttcactatgcttggagagcgcgtgacaaccgaaatatcggaaaaagaggctccggacacgttttcaaaaagcaagaacattgcgaaaagaggaggcaatgtggcaggtattgccaggaagcagacagagaaggaacttggaagaagtgtaatatctacggaaaacaatctgtacttggatgacagcgaagccgccgatgacataacgggtaagctgtttgacggtaaataagcatttgttatgatcaaacgcacattatatttcggaaatccagcatatctgtcccttaagcttcagcagatggtgataacatccccgtcaaaagaaggcgaggctggaaaaggcgaggtgcgtacaatccccgtcgaagacataggggtcgtgatactcgaccataaacagataaccataactcaagggcttatggaacagttgattgacaacaattgtgcgataatcacttgcggaagcagtcatttgcctgtagggctgatgttgcccctatatgggaatacagtgcagaatgaaaggttcaggaatcagattgacgtctcattgccgctgaagaaacagctctggcaacagacgatacaatacaagattgcaaaccaggccgctgtcctgaaatatgttaccggagatgtgcacaagaatatgtatgtctgggcggattgtgtgcgaagcggtgatgtggaaaatatggaggcaagagcggccgcatattactggaaaaacatatttcccgacagaccggactttaccagagggcgcgaagaggccgaaccgaacaatcttctcaactacggatacgccatattgagggccattgtcgcaagggcactggtagcaagcggtcttctcccgacacttggcatacatcatcacaacagatataacgcctattgtcttgccgatgacatcatggagccgtatcgcccgtatgtggacaagattgtctatgacatagtatcggaaggaggaacctttgagctgacaaaggagataaaggtaaaactgttgtcaataccgacaacggaggtattgataaacgggaagcgcagtccgcttatggtagccgtatcacagacaactgcatcgctcgcgaaatgcttcaacggagaatcaaggaaattgacttatccggaaatgacatagttaaaccgacggtccaatatgaacgacaggttcagtgaatatagaattatgtgggtactcgttttctttgaccttcctacggatacaaagaaagagaggaaggccgcagcggaattcaggaagcaattgctgcttgacggattccttatgttccagttttcaatttatatgcgccactgcccgagtgtcgagaacgccaatgtccatataaaacgggtgaaggcaaatctgccccctctcgggcaggttggaattttgtccatcactgacaagcagttcggtgcaatggagcttttttccgagaaaaagaccaaggaacctcctaccgaatacatgcagcttgagttattctgaaaggtgacttggaaaatgacgcgtcagcaggcctgccgtttgattgacacctatggcatccgaagcaacaggatatctgacatagccggattccgcgactgggtgggtctccacaacacaatgaaattcaatatattataaaacagtatatcccatatatgacatactgttttacaaccacctgacaggcaatacgttataagcacccacctatagagggaccggattggtagtcccgataccatatattattgatgggctacacaataattacatgagttcggcggaggcgcgagattttcccaatgacctgttcagaatctccaaacctatgaaaaaataaaaaatgcggtaatctttgccgcattttttattttctgacaacaccatctaatttgttgtgtaacatgtctttgaccatatcgtactgttgtcagtagttcaaagatagaaagtttgaaagcaattcacaacgatgctccaaaacattggtgaccagccactactgttgtcagtagttcaaagatagaaagtttgaaagcaattcacaaccgcccctctcattgcttatcagctttcttgactgttgtcagtagttcaaagatagaaagtttgaaagcaattcacaacctctccactatctccttacccttatcagaactgttgtcagtagttcaaagatagaaagtttgaaagcaattcacaacgatgaaatctccctttttgtctcagattcaactgttgtcagtagttcaaagatagaaagtttgaaagcaattcacaacctgaatgatgagagccttaacggtacaaaactgttgtcagtagttcaaagatagaaagtttgaaagcaattcacaacctctttttcagcaggaacgagtatcttaatactgttgtcagtagttcaaagatagaaagtttgaaagcaattcacaaccagattcagcgtgatagattttaacggcgcactgttgtcagtagttcaaagatagaaagtttgaaagcaattcacaacggtaaccaagtttctgcgatagacaccaccactgttgtcagtagttcaaagatagaaagtttgaaagcaattcacaacaatttttactttatgaatccaaattaccaaactgttgtcagtagttcaaagatagaaagtttgaaagcaattcacaactcatcaaagatgacatagagcaaaactcttactgttgtcagtag

SEQ ID NO: 2426 - DNA, 13109 bp, synthetic construct
  misc_feature 1..13109: note = Synthetic
  source 1..13109: mol_type = other DNA
gtccaagtggttggtaggctcatccaaaagtaataactcaggcgcttgcaacatcatttttgccaacaaaaccctcattcgccaacctccactaaattggtcgtatgggcgctgcaaatcttcagttgtaaaaccaaggccttctaatacttctgcggttttatgctccatttcataaccaccggctagctcaaaatcatgtagtgcatggctataatcgtctaataatttctcgtcgtcaggcttagtttcgagctcaagcaaaatatcgttcatgtcttgctctatcttatgagcgcgctcgaaagcttgcatgcctactttaagtatagattcgctggtagaaaaactcaataagtcttggttaaagaagccaagacttacatcttttggtttatttatggtaccactttccggagagtatgcaccggtcatcagtcggagcaccgttgatttaccggctccattaacacctacaagtccaattcgttcattattgcctatttgccaattgacatcttcgagcatggtacgtgctccgaaggaaaaacttaaattttgtaatgaaatcaacataagggcgcaaatttacgatatgcttgcctaaaaaatgaattggaggaataacttaattctaaatggttagaatggttgaatagatcggtaaataaaaagcccgaaacgtcttgcgtgtcgggctttttatttataggaaaatagaacagtcttaaatgatttctaccaattcaatatcaaaagtcaattctttacctgctaatgggtgattagcatcgagtactactacctcgttttttatttctacaattacgacaggaaaattatttccttcggcatcgctcatttgtagctccatgcctatttcaggtttcatgtcatcaggaaaatcactcaatggatattcaatatacatgctgtcagaagcttctccataagcatgttctgctggtattactactgtttttttatcaccggtttgcatgtccacaagggcatcatcaaaacctttgataacttgaccactacctacttgaaactccaatggagctcttccttcagaagagtcaaatgttgatccgtcttgtagttttccgtgataatgtacgcgaactttatcgccattttttacttgttgcatatctttttaaaataatgtgctgcaagttaaagatattatatctgaaaaggaactttacctttatccaaaattgttaaataattatgtcgtttaaattaatatttgtccatgtgtctgctaggtattgtgctttttttgctatgtttctggcgctttcttcaaattatgcatttggattggaaaaggagtccttaaaaataacgactggtgcggaacaaatgaccgtgtatttgccactattaaagcataaaaatgttgcggttattattaatcaaacttctattgttggacaaagctctttattagataccttactgaaatcgggagtacatgtggtgaaaatatttgttccggaacatggtttcaggggtgtcgcagatgccggagcgaaaataaagaatgatatagatgcgactacaggtttgcctgtcatctctctttatggcaagaataaaaaaccaagtaaggaacaattgaatgatgtggacgtacttatctatgatttacaagatgtcggggtacgtttttatacctatatatctacgctggaatatgctatggatgcctgtattgaaaatgataaacaactaattgtaatggatcgtcctaaccctaatgggtcgtatgtggatggcccggtattggatacagctcttcgttcttttgtaggaatgcaaccggtgcctgttgtttatggtatgacagccggagaatatgcattgttgttgaagggcgagcattgggtcaagaatgccgatcgactgtctattaaagttgttgcatgtcaaaattataagcacagtatgcgttacgagttaccggtggcaccttcaccaaaccttaaatcaatggctgcagtttatttatatccttcactttgtttatttgagggtacagttgttagtgtaggccggggaacgaatatgccttttcaacaatgggggcatccggattttaaagatcatgcaacttatttttttacacccaaaagtactatcggtgctagtaatccattgttggctgctcaaaactgttatgggcaattggttgcagctgatgcggatgttgcttttgaacgggtgaacggaaaatttgatctgtcttatttgataaaggcctatcagtggtattctaaaagagaggctttttttaatccgttttttgaaaaattggcaggtacgaaaatgctgagcaaacaaatagaacaaagtatgaccgcagatcagattcgtgctacatggcagccagccatagaatcgtttaagaaaataagaaagaaatatttgctctatgtagagtaaaaaaagctagcagtatttggtcgcagcacttaaatcggctattctggatgcgtctttttcaattgcattacctactactatgatgtctgcccccgcattgcaatttgcaatcactttttgagttgtattgatacctcccccaacaattaatgggatattgatattgctgctcactttttggatcatagcttcgcttatggggcattgggcaccgctacctgcatccatatatatgaggtgtttcccttgcatttcacctgcccatgcagtgcataatgcaatgtctgatttgtctgaaggaataggtgatgagtgactcatataggaaactgtagtaggaacacctccatccacgatcatatagccggtagaaatgacttcgagcccacttgattttaccatgggagccgacactacatgctggccgattaaaagctctgcatttcttcctgaaataagtgagaggtagagtagggcatctgcttcaggacttacttgtgaggggttgcctgggaataaaagaaccgggatattgctgttgtctttgaatatattgatgcacaaaccaatttggtgttgaaggactaaactgccgcccacaaataaaaagtcaactttggcatcattgcacgaccgtgcaaattgctccattttattggcagtaattttatccggatcaactaaaacggcaaacccatgtttgccgtttttcttgaacgaatttattttttcaagtataatgcccacgtattattttttgagtaaatcgcgaatttccagtagcagcttatctgtgctggatggttctgccggtgctttaggagcttctgcttctttacgtttcattttattgattccttttaccatcataaagatgcatagcgcaataattaaaaaattgaacaccatctgaatgaaattaccatacgcaagtacagcccctcctccttttttagcttcttcgagtgttttgtatattttaccgtcgaaagcataaaacttgtcaacaaaactcgtgccacccattacagtgccaatcaagggcattaaaacgtcatctacaacagatgtgacaattttaccaaatgcacctccaataacaacaccgacagccaagtcaataacattgcccttaatggcaaactctttaaattcttttaaaaagcccatagttgtgattgttttttagttgtagcaaatgtataaaattttcgataataatttgttttttaaacactagctttgtgtaagaacagattgcctgttttttttggcatattgtttgatagtgttttaaaaacttaaataatatagaatatgaaaactaaaatgatgagaagaattagtgcttttgtagttgcaggtttgtttgcatttaatgcaagtgctcaaaatgctcatgaggtaagtgtttctattaataaagagacaaaaacggcttttcaggccgactatccggtttcggatgatttgattaaaatcacgttggaagatagattaagaagcgccaacttacccaagggaaaaagcgcaaaaggttatacactttataaagaagttgtattccccgaattgagtacaaacaaaatagatatttataccaaggtcgatggtaagaaaacaaatgcaacgattgtgatgcttgtagctactggttatgataattttattagtagcagtaatgatgcagccactgcagctaatgttattgcatttctgaatagattagtcagtgatgctgctactatgcagatcaaaataaacatcgcgaatcaggaagatgtggttaaaaatgcagaaaaagagttgaaaaagaccaacaacgacaatgccgatttacttaaagacaaagaaaaaatcgaaaagaaaatagtagagagtaattcgactgttgataaggcttcaaaatcattggatgctgagagagcgaaactggaaagcctaaaggcaagtttaggcaagtaagctttagttattaaaatgtgtcagaaaagtcgagccgaataatattcggttcgacttttttagaataataactttttatacataatatttttagaagtctagttgttattttgcacaagagttgaaaaatattattctacatattgttataggactgttttgccttgttttgtttacgacgcatgtaaatgcgcaggactcaaccaagcgcaatgtattattgggtgcggtagtagttggtaatgatactattcccatggtctatcttgatgaagtgattgtatatgctaagaggtcaagacgatatgcgcgacaactgcgtcgggaggagcgtcggaatgaacgtaatgatgctgcatacgcacgattaagatataatgtctataaagtttatccttatgctgttactgcagcttatctgctcaagggggttcatgaaaagcttgaacgattaacagataagagagaacgtaaagcctatttaaaaaacctggaaacggagttgaacaagcgattcaagggagagttggaacagtttagcattcaacaaggtatcgtgttggtgaaattaattaatcgacagacgggacaaaattgtttcagtattatccaagaggtaaagggtggctttaatgctgtggtttggcaaggagtagccttattgttcagtaataatttgaaacgagaatatgatcctcaagacagggataaagacattgaagcaattgtgcaggaaatagaaggaactgcaaaaaaacgctcctagtgcacttaatgattacttacaaattttagccctactatagatccgataagggtaacaataaaaaacagtcgccaaaaatcggctggttctttaaaaaaaataatacccattataacagtaccaacagcaccaataccagtccacacggcataagcactacccataggtagcgttttagttgcgagatatagcaaatacatactgcaactaaggcttagaaaaaaacctgcggtccaccatatagccaatgatccactttgttctttcgcatttacaagacagcttgtaaatgcaacttcaaacagacctgcaataattaaaataagccaattcattttttaacaataacgatgaaagtcaaagttaggctataattttggcttcgatttaagcacaatatgtttatagatacacatactcatctgtacgatgaacaagaaatagcggaacaggatatagttatacaacgggctattgatgctggcgttagcaaaatgtatatgcctaattgcgatagtcaaacaataacaggcatgttgcaaatcgcacaacgatttcccaacaactgttttgccatgatgggcctgcatccctgttatgtaaaagaaaagtttgaagaagaattggctgtcgtagaagcttggttgaaaaagcaaaagtttttcgcagttggtgaaattggattggattattactgggacaaaacttttgctgcacagcaacaagtggcttttgaacagcagattgattgggccttgcaatatgatttgcccattgttattcatagcagggaatctaatcaggaatgtatagaaacggtgcaacgaaaacagaatggccaattgaaaggaatatttcattgttttagtggtactgcagcacaagctttacagatagtggagttgggaatgtatattggtattggtggtgttgtaacgtataaaaaaaataatttgggagaagtgttgactactgttgatttgtcttcagtagtgttggaaacagatgctccttaccttgcacctgtgccttaccgaggtaaacgaaatgaaagtagttatatcccatttatagcggaaaagatagcagaactaaaaggaataactattgaagaagttgctgaggtaacgacttctaatgcaaaaaaaatatttagatagctaagtttgttttcatacatttgcagcccttccacattttagagaggtgtccgagtggttgaaggagcacgcctggaaagtgtgtatgcgggaaactgtatcgagggttcgaatcccttcctctctgctaaaagcattattaaaacttaaaaagcctgtaaatccattgatttataggtttttttattttgttacggtagtcaaatttttcaaaatcaatcaaaataaatgtgcgtcattcgtggcacttgtagtttctaaaaaaagacgcacgattatttaattaaatgattgatttacaatatgttcattagataaacatcttgttctgaagagatagtatttccaattttgtttaacgttaaacgttttattatgttggaaaaaagctttgggttgctattctttttgaaacaatccaaaatcaaaaaaatattacccggtatgtctatttaagaattaccgtagatggagtttctaagatgtgacattcatttacccttacgccagccaatgctctaagaggaaacgttaactgaaataagcgagcagtccaaggagcctgaagccattgacgaataagtggtgtgccaggatccgcatgtggtatgtggcagtctgtgaacaggataagctacaagtcggaggccaagtatagtgtaataacggtcgtgcaggttgatggggtttatagatacactacaaatcctgttattaggtacagtagttctgctatgtggctattacaagtaaaacaacacactatttcgctagtgtttttaatgattattaatataaggtcttatttattgaaatgttttttcaatttttagaaaatcgtggaaatttcctcgtttttctaaacaaagctgttttacttttagtgcgaatgaaaactaatgtatgatctgtatggctttgtattcaggataagaagcataaaaatgccccgcagataggcgaggcgctaaatgttttcacaacggaataatccttattgtgatttgctttcagagacaaaactaatagcaaaaaaaaataaaacaaaataatttatgaaaaacattctaggtcttgaccttggcactacttctatcggatttgcacacatcatagaaggaaatacacctgaacaatcttctattgtgaaaattggggtacgcgttaatcccttaactacggatgaacaaaccaattttgaaaaaggcaagcccgtttcagtaaatgctgatagaacattaaagcgtggagcaagacgtagtttagaccgttatcaggacagaagaaaaaacctgatcgatgctttgcgtaaagccaatattatttcggcagaaacaatccttgccgaagatggcaaaggaacaacacatagcacttatgcattccgggccaatgctgcaattacagaaattccattggacgcttttgccagagtattgcttgctatcaacaaaaaacggggttataaaagcagtcgtaaggccaaaagcgaagacgaagggcaagctattgatggaatggcaattgctaaacggctatatgaaggaaaccttacgcctggacaactagcctttcaattgctgaaagatggcaaaaaagcgattcctgatttttaccgttcggacttgcaggccgagtttgataaagtctgggattgtcaaaaacagttttatcctgaaatctttactgatgagttcaaaaaagaattaataggcaaaggacagcgagccacatcagcaagcttttggggcaagcataaattcaatacggcggagaacaaaggaacaagggaagacaaaaaaataaatgcttatcaatggcgtgctaaagctgtggacaaacaattattgaaagaagaagctgcgtatgtgattaccgaaataaacagcaaccttagtaattcaagcggctatttaggtgccatcagtgacagaagtaaggaattgtattttaataaagaaactgttggtcaatacctgtataaacaattacaacagaatccgcacacaaaactaaaaaatcaggttttctacaggcaggattatatggatgagtttgaaaaaatatgggaaacgcaagctagatttcacaaagaacttacgcaggaagtaaaaactgaaataagggatattattatattctatcagcgcaaattaaaatcacaaaagggtttgatcagtttttgcgaatttgaaagcaaaggaattgagatagaaaaaaacggacagaaagtaaagaaaacaatcggcttgcgtgttgctccaaaatcatctcctttgtttcaggagtttaagatctggcaggttttgaataatgttttaatccgcaaaaagggaagtgaaaaaagagttgtaaaggaaaaaaaatccgctggtctattagaggaacaaaaagaagtttttccatttgacttacaaactaagcagcttttgtttgaggaattgaacattaaaggcaatttaaaatctaataaaatcattgaactattaggttacaatgcaaaggactgggaaataaattacacagagcttgaaggcaacagaactgctaaagctttgtatgatgcttactttagaattttagaacaggaaggttatgatgaagatctattaaagttgtcggacaaagatgaaattaatattgctgagttaaaaacctctgctgttgctatcaaagaaatggttagccgcatttttgaaatattaaagattaatacagaaattttagagtttaatgcagagttggacggtaaagcctttgaacagcaggcatcttatcaactgtggcatttattgtattcttatgaaggagacgattcagcaagtggtaacgaaaaattgtatgaattgctaaagaagaaatttggctttaaaaaagaacatgcacagattttggccaatgtagcgttatccgacgattatggcaatttaagcagcaaagcaatgcggaatatttatccgcatattaaagagcaaacctatgacaaagccgcagccattgcaggctacaggcattctgcgtcatcacttaccaaagaagaaattgccaaccggccattaagtaacaagcttgaattattgaagaaaaatagtttgcgcaatcctgtggtggaaaaaattctgaatcaggtagtaaatgtggtgaacacaattatagaaaccaatagcgaaaaggatgccgatgggaatattattaaacacttcaggtttgatgaaataagaattgagttggctcgagatttgaaaaagaatgccaaagaacgtgcagaaatgaccacgaatattaacgctgcaaaaattgctcacgacaaaatatttaaacttttacaaaatgaatttggcattcccaatccgacccggaatgacattatccgttataagctttatgaagaattgaagaataatggctataaagacctttactctaatacttatattcccagagaaattttattcagcaaacagattgatattgaccatatcattccgcaggcaaaaatgtttgatgatagtttttctaataaaacagttgtgttcaggcacgacaatttagataaaggcaacaaaactgcttttgattatatagaaagcaaatttggaatggaaaaggcagaggaatttgtgcaaagagccaaaaccttatttgatttagctgtaaaaagtaaagaagaaggaatttcaaaaagtaagtttcaaaaattacaaaaaagagaaagcgaaattggtgacggctttattgaaagagatttacgggacagtcaatacatcgcaaaaaaagcgaagaatatgctgtatgaaatttgccgcattgtaacgccaacaactggtagcattactgaccgcctacgcgaagattgggatttaatcaatattatgcaggagctcaatttcgacaagtttaagaaattaggtttaactgaaatggtggaaaagagagatggaagttttaaagagcgtattacggattggagcaaacgtaatgatcatcggcaccatgcaatggatgcgttaaccgtggcatttacaaaacatagccatattcaatttctcaattttttaaatgcccgaagaaacgaaatacatcaggaacacagcaatattattgccattgaaactaaagaaaccgaattggtaacggacaaggaaggtaataaaaagcgcaagtttaaactacctatccccaatttcagagaacaggccaaagagcatctggaaaatgtattagtctctcataaggcaaaaaataaagttgttactaaaaacaagaataaaacaaaattaaaaaatggtgaaaaagtaaaaattgaacttacacctaggggccaattgcacaaagaaacaatttatggaaagtaccagtattatgtaaacaaggaagaaactgttggaggaaaaatggatgaaaccaatattaagaaagtgagcaatccattattcaaaaacttgttattgcgacgtttacaagaaaacggtaatgatgcaaaaaaagcctttaccggaaaaaatgctttatctaaaaatccaatttatttggatgaagcccaaacagaaatattgccggaaaaagtaaatctgacatggttggaagaagattattctatacggaaagatgtaacacctgataactttaaagacgctaagagtatagaaaaagtactggataaaaaagtaaaatacatcctactggcccgattaaaagaacatagtaatgattctaaaaaagcattttccgacttagagaaaaagcctatctggctgaacgaaaccaaaggtatagccataaaaagagtaaccatcagcggtataaaaaatgcagaatcacttcattacaaaaaagaccatttaggaaatgatatcttggatgaaaagggcaataaaatatcaagctcgtttgtaagtactagcaataatcaccacgtagcgatttacacagatgagaaaggtagtttacaggaacgagtagtttctttatttgatgctatacaacttgtaaatgcaggagagcctgttattgacaaaacgtttaaccaaggaatgggttggcagtttttatttacaatgaagcaaaacgaatactttgtatttcccaacgataagacagcttttaaccctaaagaaattgatttgtttgatcctaaaaataaaaagcttataagcccgaatttgtttcgggtacaaaagattgcaagtaaaaattattttttcagacaccatttggaaactactgtagaggaaaaaaaggaattgaatgggattgcatttaagcctcaactgggtttaaatgcaataagtgaaatgattaaagttcgacttaatcatcttggagatatagtaaaagtcggagagtattaaaattagatttaatgattaaacgcaccctctatttcggcaatcctgcttacctcaaaactgctcatgagcaactggtgatagaacggaaggacgaggaaagtaaaacagtgcctatagaagatattggtatagtaatactcgaccatcagcagatcaccattacacaggctttgatggctaagctactgaccaacaatgtaggattgatcacctgtgatagtacccatcatcctgttggtttattcctgaacttggacggcaatactttacagagccagaaattccaggcacagctggctgctgctttacccctcaaaaaacaattatggcaacaaaccgttagcgcaaaaattgataatcaggctgctaatttgagaatacagggtgctgatgaacggccattgcttgctttggctaaaagggtaaagagcggcgacagtgataaccttgaagctcaggctgcggcttattactggaaaaatgttttcccggatttcctgtatttcaaacgggagcgggagggtagcccgcccaataacctactgaactatggatacgcgattctcagagcaattgtagcccgtagtttggtgacgtctggcatgatgccgactttggggatacaccaccgtaatcaatacaatgcttactgcctggccgatgatattatggaaccataccgtccttatgtagataaaatagtctgcaatattgtacggatgaacggtaaatacctggaaattacccccaatatgaaagcggagcttttgagcctgccgcaaatggatgtaatgatcggtggacaaaaaagccccctgatgaatgccgtacaaagaacaaccgcatcattggcaaaatgctatgaattggagcttaaaaatctgctttatcctgtatttccctaaagcgtaataatggcaaacgagtataatattactgattattcacgcttaaatgcttaccgtattatgtgggtgctggtattctttgatttgcctaccgaaacgaaaacggaacggaaatatgctgccaaattccggaaagatattcttgcagatggatttgccatgtttcagttcagtatttacctgcgtcattgcagcagtcgcgagaatgcagaagtacatataaaacgagttaagtcgatattgccagagaaagggcatgtaggtatcatgtgcgtcaccgataagcaatttggtatgatggaaatatatcgtggtcatgccatcataaagacaccggatacggtacagcaactggagatgttctgaaaaaatgtaaaaaaaatgcatttatgggcacaaaaaaacggaccaatggtccgtttttttcttttgtacaatagtacttagatgcaataccagtaagcctttcggcgattcgtgctgtgtaagaactaaggtaatc

SEQ ID NO: 2427 - DNA, 12630 bp, synthetic construct
  source 1..12630: mol_type = other DNA
  misc_feature 1..12630: note = Synthetic
cattgagtttatcacggggaaattgtttgtatatcttacttgattcaacttttcattaagttcgggagtcaatgataaattaaattttagacatactcccttatgcatttccgcatagtgcgcccacattaactcattcataggtttcgcagtgaaactgcaaacactccatccaagcattttcccatacatcagattataaagaccattcatccattcatcgctttttagtcttggtaacatattttcgaagaagctttcttgactaattccgcaaaacgtagggtttgttttctgaaggtcttccaaaaccgacattgatgacgtattgagcaactgtaataagaattggtctgacagagcatatttacaatcatatgggtcattaagctcattttgatgagaaaaccataaacaattagtatctattaggtcaaacagatactgatttatcttatgatacttatatacaatatttggtctcgctgttgccattagttaaaatagtaatcgatttaaaatagcatttcaaatgattatcattattcttagttataagatgtaataatcccatcacttccgccatagaagcaagatggtgtgtggtcatcccaacaccattgataatttacgccatcaccataattagatggattaacatggtttggtctccctctaagataaattagcatatcatatgacattcctatccaatatcttccctgagacaacaatatacagtcggtacttgaccagattggatgtttcttctggattttacctgctttacttttgaaccaattggcatcttgtattacctgttctttatctaattttacttgccgaattttatataaactatccttaaccgtttctatatttgctatcctcaatgtagtgtatttcttaaattcatatgcataggttagtgctgtatcgacattttttgctctcaattgcttgtaaatagtagatagcgaatcaaaattaatctttttgtcatgttcctttaattccaaaagtgcggtataaaaaatataataggctttatcactaacttctaattttcttttttcttcctttgattgacatgagcataggaatattatcagaatgataaaaggtgaaaatttgtttagtgctttcatatcacaaatttataattcagtcaaatttacgaaacaatagattcagcataatattttaaaaaaaaatctacaaatttttattcttgttgttgcccccctgccctaagatttcatctggatttgtaaaaaaaaagttcaatatgaatttcttccttatgtagcaccctgactatatatgtcatgccaatacatgtgttgagttggtcaaggatacaatgaccataaagcgtggaggtagtggtggggaggtggtggcgggaggtggtggcgggaggtggtggcggaggtggtggtgaaggtggtagtggctggattgtattaaaaaaagggtatacttgaaattaatacaaaataaatgctgaaatattagattatatggtattaatgtattacatttgtggtggttctaaatatgatacacatgaatgcgataatttggtcaagagtaagctctaacagtcaagacaaccaacgtcaaatcttaaatctgaaacaggtcgccattgaaaaaggttggactgtgaaacgtacatttgaagaaactgtgtctggtacggttaaaactactgaacgcaaagaatttaataagttaatggaatacattgctcaacacgacattaaattagtgcttgttagtgagatttccagaatcggtcgtaaagttgttgatatcttgaatacagtggatgcattccacaaaaacggtgtatgtctttacattcaacaattcaacatgttgtcactaaatgacggtaaagagaatcctatggtaatgcttctcctgcaaatgctttccattggtgcggaacttgaaaataaacaacgtgcatcgagacaacgtgaaggaatcgaactggcaaagcttaaaaacaaatacagcggcagaaaagttggaagtaatggcgataagcaaaaacagttaaccaaatacgccagtgttgttgacttgctaaaaaagagtgatttgagcgttcggaaaattgcatcaataactaaattcagcattaataccgtccttaatgttaagaaactaatagcggcttaacttatccgaaatcctgaaaaatgaaatgtgctgcgctacacgcttgtaggcagcacattttaacaatatgcttgctcataatatctattgattagcgttagccaagaatcctaataatatcatgtatctgattaacatttgtatacaaacctcatgtataatcaccgctactttcacattcaaatgattcgagttcttaaacagccaagaaggaacattaaatcgccattatagtacacataaggtctatgaatgatattcgctactggcaattaaagttaacagttcaactgtttctttttctggttgctctaccgttttactattgatgattcgtattaattccagcatcctttcaagctcggtaagattcatgtatatgttttcacatacgatattgtttttcatgtctaatcaatttaagtgtttcattagttattttttgcggcttttcgccatttcttttcattactgcgaaaatattgcatcagtgttggctttccctgcaatatcctgtctattgaagctaaaaaatgcatatttgcttcaattgcttctaaaatcaaaaaatctggctgtaatggttgtgactgtttgaattcttcacataatgcattcaagtacaagccttttaacaacactttgagcgacttttgagactgtacgggcgtatgtgctactcttggcagtaatgttgttgtatagccgtcaaagtcgactggtgttacattacggttgaccgtcttgttatgctccctatactcgctaataaattcaaagtaatttttaaaatttgttcggcaaatgcttgccagatagtttgcatcgctcaacctatgtatgtcgatatttttcgtgtatttggtacgcaacgtcagttctattctttgaacctccgccttttcataatttaatccattaagagtataaaaatcgaggatatagtctttaccactgcgaataacttcgtcagttttgttataaatcctgatttgtttaccgcttttaggtgaaccataatacaccgttttggaagctttacccagtgttcttgtatcgataaatttctgtttccccttaactctaattttagaggaattaatatatttattcatgaaggaaagcacatcggtattattagtatcaattgcaatgtcaatcctttttatatgagaatatgtaaaccctaatacatttgtaatatatcgaatatgttcaccacattcaacagaataaagcagcttgttgtcgattttcaaatgaactacttcatcagaaacataggaatatcgagaattaaagctcagttcaccaattttaatcccatcaattaacaataggtagagtccttcaaacgatttattagtgttttctgaacgaacaatacaacttctttcatccagccagtgcgaattgtttaacgcaataactggtaatttcttaatgaacgatatttcaagccaatcgaggcagattaccttcgtgacttctcttttctttacttctatttctgtaactaatgtttgcaattttcatggtcataaacttctaagattatttttaaacttaatataaatagtctgacatacttgtcaatctactccatgacacaacttcatgtttccttattcattattacagtacttgatttgattttaatgcaagattcaatcttgcaatagaaaccttctggaatcattggtagtaaagactttcaccacaatcaatgatattgagttagcttaggttgttactaactgcctacacgcctataaaatgaaataatataatcacgttgatgaatcatattaaattactttgcaaaaatatactgaaaaattcaatatgtcaatgaaaaattataaaatatattgaatttctttaaaatcatagcattacaatcatgacaacctacctccgccaatgaactgcacctatgctttaggtgttatatcctctactatattaagcgtccaatcctcgtctggtggaaagtcagcagttaatttttctggattatcaaatacattaagtttagccatatcgccccgtttttgcttttcatccactttgaaatatcttttcatgacctcatagctttcctgtcccgtccagcttaaaataattggtattgaaattcctgcatttaccgcattctgaataaaggtatcacgtgcatcatggcttgtatatctatctgataattccagtttcttacaaagttcttcaatgctcttgttatacttttgattcgtaattttcaatttagtcatgtcattatcatacttcgccaatatttttctactcgtatgattcaggttaacataaacggtatttccaagtggttttgatatgtttttctttttattccttgtcttcgatggttcgtacctaatacaatcatttactatattatcgggattgattttaaatgcatcaccaaatcgaatggatgtactacattgaaaaagaaacctgtctaaagtctttataagtgctgcattatccaaaacagcattcacaagttttttgaagtcttcatctgttactggatgcgggtcattctgtgaaggtgtgccgtgtttgaaatcttcatccagccatatatcactcatggttaaatccaattcattcctcctcttgtatatgtgctttagaaaggttctaagtaatatgaaagttttgtcaattgttcctgcaccatattttttttcatttaccatccatacgttaaagtcatcgccaaacgttaaattaatatcatcaggaaatacttttatacctgtatagtcttcgtatgccttaattcttccctttagggttgtatactctttatatgtcgtgtatggcgttccatttgctttcctgagtgctacatagtctaccaagtattcggttatacccttcacggatttagcttcttctaatggctttaaattagccatgtaagtatcgtttattgtctgattcttggctacgtggtcggggtcagattttaaaacttcttcttttgattttgaccattgggacggcttaacccttattcctgtggatattcttttggcttttggtttcaggtctttatcgtatcttagctgctcgatatagacaacagtcagtccctgtttatctactcgtttcagaatcattttccttacgctaatgccgttggatgtcatatgtggtagaattattttgttgatacagtattgatactgcaaatatagtgtttataagctttacatcaacaaaatgtggtagataaataacaaatatttaataaagtggtagaaatcatgttcttaataatcaatcatatagctaatatatttactctgaccactccgacaaattgaataacaggcacttacagaaatagctgtaagtgctttttttatgtcgagtgccgaaaaagtgccgatatgataaaaacataatgtgaatgcagtgctatccgctgctaaaaaacagcctgtttttgctcacttttacctccacctggcgttatcctttaaacaacaataatttattattttgtgactctgtgataggctcaaaattgagcgcattaaattctgggctacattcaaggttttgaatatcacgaagtatatttttgtggtccttatcaaacttttcagctatcagcaagtttgtttttattttttagtcgctgttgctatataatcatccttatccccccccactgttatggaataagtccacgtcattgaagtattagcaacatcgactattttccctaatccagcaataatccacccattactcatattctgagatgcaacaataatctgacccgaagttacgacccctttagcggttatttgagggccaggattaccaaaattttcaagaataacccccccgctgctacttaggtctttagatatggtaacgacataactctgcccttcagtgcttttattagttgaaataaattgccagtcaccaattaactcatccctcccaacctcatccgctttttttagagtggtaaagttttttacttccccgtatccagtaccgtaattgtttattgcataagctcgaacataatatttagtattattcaataagggaaagagagtacttatataatctccaaatccttcgccacttttactatgcgggcttttaatttcactaatggattgtaatgtatcccagcaaatgcctctttcgaatacaggtgcatcaccttctaatgtgacaatgcccccgcaagtagcagaatattcagtaatcttactaacctctgaggttcttaccgtaggggcttcctttactttttctttagagcaaccacctgatagtgttaatgaaactaccattataaataatgggtaaatcaagaattgagttttcatatttataataatttattctattcttagatagttaattatttgtgtataaattcctttgccctccttaattcttgttgtccgctccaatattttctttcattacctgtaattcatgggggcgattccacaattaggggtgtccaatgttaaaattcagtgatagtgtgagtattagaatatttcttgtattggtttactattagcttgtaatggtagtggcttacttgacaagtatatatttttttatatttaacccaaccaaatcaatttcaattgtatatttgaagcaatatccggaaaatacaattataatttttagcaagtattacaatctgattttacaaaggttctcaatttaaggccacttgctgaactagtattaattcctgactaaaaaaagaaaggcgacttgcgccgccttgaatgttttcacaacggaataatccttattgtgaattgctttagattgtgatgcaaatataagttataaaacttcaaattatacatatcatgaaaaaaatattaggacttgacctgggaaccaattcgattgggtgggctttggtaaatgaagctgtaaacaatgacgaaagatcatctatcataaagcttggagttagagtaaaccctttgacagttgatgaattgacaaattttgagaagggaaagagtataactacaaatgcagacaggactcttaaacggagtatgcgccgtaatcttcaacgctataaattaagaaaagaaaatctaattgagattttaaaagaacaagacttcatcaaaagtgatacaaaactatatgaagatggaaacaaaacaacatttgaaacctatcgtttacgtgcaagatctgcaaaagaggaagtaaacctggaacagttagcacgtattttattgatgattaacggtaaaagaggctataagagcagcagaaaggcaaaatcgcaagacgaagggcaacttattgatggaatggagatcgccaagagattatacaatgaaaatattaccccaggccagctggtttatacgttattgaaagaaggcaaaaaatacattcctgatttttatcgttcggacttacaagcggagtttgataaaatttgggaggttcagaagcaattccattctgaaatactagccgatgagtttaaaaaccaaatcaaaggaaaaggtaaacagagtactgctaaaatatttcttgcaaaacatggcatttttactgccgaaaataagggattagataaaaaaatatatgcttataaattaagaacagatgccttggccaatcaattgacaaaagaagagcttgcatttgttataagtgacctaaatggcataattagtagctcaagcggttatctgggatcaataagtgacagaagcaaagagttgtacttcaataaacaaactgtcggacaatatttaatggcgcaattagatagagactcacatgcacgcctaaagaatcaggtattttatcgacaggattatttagatgaatttaatacaatatgggaaacacaggctaaatttcataaagaacttacctatgaattaaaagaggaaataagggatgtaattatattttttcaacgaagactaaaaagtcagaaaggactcattagtatatgcgaatttgaaaacaaacagattgaagttaaaattgaggggaaaaataagattaaaacgataggctcaaaagtgtgcccaaaatcttcgcctttatttcaagagtttaagatttggcaggtacttaataatatacaggttgttgataaagctggatcaaaacggttcctactacaggaggagaaagagactttaaataaagagcttcaatttaaaaataaaatctccaaaagtgatgcattaaaacttttatttgaaaattataaggatttagatttcaatttcaaagatattgaaggcaacagaactcaggcagctttatttattgcctatcagaatattatagaattatcaggacacggagaatacgatttttcaaaaatgaaagctgatgaaataattgagatagtgacttcaattttcaaaggacttggatttaataccgatattcttttttttaattcagatttagaaggtatactatttgaaaaacaaccgatgtatcagttttggcatttgttgtattcatttgaaggagatgattcaaataccggaaatgaaaagttgctaagcaagattactgaactctatggtttcgagaaagaatatgctatttttctttcaaacatttcatttcaacctgattatggcagccttagcacaaaagctatacgaaaaatactcccttaccttaaagagggaaatgaatactctattgcatgtgaatatgccggttatagacattcgcagagttcattaacaaaagaagagattgataataaagttttaaaaaacaagctcgaattactgcctaaaaatagtcttcgtaatccggtagtagaaaaaatattgaatcaaatgatcaatgtagttaatgcagcaattgatgcttatggaaagcctgatgaaattagaattgaattagcccgtgaattaaagaaaagcgcagaagaaagagagaatgccacaaatgcaattaataaagcaacaattgaacatgagggatacagagcaattctaaaaaaggaatttggattgacaagtgtcagccgtaatgatataatccgttataaactctaccttgaattaggcaatagagggtttcaaactctatactcaaacacctatatagcacccaataaattatttaccaaagaatttgatatagagcatattataccccaatcgcgattgtttgatgattcattttcgaataaaacccttgaaaccagaagcgtaaatattgagaaaggaaatgaaacagcaattgactatgtttcagccaagcatggagaaattggagtgcttgattatttgaacaggatagaggagttgtttaaatcgggaaagatttcaaaaacaaaatacaacaagttaaagatgaaaggtgctgatataccaagtgatttcataaacagagatttaagggatactcagtatatcgctaaaaaggcaaaaaatatacttgaagaacttgtaaaagatgtagtgtcaacaacaggttcaataactgacagattaagagatgactggcaattggtagatgtaatgcaggaattgaactgggagaagtatgacaaacttggaatgacagaagtgatagaaaatcgtgaagggcataaaataagacggataaaagactggacaaaacgaaatgaccaccggcaccatgctatggatgcgctaaccattgcttttacgaaaaggagtcatattcaatatttaaacaacctgaatgcacgcagtgataaatccggaagtatttatggtattgaaacaaaggaattatatcgagacgacaaaggtaaattaaggttcaagcctccaatcccactaaatgatttcagagctgaagctaaaaaacaacttgaaaatacgttaatatcaataaaggctaaaaataaagttgccaccatcaatataaatacaacaaaaaaggaaagcggatataataaaaagaaacagctaacaccgcgcgggcagctacatttagagacgatctatgggagtatatcgcaatatattaccagggaagagaaaataggttcaaattttaatgaagagcaaattctgaaagttgctaaaaaaagctaccgtgaggccttgattaaacgtttgaagcaatatgacgatgatccgaaaatagcttttacaggaaaaaacagtttggataaaaatcctatctttttagacccattgcaaactcaaaaagttccagataaggtaaaaacagttacgacagaaactatttatactatcaggaaagatgtatcacccgatttaaaaattgaaaaggtagttgattctaaaattagaagcatattgacggatagattaagggagaataatggagacagtaagaaagcattttcaaatctggacgaaaacccaatatggcttaacaaagaaaaaggaattgcaattaagaaggtttcaataagtgggattacaaatgctgaagcgctgcatgagaaaaaagacagggatgggaatctggtagtagataattatggtaaacataaacctgttgattttgtaaatacaggaagtaaccaccatgtggcaatttacagagacaaaaatggtgagttatatgaaaatgtaatatccttctttgaagcaaccgaacgtattaaccaagggctacctgcaatagataaaagctttggggctagcgatggctgggaattcctattcagcatgaagcaaaatgagtattttgttttcccaaatgaaaaaacaggatttaatccaaaggagatagatttattaagtcaaaataattaccatttgattagttcaaacttgtttcgggtgcaaaaaatttcgacaaagaattatgttttcaatcatcacctagaaactactgctgttactggagaaactttaaaaaataaaaaacagcttattggcattacgcatatatttattcaaagtttacctcctttaaagaatattattaaagtacgtattaaccatatcggacagattgtttttgttggagaatattaaggaattagaatataaaacacttccttcgttaatggatgtcaaaagttgaataattgattatgcatatttgtatatgataaagagaactctgtatttcgggaatccttgttatcttagaaaaaaagatttgcagttgtatattgagtttcctgaaaaggaaagtaaaccagctgtatcaatacctatcgaagatataggaatcctgattttagacagtccgcacattacacttacgaacgcacttattgctgatttgaatgagaataatgttgcagtgataagttgtgataaaaggcatttgccttatggcctgatgctacctatgttcgcgcatcatgcatttacggaaaaaatgtatcagcaactggaaagctcccttcctttgaagaagaacctctggcaacaaactataattgctaaaataagcaaccaggcagccatgttgcgcagggttggtattaatgatgccaaaatgcaatattatatagggatagtgaaaagcggtgatcctcagaatgtggaaggtcgggctgcagctttttactgggaaaaactctttggatcaaatatatgttttacccgcgagcgcgaaggcgacggactcaatgccatgcttaattatgggtatgctattttgcttgccattgttgcccgggcgctggtagcaagtggcttacttcctgcagtaggtatacaccaccggaataagtacaatccatggtgcctggcatcggatattatggagccttaccggccttatgttgatatggttgtacttcaaattgtgaccgaatatccggatctggaagaactcactcctgagattaagaaaaaattattgcagattccggtagtagatatattaattgatggcaacagcagcccacttatggtgggtgtacagcgaactacggcttccctttcagcgtgttttgaaggttcggccagacggatactttatcccataatggaataaaactgtgaactcagaattaactgaacggctaaaccaataccggattttgtgggtttttgtattctttgatttaccaaccgaaactaaaaaggacaggcgcaattatgccttattccggaaaaacctgcaaaaagatggttttgctatgatgcaatattcgatttatgtgcggcattgcaacagtcgcgaaaatgcagatgtacatatgaggcgggtaaaagggttcctggcacccaagggtgaaattattgtattttcactaacagataaacagtttggaatgatggagtttttcagggggcgcgatctgaaagaccgacccggaacgccccagcagcttgaacttttctgataacaggaataaaaaagtccttctctttacaaaagagaaggacttttctgaacacttttttttatcctgattat

SEQ ID NO: 2428 - DNA, 12558 bp, synthetic construct
  misc_feature 1..12558: note = Synthetic
  source 1..12558: mol_type = other DNA
ctgcttctgatgtgtttttgtatgccatatcaattccctttcaatttttttgcaaagatacgaaaaatttctgacataacaaaatgattaacactattttaatttatagaactcccctagaataatttcgttataaaaattgtaacgctatttacaaaaagctatggaagcaaaaacactgaatcgatatatatggttgtacgaccttcttcagaaaagaggggtgctcacatttgaacagataaacaaatgttggaaagaaagctggttgtatgatggcaaggacctatccaaacgaacctttcaagagcactgcaaggcattgagcaaactctttggcgtggaaatcaaatgcatccatgcggtagggttggggttgggctatctctaccaaatcaagcatagtacgacgggggcaccgaattcgctcatgcaatgggcactcgacgctttcattctggagaacaaattagaagtgggtcgtaacctgattggccgcattcagtttgagtcgattcctaaaggacaagagtatcttacgaatattattgatgcgatggagaagggtgtagtattagaggttgagtacgactcttggggtccgcgtactgcaacgtatcacatcaaaccctatgcactgaaggtttatcgccaacgttggtatctgctaggaatgataaaggaatatggcgaactccgccacttgtcgctcgacaggtttaaggagttactggaaaccgacgagacctttgagatgcatgaagggtttagcgttgacacgtattatctcaactatgttgggatttatgtcaaccacaaactcacaccacagcaggtcaagcttcgcatatatggaaagcaggtagaatacgtccgttcgctacctttgcatcgtagtcagcgagaagtgtacagcaagtatgaatgctgtagcgacttcacctatcaggtctgcctaacgccagacctcaccacccaaatcctttccatgggagctgacgtagtagtacttgagcctaactcgctccgacaagaagtccagaaccacctcaaatcggcgttggagaggtacaaaatgtaataaatgactaagcaattatactctagcatcagcactgggaatagaaatccacaatgacactaagaaacgacaataaattaatgtttaactaaaaaaacgagaaaatggcagaaatggcattaggttatggcagcgagtttcagttacttcgctacctcggacaccacagaagttatctaaatcagaaaatccgtgaggtgattggagaaggtgaaatctcttggttggacttccctgttgaccttaagagggattctaatgatggtgaatggaaaacaatagaatgtttttcagagatggaaaactttgctgaaatcaaaaccaaatggggaagattttggcctacaagtgggaatgcacacaattgggatggtatctttaagcataacgatacttggtacttcgttgaggccaaagctcatttagaggaagctaatcaggaatgtgaagcagatagtcttaccagcatcgagatgattaccagggcattttccaaaacttgtggcagtgatgaattggcagaaaaatggataaagtccaaatgttatcagttggccaaccgtcttgctttcatgcacttttgcaaggaacaaggtatccccgcgaaattactgtacataagctttctgaatggttatgagaaatatcccaaagagaatgttactgatagttcaaaatgggatagcacgtgggaaaaagaaatgaatactctgcaactttcagatgaactgagacagtacatcaaaatggtcacgattgactgtcatcagcctgcagagaaggaaaaatattgggactagtgagaatcctccacatctctgatacacacggtaaacaccgacatctgcctccactgccggaggcagatgttattgtgcattcgggggattttacattctcggggagtgaagatgaggcttacgatttcatgaactggttttgcgacttgccttatcggcacaaggtatttgtggctggcaaccacgacatgtgcatgtatggggctgagggaattgaaggactgccggaagatgtgcactatctctgcaattcggccgcagagattggtggactgaagttttggggcatcccactctttatggaagactgcatcaatggctgccaaaaggatttttaccagcagatcccttccgacaccgacatcctagtcacccaccagccgccatttggcatcttggacctcacggattatggtagcggcctttctcatcacggcgacattctactaagggaacggattgagaagctgcaccttaaacaccaccttttcggtcatgaacacaatgcttctggcgttcagcagattgggatgacagagttctcaaatgcctgcattttggacaacagctattccatcacctttaaccctcggctatttgaggtagtatagatttaacaaccccttggcggaattatccagctagaaatctagaatcgattctagaatttctagccattcaagcccttgatttgcacagaatcagacccactccattttatgaagaaattatgctaaatatatgtaatacaaacaatttaacacaatcaagaccagcacgaagacttctcaacaatgcccaaatctagaatatagaacgctattttgcatataacatcaaaaatccattctatattctagatttgttgatgagagttgatgtagttaatgaagcggcggctgcccaacttcaaaacctcattaactccattaactataaatcatcagtacgcaagtttgcccttacgctgcccattctacggcgttcctacggggtctgtccactcctatagaccgaagcaaccccgcaggaaccccgcaggatgagtgacctaagggtggtatggggcttgtttttgaggatcaattccgccgagtgggtatttaataagtaaatgtatttaatatgtcacaaaattttctttgctaagcaataaaaaaacataaatcacgtttattataattcagtgaacggagaatgtggcttaatggtttaatcgcttagacgcttaatcgttgcgacaacaggttgcttaatcgtttaatcgcttaattgcttaatcgttgcgacaactgattgcttaatagtttaatcgcttaattgcttaatcgttgcgacaacaactaaacaactaagcatctaaacaactaagccccaatcaccaatcaccaatcacgcaaaaatcgctaaacacatggatatcctcagccaactcaacgactcccagcgccaggcagccgcctgcatcgaaggccccgtcatgatcatcgccggcgcaggctcgggcaagaccaagaccctcacccaccgcatagcccacctcatcgaactgggcgtcgaccccttcaacatactggcactcaccttcaccaacaaggccgccgccgagatgaaggaacgtatcgtgaagctcgtgggccgcgaagccaagaacatctggatgggcaccttccactccgtctttgcccgcatcctccgtgccgaggccgaaaaactcggctacatcaacaccttcaccatctacgacaacgacgacagcaaagccgccatcaagcagattgtcaaaagcctcaacctcgaccccaaggagtacagccccggctccgtcctcagccgcatctccatggccaagagcaacctcatctcccccaaggactacgccgaaaacccagagatacagcagaccgacaaggactcgcacaagcccatgctcacgcaaatctacaagatgtacaaccagcgcctccgtaacgccatggccatggacttcgacgacctcctcttcaacatgaacatcctcctccgcgacttcccagccgtgctcttcaagtaccaggagcgcttccgctacatcatggtcgacgagtaccaggacaccaactactcccagtacctcatcatcaaaaaactcgccgcccgctaccagaacatctgtgtcgtaggcgacgacgcacagagcatctacgccttccgcggagccaacatacagaacatcttcaacttccgccgcgactaccccaacctcaacctcttcaaactcgaacaaaactaccgttccacccaggtcatcgtcaacgccgccaactccgttatcgcaaaaaacaaggagcagatagaaaaaaacatctggaccgacaacgccgtcggcaacaagatacgcctcatccgtgccgccgatgagcgcgacgaaggccgccaggtggccgacgccatccacgacgcccacctctccgaagacctcgactacaaggacttcgccatcctctaccgcaccaacgcccagtcgcgtgccatcgaggaagccctccaccgctccaacatcccctaccgcatctaccaaggactctccttctatggccgcaaggaaatcaaagacatcctcgcctacctccgcctcgtggtcaacaactacgacgatgagtcgctcgtccgcatcatcaactaccccgcccgcggcatcggccagaccaccctcgaccgcatccgcctcgccgcctccgacaacgaggtggccatctggaccgtgctcgaaaacatcgaccgcttcggcctcggcatcaacagcggcatctcacagcgcatctcacagttcgtcatcctcatcaaacgcttctcctccatcctctcctccaccaacgcctacgacctcgcccaccagatcgtcctcgcctcgggcgtgctcaccttcctccgtagcgacgacgaccccgacaaccccaaccgcatagagaacatcgaagaactcctcaacggcatcaaagaattctgcgagaacgacgaccagttcgtcgaaggcgaagagcaagaaaaccaaatcgacgccacccatcaggacggcagcatccgcaccctcgaccaatacctccagcaggtactcctcctcacctccgaggacaaaggcgaggacaaggatgccgacaaagtggccatgatgaccatccatgccgccaaaggactggaattcccctacgtcttcgtcgtcggcatggaagaaaacctcttcccctccttcatgtccctctcctcgcgccaagacctcgaagaggaacgccgtctcttctacgtggccgtcacccgggccgagaagcacctcaccctctcctacgccgtcacacgctaccagtacggcaactcctcctgccaagaactcagccgcttcgtcgaggacatcgactcccgctatatcaacatgccccatgcctccaagaccttccccaaagtcggcgaactgccccgcgccttccaaagcgtgccaggcgtcaaatggtcgcccgaagcacagcgcagcttcaagcggaaagaagccgacaagcccgccgcccgcaacctcaaacccaaatcctccctgccacaaggccccacagtccccaacagccccgcggccatcagcgccatacaagtgggcatggacgtcatgcacgccaagttcggccgcggcaaagtcatgagcatcgaaggctccggcaacgaccgcaaagccgtcgtcttcttcgaaaacgtcggccagaaaaccctcatcctcgccttcgccaaactgacgataatagaataattgagaattagagcagaagcattccaaccttcaaatcttcaaaccttccaatcatgcgaatcgtaatacagcgctgcacacaggcctccgtagccatcggaggcaacatcaaaagccagataggccccggcatgatgatactcctcggcattgaagacgccgacaccgacgaagacatcgactggctctgccgcaaaatcgtcgccctccgcatcttcaacgatgccgacggcgtcatgaacctccccatcaccgaagtccccgacagcggcatcctcctcgtcagccagttcaccctcatggccagcaccaagaaaggcaaccgccccagctacatccgcgcctcaaagcccgacatcgccgtgcccatgtacgaaaaattcatctgccgcctctcccagctcttcggcaaagaagtccagaccgggcagttcggcgccgacatgcaagtctcactcatcaacgacggccccgtcaccatcctcatcgactcccagaaccgccaataacccccacacaagatgcaaagggacgtgatttcaccaccccttgtaccagcaatcctgacatcgatggtgtactttcaaaatacaccatcgcgaaaccgctcatcgaaacctcaccacatcactactaatgatgtggtgacccattacgatataacaatcaacacgatacacaaaacgcccataaacgcgtcccacagaaaaacaagcatttaacttattaacctctgccgtttatgggagcgaccattatggcacattcaccattcccatccaatgtttcggatttatcatctacaacaaattactatgaggactcgcaatccgttttcgtatttcaatacattaattaataattagttatgtatcaaaaatccttatagcaaatcgcctcggactataaatccgaggcaaacgtacatccgcaaaaaacggggtgcagggtgctcaaaatacagaaactatcccatgtacaattgtacaattgtacaattgataggtgctgagccatcaatccgaagcgaccaaaatgcaaaccgccaaataatttttcaaaaaaaacttgctatattaaaaaaacttcgtatctttgcatcacgaattttaatccaatcacaataaggattattccgttgtgaaaacatttaaggcgggattttcatatctcgtctttttttataactatttcgaaatgaaaaagatacttggattagaccttggcactaccagtatcggctgggccctggtgaatgaagccgaaaatgcagaagaaaagtcatcaattattcgtcttggcgtccgtgtaaaccctttaaccaccgatgagcagacgaactttgagaaaggaaaaccgattacaaccaacgcagaccgcactctcaaaagaagtatgcgccgcaatttacaacgttacaaactgcgtagagagaccttgattcagattctaaaagcccaaggatggattaacgacgagactatcctatccgaacaaggtaatttcagcaccttccagacttatcgtttgcgagcaaaggccgccaccgaagaggtatctttagaagagtttgcccgtgtgctgctcatgattaataaaaaacgcggctataagagtagccgcaaagccaagtccgatgatgaaggcaagctgattgacggaatggacgtggcacgtcagatgtatgaccaagacctcactcctggccagtacggctatcaccttttgactactgggagaaactacgttcctgagttttacaactccgatcttgctgccgaattggaaaagatttggaactaccagagcacattctaccctgagatactgaccccagattttcgtgtccaaatcagtcgtcaaggtgagaaaaacactgccaaaatctttcaagataaatacaatatatatcctgccgacatcaaaggcagccacgtcgaaaaactaactctgatttacaaactccgtcacgaggctctacaaaagcagctctcccaagaagagttggccttagttattagcaaagtcaacggccaagccaatggaagcagcggctatttaggcgccatcagcgaccgaagcaaagaactttatttcaagcatcagacaataggccaaaatcttatcgaaaaacttgacagcaatccccatcaaagccttaaaaacaaaccatattaccgccaagactacctcgacgagttcgagcgtctctgggagacacaggcacaattccaccacgagctcacacctgaactgaaacacgaaattcgcgacatcgtaatcttttatcagcgaaggctaaaatctcaaaagtggcttctctccacctgtgagtttgaaaaccgcaaagtctgccccaagtcttccccgcttttccaagagttcaaatcgctccagattatcaataatttggaggtctcctgccccgatgaaaaacgccacctcacagaggaggaacggaatgcacttttctttgagttgacctataaagagaaactgaccaaggctgaggtgctgaaacttctttttgccaagcctcgtgaattagacctcaacttcgaagatgtggctggcaaccgcaccatggcggccatcctcaaggcctgccaagacgtcatcagcatgagcggccatggcgaatacgatttttccaaaggaaaagccgttgataatgtaaacactatcaaaactattttcaaaggtttgggattcagcaccaattggcttgagtttaatagtgataagacgggggccgacctcgaccgcgagccactataccgactctggcacctgctctattcctatgaaggcgacaactcttcgacaggtatcgaacatcttgtcgaacacttgatggccatgctcaacatgcctaaggaatatgcccacgtatttgcaagtatcgcctttgaagacgactacggcagcctttcggccaaagccttgcagaaaatactccccttcatgaaagaaggccatgagtacagcgaggcctgctcattggccggctaccgccattccaaagactccctcgcacgcgaagaacttgacagccgcgtactcaaagaccacctcgacctccttcctcgcaacagcctccgcaaccctgttgtggaaaaaatcctcaaccagatggtcaacgtggtgaatggcgttattgatgaatatggcaaacccgacgaagtccgtatcgagctggctcgcgaactcaaaaagagtgctgcagaacgtaaagacctgacaaagattatcagcgccaacaccaaggaacaagaagaatgcacaaaaatactacaacaagagtttggcctcacccatgtcagccgtaacgacatcatccgctatcgcctgtaccaggaactggccaagaatggttataaggctttgtactccaacacctatatcccacgtgaaaagattttctcaaaagaaattgatatcgagcacatcatccctcagtctcgccttttcgacgactctttctccaacaagaccctcgaataccgcaacatcaatattgaaaaaggcaacgccacggccctggatttcgtacaaacaaaatatggcgataaatatctaacggaatacaaagcccgagtggaggacttgctcaaacagggcgctatcagcaaagccaaggcaaagaaactgctcatgtcgcagaccgacattcccgacgattttatcgagcgtgatctccgtaattctcagtatatctcccgtaaagctcaggaaatgcttcgcgaggtggcccgcaccgtttccgcaaccacaggcagcatcaccgaccgactccgtgaagactggcagattgtcaatgtgatgcaggaactcaactggggaaagtacgaccaccagggactcaccgaaatcatcgagggccgtgacgggcagcacatccgccgtatcaaggattggaccaagcgcaacgaccaccgtcaccatgccatggatgccctcaccattgctttcaccaaacccagctacatccaatacctcaacaacctcaatgctcgcgacaataaacagggtgtcattgtcaatatcgaaaagaaagagctctatatcgatgccgaccatcaccgccgattccttccacccatcctgcccatcgaagactttcgccaagaggctaaacgccacttggagatgattctcgtctccaccaaggcaaaaaacaaggtggtgaccaaaaacatcaacaccaccaacgccagggctggccagcacaagaaagtgcagctcacccccagaggacagctccacaaggagagcgtatgcagcatgatgaaggtctctgtcatcaaagagattcctgtaggcgccaaaatggattttgaaatgattgccaaggtcaagaaccctgtatatcgtcaagcactcacgacccgtctcaatgccttcggaggcgatgctaagaaagccttcacaggcaaaaacagcatggccaagaatcctatctggctcgatgatatccatagcagatgtgtccctgagaaggtcaaggtcgaagagttcgacacgcaatatgtcatccgtaagcccataaacaaagacatcaacctcgacaaggttgtcgaccctaaggttaaacagattcttgaggaacgcctcaaccgctttggtggcgacaagatcaaggccttctccaaccttgacgacaaccccatctggctcgaccaagcccacggcatctgcatcaagagcgttcgctgcaaactctatgatgcggccacaccacttcacgacaaacgcgacaaagacggcaacctcatccttgacgcagacggcaagccccaacccgtcgatttcgtcagcactggcaacaaccaccatgtcgccatcttcctcgacaaggacggcaacctccaagaacatatcgtctcgttcttcgaagccacctctcgcgccatacagggctaccccattattgacaaagagtaccgcaaagacgctggctggcaattcctcttctccatgaagcagaacgagtacttcgtctttgccaaccccgccacgggcttcgaccccaacgagatagaccttctcgacgaaaaaaactacgcccgcatcagccccaacctctatcgagtgcaaaaattaacgactaaggactacttctttagacatcatttggaaacaactgttgaggacataaaagaactcagaggaattacatataagcggattggtttatctggccttgtcggtattgtcaaagtccgaatcaaccacctcggcaagatagtccaggtgggtgaatactaaaaaaacataagcctctcaattgttgggaggcttttttgtgcgcatctaacccaatcaaaatatatcgttatgatcaaacgcacactctgtttcagcaaccccgccatgctcagcctctccaacggccagatggtggtgaaaatcatcgacccgtcacgctataatgccgccacgggcaacaagtacgagcctacggcaaccatccccatcgaggacatcggcgtcatagtgctcgaccactcccaaatcaccctgacacacggcatcctcaatgccttgctcgccaacaacgcagccatcatcacctgcgacagccgccatcttccttcgggtctcttgatgcccctcgaaggcaacacactacaacgtgagcgtttcaccgaccagattgaggcctcacagcccctccgaaagcagctgtggcagcagaccgtcgcccagaaaatacgcaaccaggcagccgtgctaaaaaaaactcgcaattgcgaaatcagcaacatgcttgcctgggccagttccgtcaaaagcggcgacagcgataaccttgaaggccgtgctgctgcctactactggagtcagatgttctacgaccgtcctggctggacacgtgggcaggatggcgactggcccaacgccctgctcaactacgcctacgccatcatccgcgccatggtggcacgggctctcatggccagcggtatgctccccaccttcggcatccaccaccacaaccgttacaacgcctactgccttgccgacgacatcatggagccctacaggccgtatgccgacatgctggtgatgcagatgatggaacgctggcccaaagccgaagaaatctctaccgacatgaagcagcaattgctcaccctgcctgtggcagacgtgacaattggcggacaacgcagccccatgatggtggccatcagccaaaccacggcaagcctctacaaatgctatagcggcgaactgcgcaagattgtctatcccgaaatctcattgtcatgaacagcgaccgcttcaatcaatatcgcatcatgtgggtactcgtattcttcgacctgcctaccgacaccaagaaggaacgcaaggcagccgccgacttccgcaaaaaactgatgggtgacggattcaccatgtttcagttctccatctacattaggcattgtccaagccgagagaatgccgaagtgcacctcaagcgcgtcaaagcctcgctgcccgaatttggacaagtggccatcatcaccatcaccgacaagcaatttggcgagatagaaatcttcagcaaccagaaaatcatccctccggaagccccaggacagcagctcgaacttttttaaagatttatatatttttaacagttcgaagcatgacgaaaaccttgtttttttgccaaattcgcccccagtttttagaaatttaaaacttttccacgcgacaaaaaatcccaacccgacaggctgggatttttatttctattttccctcacaacacaaacaatcacatcatgttgcagaaattgtgctgtttatcatcttgcaaagatacgaattttaatccaatcacaactgaagttagtttgttccttgtagttggttggctgtttatcatcttgcaaagatacgaattttaat

SEQ ID NO: 2429 - DNA, 12060 bp, synthetic construct
  source 1..12060: mol_type = other DNA
  misc_feature 1..12060: note = Synthetic
cgccctaaggcagcgccgacgtcggtgcctgtctgttcgaggaaacgggccagtgtaggcagctggaggaggaacgcgagccccgtgaaggcgagcagcacggccgaatcgacagcgcgctcagtcaccacagtgcccaatgagcctgcgaacgacgtgccctcgcgttctttcagcgtgccgcaccgcgtcacctcgcccacgcgggggatgacaaggctggcggcataggacaggtatacggcgtcgatacacgtccgccggcgcggacgttcgcccaagggagcgagcgattgccgccacctcagggcgcggaacacctgcgccgccacgcccggcaccatcgaggccgccatccattcccagcgcattgagcgcaccgtttgccagaggcgcggccattcggcgtcgcggtacatccaccaaaggatgcccagccccaacacaaagggaagggcaagttttaacaggcttttcagcaggcgtgcacctgctgtattcttctcgtcttgtttttcgtccatagaaaaagtaaaatcgctgctaccggcgtgccgggcatgcgaacggcagcaaatgtagtgaaaaagcgccacactcgggccacgcgctccacgaaaaaacgtcctgcgtcctgtcaggcgcctgtcgggtgcggaaaaaacgctaactttgtgcccaaaatgtccgtcgccggcaaaaaaagagaatccatgatgagaaacgtccgccccaagaagtcgctcggccagcacttcctgaccgaccagctaaccgcccgtgccatcgccgacaccgtcgacgcctgccccggccttcccctgctcgaagtggggccgggcatgggcgtgctcacgcagtatctggctgcgaaggggcgtgtgctgaaagtggtcgaagtggaccgcgagagcgtggcctacctgcgcgagcactttcctgagctcgacggctccattgtcgagggcgatttcctccgccttcccctgtctgaagttttcgccgggagtgccttcgtcctgacgggtaactatccctacaacatcagtagccagatattcttcaagctccttgccaaccgtgagctcatcccctgctgcacgggcatggtacaacgcgaagtggccctgcggctggcctcgccgccgggcagccggacttatggcgtgctgagcgtctttgtgcaggcgtggtacgacgtccactacctctttaccgtcgagcccggagtgttcaatcctccccccaaggtgcgcagcgccgtcgtgcggcttgaccgcaacaggcggcgggagcttgggtgcgacgaggcactgtttgcccgtgtggtgaagggtgtgttccagcaacggcgcaagatgctgcgcaaccccctgcgtgcgctgctcgcccagctcgacggtcccggccctgcgcgcggccacgatgcttttctcgcccgccccgacctgacgcggcgccccgagcagctcagtgtcgacgagttcgtcgccctgacgaacgatgtccagcgcgaactgggacgctgattccccgggaaacggcgccctggcggaggaaaaaggagatgagaaaagcgacccttccaccgccttgggcaggagcgccgctttgaatgttttcacaacggaataatccttattgtgatttgcttcgtggcaaaggtagcgttttttcttgattcaccctttgcctgagaaaaaaattatatttgagcccttattggggagatttcgtgccgtgttccaaaagaaaaaagtaattttggagcaaataaccttttatagactatgaaaagaatcctgggaatagatctgggcacgaccagcataggatgggcttatgtgctggaagccgaagcagcgaacgaacagtcggaaattgttcgtttaggagtcagggtcgtgccgctcagcgtagacgaagaaacgaattttgaaaagggaaagagcatcacgacgaatgccgacagggcggcgcggaaaagcatgaggcgcaacatcgaccgttatcagatgcggcgtgatgaactgatagccgtgatgagagaagaaggctggatcaccgaagagacgacgttgtccgaacatgggacgcggtcgacctttgaaagcctcagacttagggccgaggccgtagagaaagaggtgaccctcgcccaattggcccgcattttgcttcaaatcaataagaaacgcggttacaagagcaaccgtaaggcggacagccaagaggaggggccggttatagacggtatggatgtgtccaaacaactttgcgagcggagtatgacgccggggcagtgggtgtatgagcggatgcaaagaggaaaaatgacggttcctgctttcttccgttccgatttgcagcaagaacttgatcatatctggacgttgcaacacgcttatcattcagcgtggatgaccgatgaattgcgtgtagccttgacgcaggctgacagccggagagcacagcagctgatggatgcgcatggcgtaattccggaaacggtaaaggggaaggaacgtcgtcagatcctttatggctggcgttctgctgcggctatgggtggtttgccagcggcacagctggctgcggtcttgattcaaatcgtgagagacataaacgcttcgagcggctacctggggcagatcggagacaggagcaaggaactctatttccggcatgagacagtgggtcagtatatgtggagacacatacaggccaatccccatgagagtttgaaaacccttgtcttttatcggaaggattaccagaatgaattcgacgcgttgtgggcgagccaggctcggttccatcctgaactgacggagaggttgaggaaacgtttgcggcacattctctttttccaacgcccgttgaagagcaagaaaggcttggtgaaccgttgtgaactggttcattattctattccggaaaacgcggcggacggcggaggaaaacggcgtgatgtcggaccgaaagtgtgtccgaagtcgtctccgctatttcaggaattcaggatgtggcaggtgttgaacaatttaatgcttattcacgtcccgacacaagaagtccgtcccttggctgacgaggagaaggaaatgcttgcggccgaattgtgctatcgtgtcaggatgaagaagaacgacgtcttgaaattgctgtgcgaccattggcgcgaatgggacctgaattataaggaacttgaaggcaaccggacgctggcggctttttataaagtgtatgagcaggtcatcgcgcagacaggacatggcgaatacgattttgaaaaaatgcgtgcggctaaggtgcgcgaacttgtcgggggagtgtttggtggcctcggctttgaaatgggacttctgtcttttgatgcggaactggatggtcttgcatatgaacagcagccgctctatcgtctttggcatcttttgtactcgtatgagggcgacagttcggcaaccggggacaaatgtctgcttaaacgcctctgcgcactgacgaaaatggatgaagatgtggccaggttattcctgactgtacattttgaggatgattacgggagcctgagcaccaaggcaatgcgccgaatccttccttttctgaaaaagggatatatgtatgatgtggcctgtgagcaagccggttattgccattctgtacgttcccgcacacgtgaagaacttgacaagagaacatataaggaccggttggatctcctgccgtcgaagagccttcataatcccgttgtcgagaaaattcttaatcagatgatacacgtagtgaacggcgtgacttctgcatacggtaagccggacgaaatccgtattgagatggcgcgtgagttgaagagttatgccgctgaacgtgagagaagaacggcctccatagcgaaggcaacgaaggaaaacgcggagatagaaaagatactccgacaggaattcggcctgtcgtatgtcagccggaatgatatcgtgcgctataagctctatgaggaattaaaggaaaatgattataaaacgctctactcaaacacagatataccaaaagaagaattgtttagcaaagcatttgatatagagcatatcattccgcaggcccgtctgtttgacgactctttttccaataaaacgcttgaagcgcggcaagtgaacattgagaaaaaagaccgtacggcttgggatttcgtaaacgattgttatggttccgaaggggccgctctctaccggtgcagagtagatgagttgttcaataaaggcatcatatcgaaggacaagcataaatatctgttgatgccgggcgataaaattcccgaggatttcatcaatcgagacctccgtaacacccagtatatagtccgtaaggctttggaactgttcgaggattttgtgcctagcgtattggccacctctggggccatcaccagcaggttgcgtgaagactggggactcgtcaacgtgatgaaagaaatgaacctgcctaagtatgagcgacaaggagtagttgagacttgttcggatcgtgaaggccatgtgtttaagcgaattcaggattggaccaaacgcaacgatcatcgtcatcacgccatggacgcgctgacgatcgctttcaccaagcgggcttatattcaatatctgaatcatctcaatgcgcggaaagacgtgaccagtcaagcctatgccatacagcaaaaagaaatggagtgtgacggagaccaccgttggcggttcaaatgtccgttcggtgatagatctagattccggcgggaggccatgagacaactcgatcaaatactcgtgtcgataaaatcgaagaacaaggtgcttacgccgtcattgaaccgctcgaagaaacggggaggatataacaggaaaatagaatggacacctcgtggcccgttgcataaaaaaagaactgtatatggacgaatccgtcgttacgtgacgaagaacgtccgagtgggctcttcgtttacgcaggcggagattgagaaagttgcaaacacatgtttccgtagagcgttgttggctcgtcttgcagagttcggcggtgatccgaagaaggctttcacaggaaaaaatagtttagagaaaaatccgctttattgcgatgaggcacatacgcagaccgtgccgctcctggtgaagcttgtggagcttgaagaggtaggtacgatacggaaagaaattactcccgacttgaacgtggaaaaagtggtcgatcgccgtatacgtactttgcttgaagaacgtctcgccctgtatggtcaggatgccaagaaagcgttttccaatttaggtgaaaatccgatatggctgaaccaagagaagggcatatcggtcaaacgcgtgacgattatcgacaaaagcgacgttgtatccattcacgagaaacgtgatgttgacggtcgcctgatgcacgatgaacatggacgaacgattccgtgcgactacgtgcagacgcagaataatcaccatgtggcgatcttctgcgatgcagagggaaacttgcaggaacatattgagacgttttttgacgtggttgaacgtgttcggcagcaacgcattgagggtcggaccgtggaagtaattgacaagaactacaagcgtgatgagggttggcagttcctcttctcaatgaaaataaatgagtattttgttttcccggatgagaagaccggtttcgaccctcggtctgtcgatttgatggatccggctaattatgcgttggtcagtccgcatttgttccgtgtgcagaacctatcgtcgaaagattattatttccggcatcatttggaaacgaccgtagagaacaccaaggccttgaaggacgtgacatggaagcggatcaatactttggaaaaattgaagaatatagttaaagtgcgggtgaatcacatcggacaaattgtggccgtaggtgagtattgactttatggaacagaaatatgataaagaagacactctattttggctatccggctcgtttgtcgttgagcgaaggtcagcttgttattgagaggcccggtgcagagaaagtgcgccgggccacggaagtgtggtttccggaggacaaagtcacacgtcctattgaggatataggcgtgatgatactcgataatcctcagttgacgctgacctcgcagttgatggaggctttgttggaaaacaattgtgccctcatcacgtgcgacgggcggcatctacccgtcggactgctgctcccgctttatggaaacactactcagaacgaacgcttccgtcaacaaatagatgcctcagtgcctctccgtaaacaattatggcaacaaacgatacgggctaaaatactcaatcaggcggctgtcctccgcgaagtcggcgtcgaaaccggttgcttggaagcctgggctcgtgaggtgcgcagtggtgaccctgacaatttggaggcccgggcggcagcctattattggaagtgggtgtttcgtccccgtcaaggcttcgtacgcgaccgcgaaggggattatcctaacgccctgctgaattatggctatgctattcttcgtgcagtgatagcccgcagtctcgtcgcaagcggcttgctcccaacattgggtattcatcatcacaaccggtacaatgcatattgtctggccgacgacgtgatggagccttatcgtcctttcgtggataaggtcgtggcaggcatggcgctccatgacgaaggccatgaactcacgccggatgtcaagcggcaattgctttccatcccgacgcttgacgttgtgctggacggacaccggagtcccttgatggtggcagccgggctgaccgcctcatcgttgaataagtgtttctctggcgagttgcgccatgtcctttatcccgaatggccgtgaacaggattagtcagtatcgtgtgatgtggattcttgtcttctttgatttgccgaccgagacgataaaagagaagaaagcttatgcactcttccggaaaaatctgcaacgtgatggtttcactatgttccagttttccatttacgtgcgccattgcgccagctatgagaacgcagacgtacatctacgtcgtgtaaaatctattcttcctccgtatggaaaggtaggtctgctttgcatcacggacaagcagttcggcaatatggaacttttctttggtcgtgcgccgcatgatgtttgtgagcctggtcagcagttggaattgttctgaaacaaaaaaaactccggtttgttaaacaggagtttttttactgcggccattttttctttcgccttgctggatatgggagagtgggatgtggacagcacgctgttgtgccatatgtccgaactgcacggcctctttatcgcaggcccacaagcattccggcgtccatgtccggtggttgtttcgtttagggttggcggggtgggggactgttgtcggcgtgggcgtctttttgagtctttcgtcggtgagtcggggggcgtcgtgtgtgggtgcgtaggagtcgtcctcggagccaggcgaaccgtgtgcctgctgcgggcggcgagctgcccaatgaggcatgcaggcgcgcgtgggctggcaggggttacaactttttaactgacagtgcttgtctataagcatagaaatgccgacctttgcgccggtttttgaacagctggaatgtagggctggcttccgtcccatctcgccgcctctttcggcaagtccgccatcgggcggggcttttcgggacaatggggccgacacgcttcgcccctcaccccctttcctcgcagccgcgacacgctcacaaggtctgtcttttttgtgtcgcgcgattccggcgtaaaagaagaagcatgaaaataacgaaactgatttttttcctaatgacaatggtggcgtccgtcctcgctgcggatgctcagcaggtcggcgacgctacctattattccaaccggcttcacgggcgatacacgagcgacggctcccgctatcatcgcgacagcctcacctgcgcccacaagacgtatcccctcggcacgtatctgaaagtgcgtaacgcccgcaacggtcaggaggtaatagtcaaggtgacggaccgcggtccctaccgccggggggctatcgtggatctttcctatgccgccgccaaggagatcggcatgatcgcagccggggtcgtcccggtcgaggtggagcgggtggaatcgccagccggttacttggccgcttctgagggcgagacgctcaggctgccggagctccgcgtgcgtgacgccgcaacgggcgagtattacaccgtgtcggaatgggctcgccggaatgaggaggaaaaggcgcgggctcgcgaggcggaagccgcgcgccagcgtgcacgctacacggccaaggctcagaaggagaagcggtggcgcgttctggctgacaaggtgacggcccagaacgccttgaagggttcggcttcgacggggttgttccgccgcagcgcagcacccgtgcagtgatgtcgggagtgcggagcgacgcgtcccgccgcgtagggccataccttgtgggcgacaattccggagaggctatacgccgcggggttgtcgccccgcatgatttttccggcagatagtattgttatttcacccatatgcaaattttcaagatatgagcaagaagatgaaacccgccacactttgtgtgcaggccggctggacgccgaaaaacggcgaaccacgcgtgctgcccatttaccagagcacaacgttcaaatacgatagtacggaacagatggctcgtctgttcgatctcgaagagtcgggctatttctacacgcgcctgcaaaatccgacgaacgacgctgtcgcctcgaagatcgcacagctcgagggcggcgtggctgccatgctgacgtcaagcggtcaggctgccaatttttatgcagtcttcaacctctgtgaggctggcgaccattttatcgcttcgagtacgatttacggtggcacattcaacctcttcggcgtgacgatgaagaagatgggcatcgcctgtacgttcatcgacccagactggaccgacgaggagatcgaaaaggccttccgcccgaacaccaagtgctttttcggcgagaccatctcgaatcccggcggccatgtgttcgacatcgagcgttttgcccgtatcgctcacaagcacggcgtcccactcatcgtggacaacacgttcgccacgcctgttcactgccgtcccttcgagtggggggccgacatcgtgacccactcgacgaccaagtacatggacggtcacgccacggctgtgggcggcgccattgtggacagcggccacttcgactggatggctcatgccgacaagttccccgggctctgcctgcccgacgagagttatcatggcctgacttatgccgaggccttcggcaagggcgcgtatatcacgaaggctactgcccagctcatgcgcgaccttggatccatccagagccccgagaacgccttcctgctcaacctcgggctcgaaacgcttcatctgcgtatgaagcgccactgcgagaacgcacagcgggtggccgaattcctgcaagccgatccgcgtgtggcatgggtcagctatgccggtctgccgggtgacaagtattatgagctgggccggaaatatctgcccgagggaggatgtggcgtcattgccttcgggctgaaaggttcgcgtgaggataccgtccggttcatggaccacttgaagctcatctgtatcgtgacgcacgtggccgatgcccgcacctgtgtgctccatcccgccagccacacacaccgccagctcagcgacgaacagcttgtcgaggctggtgtgcgtcccgacctcatccgtctttcggtgggcattgaggacgtcgacgacatccttgccgatttgagccaggcgcttgacgaactggcctgatcgtcatctgatacatccagagacaaagcacccgtttccacaagagggagacacaagtcctcctgcgtgcggaaacgggtgctttgccgtttttgacggacagccgtccgctttttcctctcagcaggccggcgcctgctcttcggcccagcgggctttattctctgagagccagggacgcagcgtccgcctgccgttcccaatcaagcagaaagcgcttggctgcgagaccgcctccgaagcccgtcaggctgtggtcgctgccgatgaccctgtggcagggagcgaagatcgaaatggcattggcgccgctggcgtttgccacagcgcgtacggccgtggcgatgccgaggcgccgggccagttcgctgtaagaaaccgtgtggccatagggaattttgagcagctctgcccagacttccttttggaacggcgtgcccacgaagagcagggggatgtcgaacgtatggcgctgtcgggcaaagtattcgtcaagttgatgcgcagcctcgcgggtgacgtcgctgccgcccgtggtgtattccgcagcgagcgcccgttgcagccggcgggcgattcgtccaggatgtttctcgacaatccaattgcaaaggcagagactcccgtcgtacgacccgagtaacatgtcgccgcaaggcgaacagtagggttggatggatatcgtttttttcatctctttgtctgtgtctgaggaggtccggctgctttttcttccgggtgtacggaaggttgccgggggaatgcgatgtacggtagcaaagatacgcaaaggaaagagccggggaaagaaaaagcccgctttttcgcagacctgtcagggccgcctccccgcttcgtgcggaaagtaggtgattgccaataagggaaagggccgaaaggcgcataaaaaccgtagtcatggcgcatggcggtgaaacggttcagtcctgagtgattttgtattacttaatcaaactttcccttttttcttacggaggaaagtcctaattttgcccaccataaccataaaagttaaacggggaagttgtgtccaagtcaggccgtcacgagcagtagataggctcagtcttgccttttggacgctcttttcaaatatagtttaaccttattcttagagatattacggtccttcaataaaaagcatgacagcatatatgacaagcgatacgatttgtgcgcccgccacagcatcgggcggcgcgttgtgcgtagtccgtgtggcgggtccggaagccatcactgtggccgacagggtctttacgccccggcatggggaagccctgcgcgggcgggcaggttacacgctggtttttggtgatgtgcgaaggtccgacggcagcctggtcgatgaagtcgtggtcagtgtctttcgtgcgccgcattcctatactggcgaggacagcgtggagatttcgtgccatggatcggcctacatcgtgagtgagcttatgacacggttggttgaagcaggctgtcgcatggcccgtccgggtgaattcaccgagcgggctttcctgaacgggaaaatggacctcagccaggccgaagcggtggccgacgtgatagcctcgacatcgcgcgcggcgcaccaagtggccatgagccagatgcgcggtggattcagcagggagttgactgcattgcgcgaccgactgttgcactttgcctcgctgatggagctggaacttgacttttcagaccatgaggatttggagttcgcagacagaagcgaactgttggcgctcgccgaagagattgaaggggtcatagggaagctggccagttcgtaccgggccggcaacgtgattaagaacggagtgccggtggccattgttggagagacaaacgcaggaaagtccacattgttgaacgccttgttgggtgaggaaagggccatcgtgagcgagatgcatggcacgacgcgcgatgtcatcgaggacacggtgacgctcgacggcgtgatgttccgcttcattgacacggcagggctcaggcagaccacagacgtggtggagaacatgggcattggccgtacgtacgaaaaaatggagcaagccgctgtgctgctgtgggtggtggacgccacggacgtcacggccgccacacgcttgcagcccgaaa

SEQ ID NO: 2430 - DNA, 11944 bp, synthetic construct
  source 1..11944: mol_type = other DNA
  misc_feature 1..11944: note = Synthetic
tcctgctcgctccaaagaactattcttagaggggttgggctgcgcaggcgctatgcttcgttgcgcttcagtagatctccgaactttactcaactgctcttagccgattcgcattagctaatcggcagctagttcggaagtctataatacacaaccaagcttatgtgtattcttcgccgtttttcctttgtctttctcgcctagcttcctgctcgctccaaagaactattcttagaggggttgggctgcgcgagcgtactgctgaaaccacggttcccgagatttaaataatgatttcgtgcaaaactgtatcgactgtatcgatgagaaatatgtcgcccagcgtatgttggacttccggactttctatcagccagcattagcgggctgattaaaatcatccaggcatagtccggagaagtaataagtttgcagaaagctccgtatttacttcttttctgtataggggaatggtgacaacacggtcatcgctcacggtcctcgagtggttttaatcagcacagttaatttttaagatgtgattaaaattgtatcgaggatggtcattatttggtttattttaacgcaaaaatatgtatctttagtacataaattagagtttttttaaactagtgctaggtttgccatgtctaataatttcgaaacaaagataaatcagctattacaacaacaacccaaaaatgtagtttataccagtagttggatggtgcaaaatggctatagtttagaattacagagaacttatcggaattcaaaatggtttcagagtataggtgaaggtgcaatggttaggagcggtgaaattgtaaattatttgggagctttgtatgctttgcaaaaacagcttgggatggcggtacatttaggcggtaaaacagctttagaatttcaaggattacttcattatttaaatttttcacagactgaagttactttatttggcggttctggtgtaaggctacctacttggtttgaaaaaggtcaatggaaaaccccaataagttaccaaactagcaattttttgcctgccaaagcaagccttattagttggcaagccactggttttgaagttttgatatcttcacctataagagcttttttagaactattgcttcttttgaaagagtccgctgaatatgtgcctatttatgaaatattattaggaatgaataatcttcaccccaaagatgtgcaagcgattttagaagtttgctcttctgtaaaagtaaaacgactttttctctttatggcagaaaagacagggcatagttggtttaattacctaaatatagaagatatggaattgggacgtggcaaaagaagcttggtgaatgaaggcgtatatgattataaatataaaataacagttccaaaagatttgatgctatatgaataagcttacttataaaaaacaggttgatctattattaaaagttttacctgagatagcaaaagagcctgggttagctctgcatggctgaacagctattaatcttttttacagaaatatgcccagactttcagtagatatagatttaacctggctttcttgtgaaagaagagaaatggctttcccaaaaattaatcaagcattaaatgcagtgaaaatcaaattggaaaagtataattccccaataaatattacacacgacaaaggaaacctaaaactgattatttctaaaaatggtgtaggaataaagactgaagtaaaccctatcaaaagaggaggttatgcagaaccagtagagcttgaactttgtgaaaaagctcaacaggaatttaatgttttttgcgtcactccagttgtagaaaaagggatgctatttggtgggaaaatttgtgcagctttagatagacagcacccaagagatttgtttgatataaaatggctgttggatgaaagtggatgggatgatgtaattaaaaaaggatttatattttatctaatctgtggtaatcgcccaatctatgaacttctgtttccgcattttgctgatcagagcaatgtttttcaaacacagttcagcggaatgtcatcttatcctttttcttacaaagactttgaaaatacccgtaagaaattagttgaattgattcataaaaagttgacaaataacgataagaaatttttattagaattagaaaatggaacaccaaattggcaaatttatgatttcaaagattttccagccgttaaatggaagcttagaaatgttgaaaagttcaaaaaggagaaacctaatgagcatagagaaatgcttaataaattagagaacggttttaatgttctctaataattagaaaaaaacgaaagcacagcttccctctgagattttctaaatttaagtccatgaagcttgaattttcccccttaattaactctgcagatcaaaaagttgtgattgccagccacagctttaatcgctggctcaaagaagccaaaaaagcttatactctccagcgtattcgcattgattcggtggatatggtagtgcgcaatgggcgaccatttcccctgtttatcaaagctcgttgcttggccattgcacccaccggggaaagctacgatcatactgttttgattcgcggtttggccgtggcgattttggtggttttaatctgtgaaaaccgcaaatacttgcttttggtggagcaatcgcgtttgcccattgctagccccagctttttagaaattcctgcgggaatgctcgacgaaagcgatgatagcgcagcggttgccatcaaagaattgtccgaagaaactggcttagcggtggaaaaatcacagctgaaattgttgcacccagctttggccatttcttgcggcattttagacgaaaaagtagcgctttatgccgtggaaatctcggtaaatgtggcggaattagagaagttcaaaaatcgcaagcaaagttatgacgaagaaaatgaaaatattattaccagagtaattccctacgaaaaagccgccgaagtttttctagattcaaagggaattgcagctttatatttttacgaaaaactgaggtcaggcgaatgataaatgcagccattggtcagatgaaaatcgtgccgggagcggtgtctctcaatttgcaaaatgctcaaaaaatggtggatcaagccagtgctttaggggcagaattgttggtgttgccaggctggtgtttgagtggaaaatggcgaaaaaacactagcctttctatgcagcgcgaattgcacttgcaatgcgtggaagcgggcatggaactggctaaatatgatcccaatattaccgtggtttttggcaatatgcaaatagatgattttagctccgcaatttgggtggggcaggggggaaagttcagcgtgcactctccggggaaagcattaagtttggagatggggaagcgcagtttgcgtgtgggactaagtgtgggggaggcggtgggagacccgacggtggatttaatggtggtatgcggaggggatccgtattttcgccagaacgaaagtcccagacaaaaatgggcgaaaatagcccagcaaaatgattgcgcagttttatacgccagtggggtgggcttgcaaaactgcggagataaaatgtatgccctgctgggctgcagcgccgccgtggaacgcggggggaaattggtgtacaagctgcccccagaccaagagcaatgctctttggtgacttggcactcacctagcgccaccaccgttactcctaaatccgaaatgagttttacatttttcgctttgcgccgggtaatcgccgattatatggagcaaagcagtttgcgcaaagtagtggtgggcgcgtctggcggcatagattccgccgtggtggcagcgctgatggtgcatgtttgtggccctgaaaatgtgctgctgatttccatgcccagtgcctataacagcgccaccactcaaagcttggcacgcaaattagcgcaaaatttgggatgctattttgccacggtgggcattgaccaaagcgtggcacttacccaggagcaaatatccgggctagagataaaaaacgctgcaggagctacccaaaacttaaaactcagcgattttcatctggaaaatgtgcaggctcgtgaccgcagcggacgcattttagccgctgccgccgctgcttggggagctgtttttacctgcaatgccaacaaagtggaagccaccgtgggctattccaccctttacggagaccacggaggctttatcgcaccgctgggcgatctctggaaacatgaagtttacgcattgggaagatatttgaaccatatcttcgccagcgaagttatgcccgaaggggtctttaatatcaaaccatctgccgaactttcaccccagcaaaatcctgaaaaaggcggtggcgacccctttcattactggtatcacgatcaattattggcggcctttaccgaaaaaggcttaggccccaccgccctaaaagaagcctaccaaaaaggacacttaaaagcgctgttgaatttggaccgacccgtggaagaattgtttgcctcggcagaggaatttgaggcagatttgcaacattggtggcgacaatacaccggccctggtgcttttaaacgcgtgcaagctccccccgtgattactgtggcactcccaccgaagctactcaggctcaaataactcagctacatttctatcagtaaacagataaagtagcatgatggtttttgatttagtgccattatcgtattctatagatattgttccttttacataatccacatccatctttctgtagtggggaacctcgtttgtgagttgtgcatgaatcgctttagtgagttccgcatatatatgctgcgtatgtgcatggttgtcgagcatctttaaatgtaagccaaatatggcatccctaactacaacatcccgcaatctggctattaacttagcctcatcatttataattcggttatatgagctatgatataagttcattgataccgagtattggtattctccatcatcataagagactttaacaacaacaccatcaagtgcgtccattgcttcgatggataagtgttttctgcgtataatggaaaatggatatatatccctgaatacatccagtgatgcctgtaatagatattctctatgtgcgtatatatacttgcatagatcagatgaaattgaagctttggaacccattatgtcattaatatataaattgttttgcctataaatacatgtttatttcgtgcaaaactatatcgactgtatcgatgggaggggtattctcctgggtcatggaagaaagtagtaagtagttagcccacggtccccgagtggttttgatgagataaagaagtgcagatttaatggcaaaaatgtatcgagggggcttctaggctcttcacaaactagcctaaacgagtcggctaaaaaacaagtcctaacaatatgttatcctgtgtatattggacttccgacctctctacaaactagctgatgcgagtttgtgaaaatctttttagatgaggtcagagaggggaaaaatcccctgtctgcgaccacgccgccccaaagcattgccacccgtacctcggcggcgcgttctccgccaccccttatgcggggacaccccgcaacgccccgggaacctggcggaaatcctttaataaataaaagaaaatgttttaaaaaactgatggagaagctaaactgacaaaatatgtcggtctagctgagttatattaaaaatataggcaaatcaatgctttagtatttgaatagataagaaatagtgttattaatgtgtgtggcaacaatgtggaagaaataaaaaaaggcgagtggaacccgcctcaagtgttttcacaacggaataatccttattgtgaattgcttacattagtaatatacttagtaatataactttaaaaacaataaaaggcaactgttatgaaaaaagtactcggtttagatttaggtgtaactagcattggctgggctttggttaatgaagctgaaacaagtgaagaaaagtcatctattatagatgtcggtgtaagagtaaatcctttgagttcagatgaaagggataactttaataaaggagcggctataaccacaaatgcagaacgcactctaaaaagaggtatgagaaggagcctgcagcgttacaagttgcgcagaaaagtcttaaaagaaattttattaaaaaatggtataataaaaaaagatactgttctgcatgaaagcggtactaacaccactcaccaaaccttaggtttaagagcaaaagcagccacagagagaatagaattagaagaatttgccagagttttgttagcaattaataaaaagcgaggttataaaagcaacagaaaagcaaaaggtggcgacgaaggtactttgattgatggaatggaggtagcaaagcttttacatgaaagaagtatcaccccaggtcagtatgttttagagttaattcaagcaggcaaaaagaatttacccgagttttatgcctcagatttacaaagtgagtttgatcaaatttgggaaaaacaaaaacctttccatccagaaatgttacttgatgactttaaacaacaattacaaggaaaaagcaaaagacaaacaagctccatatttttaggaaggtttgaagtgtttactgcagagaataaagccacagacaagcgcttgcaagcttatacatggagaacagatgctttgaaaatcgagttacctatagaagaggttgcttttgtgttaggcgaaattaatggacaaattaacgcttcaagcgaatatttgggtgccattggcgatagaagcaaagaattgcattttaacaaacaaaccgtagggcagtatctctatgaattagtgcaaagagattttcacaatagtttggctaatcgagttttttatcgccaagattactttgatgagttcaacaaaatatgggatgtgcaagcacaatttcacaccgaacttaccaaggaattaaaaaaagaaattcgtgatgtggtcattttttatcagcgcagattaaaaagtcaaaaaggacttattagtttatgcgaatttgaatctcgtagtatagaaatcaaaaaagatggcgtaattaagaaaaaaaatgttggcccacgggttgcccctagatcttctccaatttttcaggagtttaaaacttggcaaactataaatcatatagtattaagtgagcctggacaagaatcaaggtcattggaagaagatgaaaggttagcattatttgaggagcttagtataagaaaaagcatgaaaatatcccatgttcgtaaagcattgggtttgtctaataaagttcagatgaattttcccgagctagacggtaatcaaacggcttttgaattgattgaagcatatttacaaattgtaaattttagtggacatggcgagttaaaagcctcgtcgtataaagcaaatcatattattgaaaccataagcaatgtttttgaaggcttgggcataaatactggtattttaaagttcgactcaagtctaaactctaaagacatagagaatcaaccttattaccgtttatggcatcttttatattcttatgaaggtgataattcacgcactggtattgacagtttattagtaaaacttaaagaggattttggctttgagcctgaatatggcagaataattgcccaagtagcctttaaaaatgactacgctagtttgtcagctcgggcaatgaaaaagattttaccttatttacaaggggggaatatttttagtgaagcttgtgagtatgcaggttacaaacactccaaggattctttaactaaagaagaaattgctaataaggtgtatttagataaacttgaaatattaccaaaaaacagtttgcgtaatccagtggtagagaaaattcttaaccaaatggtccatgtggtaaatggagtaatagatgaatatggtaagccagatgaagttcgcattgagcttgctagagaactaaaacacagtgcggctgaaagagagctgatgactaaagggattgcttcagctacaagagagaacaatgaaatacgggaaaaactacaagcagaaccttttaacttacagtatgtgagtcgtaacgatataatcagatacaaactttatgaagaattgaaagataggggctacaaaaccctttattcagacacatatatttcagaaaacagcttattcagcaaaaagtttgatgttgagcatattattccgcaatcgaaactgtttgacgactctttttcaaataaaaccttagaattacgagaagttaatttagagaaaagcaatgacactgcccatgattatatcctaaaaaagtatggtgaagaaggcctagagcaatattttcgcagagttgaggatttacaccgtggcggtgctattggtagggctaagcttaacaagctaaaaatgtccggagcaaatattccccaagactttatagaacgagatttgcgtaatactcaatttatcgctaaaaaagctttgtcaatgtttagagatttagttcccagcactgttgctaccacagggcaaataacagcaaggctcagggaagattgggggctaatgaatatacttcaagagctaaactgggaaaaatatcgcgatttagatatggtaaagagctttaaaaaccgagcaggtcatgaagtgcggcgcattgaaaactggaataaacgtagtgaccatagacaccatgccatggatgctcttactgtggcatttaccaataggcgctatgtacaatatcttaataatcttagcgccaaaagtgacagatcaggggagatatttggaatagagcaaaaaataacctataaaaatgctaacaataacaggctgtttgtatcacccatggaaaattttaggacagaggctaaaaagcatttagaaaatgtcttagcttccataaaatccaagaataaagtggtaacaagaaacactaatattaccaaaagaaaaggtggtgtaaataaaaaagttcaactcacgccccgggggcagctacataaggaaactgtttacggttccataaagcagcctgtcgtcaaaatggagaaaataggaggaaagtttgatgcagaaaaaattgccacggtttgcagtcctagatatagagaggcgttattaaagcgtttaaatgagtttgataatgctcctaaaaaagcatttactggaaaaaactcacttgctaaaaatccaatttggatagataaagaaaagaaaatagctgtaccagcagaggtaaaaactcaagtatataagacagtttatacaatacgaaagcctgtaaataaagatcttaatgttaatcaaataatagatcctcacattaaaaaaattataagtgcacatattgaaaagcataacaaagatgctttaaataatttggatgaaaatcctatttggcaagataaagctaaaactattcctataaaaaatgttacagtcaaagggattagcactgctttgtcattgcgtacaaataatcaaggcaaagccatagattttgttagtagcggaaataaccatcatgtggccatatatcgtgatgataaaggaaatttacaagaaaatgtggtttccttgtacgaagctgtgcaaagatcaataagaaaggaagcaattattgataaaacgctcaatgctgatttaggctgggagttccagttcaccatgaaaaataatgaatactttgtgtttccaaattcagaattggattttgatcctagcaaaattgacttattagatcctgataattatgccaaaataagccctcatttatttagggtgcaaaaacttactaaaggagattattattttagacaccatttagagacttctgttgaaggaaatagaagcctgattggtgttacttggaaaaggttaagtaaagttggtataaagggcattataaaagttcgtattaaccatataggcaaaattgtgacagtgggggagtattaggaggctaaagtcatggtaaagcgcactttgctatttactagtccagtttatttaaagataaagcgtaagcagttgcttattgaatatgctggtggtaaaaaaaagtatgccgatgtagtggatctaggtttggtggttttagaacatcctcaaattaccattactcacggcgttttgaatgctttgttagaaaataattgtgcattagtaacttgtaattataagcacatgcccgcaggtcttatgttgccattggctgccaatactttgcaaagtgagcgttaccaaaatcaaattaatgccactgtgcctttaaaaaagcaattgtggcaacaaactgtacaggcaaaaattcgtaatcaagctagtgttttagcactttatggatttaccatagataatatgttagcctgggctaaatcagttaggagtggggatagtgaaaatagggaagccactgccgctgtttattattggagtgagctttttaaagctgtggataatttcactagagaaagggaaggtgttagcccaaataactttttaaactatggctatgctattttaagagccgtggtagccagagctttagtaggggcagggctaatcgttactttaggcatacaccaccataatcgctataatgcttactgtttagctgatgatataatggagccttatagaccttatgtggatatgcttgtttatgaaattttggaagaatatggagaaaatgaggatattcccatggatataaaagcaaaacttttgaaaataccagttctggataccataataagggaacggcgccgccctttaatgaatgcggttgaagaaaccacagcatctttggtgcaatgctttgctggtgaaactcgcaaactttcttacccagaaataccatgcagcgtataagtgagtatagaactatgtggttattagtatttttcgatttgcctactttaaccaaggcagataggcgagaacatactcgctttcgtgaaaaccttttaaaatcgggttttaaaaggtttcagctctccatatatatgcggcattgttttagcatggaaaatgccaaagcatatataaaccgcatcaaaaactttatgccagataaaggtaaagtaagcattttaaatattactgataaacaattcggtagaattttgcttttttatggtgctaaagaagtggatccgccacctgaaacccaacaactagagatattttgaaataaaaatccagtctttaaacaaaaaactccctgcttaaacagggagtttttttatttgctaaaacatgctttaacttgttgcaaatcaagcctttataagaatcgtgctgtttcagctattcttatattactaaaaatgtaagcaattcacaactggggtctttgtcggtaatcacaatggagatgctgtttcagctattcttatattactaaaaatgtaagcaattcacaacagccgagctaaacgcgagcgtgtaaagcaagctgtttcagctattcttatattactaaaaatgtaagcaattcacaacataaacgacgctttataaacaacgctgtccgctgtttcagctattcttatattactaaaaatgtaagcaattcacaaccttagttgtataatgccatcatatcttgtttgctgtttcagctattcttatattactaaaaatgtaagcaattcacaacagagtggcctccttagctgttctgttgggtgctgtttcagctattcttatattactaaaaatgtaagcaattcacaacactgtcgttataagtaaacaccaattgcgcgctgtttcagctattcttatattactaaaaatgtaagcaattcacaacacaatttactgaattaacttgaattgactcgctgtttcagctattcttatattactaaaaatgtaa

SEQ ID NO: 2431 - DNA, 11735 bp, synthetic construct
  misc_feature 1..11735: note = Synthetic
  source 1..11735: mol_type = other DNA
aaagctattggcaagcggcacgaaatatgttataatatattggatccttgtccatgttgatgccccattgttctactatcttggtcactgccttctcgccatactcacgctgcggatcgccgtagatgctctcgcccaatttgcgctgcaccgactcggcatacatgttgtcgctgcggaaaagcaacgatttcagaatctctggcagcaccggcgactcgtacgacaggatttgcatggcatcgctgtcgcttgcactcaccttctttccttcaacggggatgccctcgctctcgagtgtctctctcacatcggcacacaaacctacggctggatgcggcatcgtggtgaccacttctatcggctcctgcatgcggcgcatagctccgctaagcgtgattcggctgttgtttttcttgcgttgcacgacagggctgaatctgccgcgattcaccaccgtcatccggttgtctatctgtatcgaacgcagatgcggcacggtgtcgaccacaagggcgcggccgctcgatgtgtcgataatcagcgagaacagattgtcgttgtagtttatcgaatgcactcccgcgccatagtcttccgtcacgtcggcgtcgagccaatctttgggcacggcgttgtgcggctgtatcttttcctccgggcggatgttgcctttgatagcttttatgccccacagtttgatgttttcaacagcggcggagacaaaggtttcgcggtcggggaaatgcttggagtcaagcgtcgggtcaataccgccctcgatgacaatgtcgccgttgagcgttccgtttttgtcgatagtgcctgtatatttcagacgcgtgcggaaatggaagttctgggtgagttgcttcaacgctgccgacgatgtgacaattttcatcaccgacgccggtatcatttgccgctcaagattgtaggacgcaactggtgtgcctgtgcgcaaatccatcacgcagacgcccactgtggctcctgtcatggcacggctcgacacaaactgcctgatggctgaatccattttcacagaaagcgagtcgacggtggtgtcgacaacgctgtctgacgccgtcacggctttcaccggttgtctgtcggcgaatccgacagacagcagtacgattatcagaatgatatgcttaatccgcttcatttttattttcttttctcattattttaacattcaaagttaaacataaatcccatgaattggcggtgtgtgtaagcatcttttaccgaattaacaatgtttaaccacgcatcgtttcttttccataatgcctgcgcaccaacagaaagacgccggctccataacggagtcggcgtcttcttgctgtattcctatgcagcgcgatggctattcgagcaccaaagtggcacgtgcggggaacgacatgtgcggcgcgacggtcacggcatcgccggtaatcacgtcgcggaaagtgtcgccgggacgcatgatttcggcatatcggctcatgtcaacatcggtgagaggctcatcggtgccgttcatcagcacgatgaagcgacggtcgccgttggtgcgctcatagacgtagagctggttggacggcatgaaatgacgcaatgtgcctgccgacacggctttgttgccttggcgccaatggagcagacggctcatgaagttgaacgcgtcgcgttggagcggcgtgcgtccgtcggcggtaaacaccgacacgctgtcgcctgggaatccgcctggcatgtcgaggcgcacatagccgtcggtcacagccttgctgccgtgcatcagcacttctgtgccatagtatatctgcggaatgccgcgggtggtcagaaggaatgcctgcgcctgttcccagcgggcaaggtcagacggctcctccaagagaaaacggtctgtgtcgtgattgtcgtagaacgtcagcaacctgccgcagtcggcataaagcatgtcgagcgcaaggtggttaaacaggcggttgagtccgtcgcttcctgattttgtctgttctccaaacgcttgctgcgccatcaggcacaacgggaaatccatcaccgttggcaattctgtattgactgggttcaacttgttgccgcgttgcatatacgcaatgctcgcctcgttttcaagccagctttcgccaacgatgttgaaccgcggatactcgcgtgccacggcgcggttccaacgcgccatagcctccatgtcggcatacggataggtgtccatgcggatgccgttgattccggcatactcaatccaccagatggagttttggataagatatgtcatcaagtgggggttgcgctgattgaggtcgggcatacccgacacaaaccatccgtcgacggtgtgcttgaagtcgtattggctcacataaggatcatgcaccgtgttaagccggaagttggtgagcagcaacgagtcgacggcggcatttctcttgcctgtcaaatttgcctgctgcacgcttctgatgccgtcggctgtcggctgggcattaagccagtcgtggctgggaaggtcgtagagccacggatggtagagtccgcagtggttgaaaatcatgtccatcaccaccttgataccgcggctgtggcattctgaaatcaagcggcggtagtcgtcgttgcttccgaagcgcggatccacacggtaatagtcggtggtggcataaccgtgatagcagccaccgggcatatcgttctcaagcacaggagtgagccacactgccgtgatgcccagctcctcaagatagtcgagatggtcggagatgcccttcagcgtgccgccgtggcgcgcgcccgggttcgtccggtctatgcggtagtcgaaattggtagactgatgcttcacgtcgccgccgtcggcaaagcggtcgggcatcatcaggtaaagcacgtcggaagagtcaaaaccctcgtgacttgctccgtcgccctgacgggcaagcagttcatattgcttcttgattttgcgcttgccactggcaaacgtgatgtcgacagtgccaggtttggcatcgctgccgatggtgagatacagaaactgataattcgggctgtcgagacgcgccacggagtcaagtttcacgccagggcagttgaccgacggcacagcgtcgcgtatgtcctcgcccgtaaccattatctgcagctgctggttttccatccctgtccaccacatcggcgggtccatgcggtcgacagcagtttttgcgttggttgtcattgcgccggccaaaagaagtccggcaacaagaaagatttttttcatcataggtaattgagtttttgtttttccgccataaatttacgacttatttgccatgtaaatcacatttttgtgcatttttatgccctatttgcaactttttggctttacccctatcccttttcaattaataaaaaaacgcctgcagcatttaccgcaggcgcatccaccgttttaaggctgatggaaattcctaatgttttcacaacggagccaggctccttattgtgatttgcttaaaattctaccgcaaatttggcacttttcaacgacttttccaactttttttcaaaaaaaattactaccttgcaaacaaaaaaacaataacattgaaaacacccgattagttatgaaacttatatttggttttgaccttggctccacaagcattggatgggccgttgtccaagaaaaagaaaacgatacagaagcgtcaagaatcttaaaacttggcgtccgcgtaaatcctttaacaaccgatgaaaaaacaaacttcgaaaaaggaaaaccaatcacgaccaatgcaaacaggagattggcccacggcatgaggctgaacctttccagatacaagcagagaaggaaagagcttataaaaagtttaatacgattcaaattcatatctcctgacaccgttctctgcgagaatggctcaaacaccacgtttgaaacacttcgcctgcgcgcaaaagccgcaaccgaagaaatcactcttgaagaattgtcacgtgtactattgatgataaacaaaaagcgtggatataaaagcaacaggaaagctcaaccaaacgacaatggggctattgacaacatagacattgcaaagaaattgtatcaaagtcacttaaccccaggagagtatgtattcaacaatctaaaacaagggattcaatacattcctcctttttatcgttccgacctaatcaacgaattcaataaaatagttgactgccagacgcaattctaccctcacctaaagaatatcgacacaggctctcttctaaaagccaaaaactgcgacatcattttagacggacaagatgtgcaacgcatcaagcaaaaaggcagcccttcagagaaaaagagagaactgtattgtttaagagcgcaagctgcaacgcaacaaatcagacttgaagaattggctttagtcctggaaaaaatcagctctgaaatcagaaattcaagtggatacctcggggacatcagcgaccggagcaaggagctgtttatcaacaatcaaacaatcggtcagtacctgatgtctcaattgggcagaaatccgaacaacaaactgaaaggacaagtcttctaccgtcaggactatgaattgccatttgtgaatttgagaaacagaagagggaaataactgtcgacggcaaaaagaaaattattgaattcggcccaaaagtatgcccaaaatcatcgccaattttccaagaattcaaaatttggcaaactatcaacaaccttaagatttcaaatatttacggtgaagagctcagtctctcctccgatgagcggcaaatcctcttcgaagagctgtcaattcggaagaaactaacctgcgctgagattctaaaattattacacaaagattccaaatgctccttgaattacaaagagattcaaggcaacgccacaatttctgccatttttgacgcattcaaggaaataattctgcaaagcggacacgacaacaacaacttcaataaggcatcttttaaagacacaatgcttataatcgagcctattttcaagatgttggggataaatactgacatcctgtctttagattgtcctaccgacagtcattccttaaagacatgccctatttatcaactgtggcatctgctttattcttacgccggcgacaattccaaaaccggagactcttctttgatcaagaaattgcaaagaagatacggattcagcaaggaatacgcatcaattatgtcgaaaatatctttcgacaacgactacggtaatctaagtgcaaaagccataatgcgcatacttccacacttgcgaaatggattgcaatacagcgacgcctgcaatgctgccggatacaaccactcaaaacggtcgcttacaaaacaggacattctcaacaaagtcttagtcagccagattgacttgctgccacgcaattctctgcgccagcctgtcgttgaaaaaatcctcaaccaattaatcaacataacgaatgccttgatatcaacatacggcaaccctgatgaaatccgcatagaactggctcgtgaattaaaaaagagcgctgacgagcgggcgaaattaaactctgccaacaatgccaatgaaaaagaaaacaattcaatccgggaattattgcaagagcgattcggcatccaaaatccgagcagaaatgacattgtcagatacaagctgtacaaggaacttgagcacactggtttcaagactctatattcccaatctctcataacagatgacatcctatttagcaaagagattgagattgagcatatcatcccgcaagccagactgtttgatgattctttgtcaaacaagacattggaatttcacaacattaatcaaaacaaaagcaatcaaacggcatacgattatatcttatctgaattcggtgaagactatgccgtccagtataaaaaacgtatcgacgatttgctgaaaaatggcaaaataagccgaaccaaacacaaatatcttttaatgtcggagactgagattcccaccgacttcataaacagggacatccgcgaaactcaatacatttcccggaaagccatggaaattctcgaaccagccacacgcaaagtggttgcgtcgtcaggagcaatcactgctcgtctgcgcgaagattggcaattggtcgacgtgatgaaggaacttaattgggaaaaatacaaggctctgaatctgactgaaacaatacaagacaaagacggacgaagaatctacaaaatcaaagattggacaaaacgcaacgaccatcgacaccacgcgatggacgccctcactgttgcttttacaaaaccttctttcattcagtttctgaacaaccttaatgccagaagcgataagggcaacgccatttatgcaattcaacaaaaagagttgcaccgcaacaaagacggaaaattgtgtttcaatccgcctttgcctttagacgaattccgagcggaggctaaaaggcaactgaatgacattttcgtttcgcacaaagccaaaaataaagttgcgacacgcaactcctatatgaccaaaaacggcaaagggacaaagattgtagaactcactccacgcggacaattgtttaatgaaacgacttacggctgtgtaaagcaatatgaaacaaaacttgaatctgtaaattcttcttttgacaccgacaaaatcatgacggttgccgacaagtcatatcgccaagctctgatgaaacggattgaagaatttgacggcaatgcctctctggctttctctcgaaagaactcaatcacaaagaatccgatatacgttgacgattcccattccgacactgtccctgtcaaagtgaaaaccgttgttcctaagcctgttttcactcaaagaatcgctgtcgacataaaactcgacaagactaaaatcgcacagatattggatgctaaaatcagacgcatcttaaccgacaggttctacgaatttggagaagaccctcaaaaagcattctccaacatagatgaaaatccaatttggctgaataaagaaaaaggcattgccataaagaaagtcaccatcaaaaccggtatctctggagtcccaattcgccacaagcgcaacaacatgggtcgacctatcctcaactccgacggaaataaaattccttccgattttgttgtcccaggcaacaaccatcacattgcgatatacaaagacgctgacggcaatataaaagagcaggcagttcctttctatatcgcgacaaatagagttatacataagcaacctgccgtagaccggaatttcaacgccgacaaaggatggaaattcttattctccattaagaaaaatgaatacttcgtttttcctaatgagaagacggggttcaatcctgcagaaatcgacctgctcaaccccgacaacaacaaaatcataagcccgaatcttttccgtgtacaaaagatttcatcaagcaactactatttccgtcatcatttagaaaccaccgttgatgccaacaacgccctaaatggaactacgtggaaacatgtgcagtcattaaaagcgcttgaaaatatcatcaaagtccgcgtaaacaacatcgggcaaattgtcgctgtcggagaatactgacgtcacagcttatgattaaaaaaactctatatttcagcaatccggcctatctgtccctaaaacagggacagatagttataaaattgccggaaattgagaaggccggcaatgttgccgacattatcaaacaacagtcaattatgacaaagcctatcgaggacatcggaatcctcatcctcgacaatcgccaaataacgctgacgcacgcgctgctgaacgctttgctcgacaacaacagcgcggtggtcacttgcaacgacaagaatatgcccacaggattgctgcttccactggctggaaactccattcagacagagcgtttcacgagccaaatagaagcctccgcgcctctgaaaaaacaactttggcaacaaacggttaaggcaaaaattgagaatcaagcgaaagtgctatcggcatgctccaacgttgaaatccgcggaatgatgaaatgggctaccgacgtgaaaagcggagatgccgacaatcttgaagctcgtgcggcggtcttttattggaaaaacattttctccccatttaccgactacaaattcacccgcgaccgtaacggaatccctccaaacaaccttctgaattacggatatgctattctacgggctgtcattgctcgggccattgtgggcagcggactcttgccaacatttgggattcatcaccataatagatacaatgcctattgtcttgccgacgacataatggaaccatatcggccttatgtcgacgagctggttttttctattgtgaaaaaatacggaatggagaatctgtctcttaccaaacatataaagatagaattgttaaacattccgacaattgatgtaaccataggcggaaagaaaagtcctctgatggtagccgcaagccaaacttccgcttctttggcaaaatgtttcaacggtgagattagaaaaatctcataccctgcaagataacagaatttatggatgaacgcatcagtcaatatagagttatgtggataatggtatttttcgacttacccaccgaaaccaagaaggacaggaaggcatatgctgcgtttcgcaagaatctaatacaggatgggttctcaatgtttcaattttcaatctacatcaggcactgcgcaagcatagaaaatgccgaaacccatatcaaaagagtgacatcaagacttcctgaatatgggaaggtgggaataatgtgcatcactgataaacaatttggcaatattagcattttttatggaaagaaaacagcaccaagttactctcctggcactcaattggaacttttctaatccgaaacgcacttcaacagaaaatgaaatccactaatagtaatcacttccgcctacaagaaagtccttctttttttatttctacaactacacataacagcctatacaacaccacattacacacatcctgttgtatctgtagtaacaaagataagaattttaaagcaaatcactactaggactcccaactgcaagggtctgtgccagttgtatctgtagcaacaaagataagaattttaaagcaaatcacaacgagcaggtcgttaaacactgcaaaaagaaagttgcgtctgtagcaaccgagcgagggcgtctacaactctgggaacagcgaaggctcggcgagcaggcggaaggtgtggcggtggtagggggtggcgccaaaacgcgcaatggcttcgcgatgggctttcgtgggataacctttgttcacgttccaaccgtattgcggaaattcctcgtggatgcgtttcataaactcatcgcggtgggtctttgcaagaatcgacgcggcggcgatgctcatcatcttgccatcgcctttcacaatgcattggtgcctgatgccgtcgtagggacggaaacggttgccgtcgataagcagaaagtcgggacgcaccgacaagccgtccacggcgcggtgcatggcgagaaacgaagcctgaaggatgttgatgtggtcaatctcatcgttgtcaacgatgcccactgcccaagccagagcgtcgcgctctatcacgggacgcagtgcgtcgcgggcatgctcggaaagcttctttgagtcgttgagaaggtcgttggtgtagccgtcgggcagaatcaccgccgcggcaaacaccggtccggcaaggcatccgcgcccagcctcgtcgcatcctgcctcgaggcgtcccggttcaagatacggcaacaacatcagtggtggcgtttgattatgtagtcgaacaacgacaggaatgcccgcttggcttcgttgtcgggatatggctcaaggatgctgcgtgcctcggcgcgcagacgctccatcgtggcataggcatattcgattccgccctctgccttggcaaagtctatcagcgtctctatctgttcggtggtaagcgagtcggagtcggcaagacggcgcatctcttcgtggcgcggcgactcggtgtgcgacaatgcgtaaatcagcggcagcgtcacctttccctcgcgcaaatcgttgcccgtgggcttgcctatggcatcatccttgaaatagtcgaagatgtcgtccttgatctggaacgacagtcccagcagctccacaaacttcgacaagttggcgatgtcgatgtcggaggcacctacagagtatccgcccaccttcacacaactctggaacagcgatgccgtcttcttgtttatgatgctgaaataagtctgctcgtcgatggaatgatgcttggcaacgtcgatttggtcaatctcgccggtcgacagttccttgccgagttcggagatggtgcttatcacacggaaatcgttggtgcggatggcacaggcaagggcattgctgacaaagaaatcgccgacaagcacggcgatatggttgtcccacgtattgttgatggtgtcgtggccgcgacgctgcttggtctcgtcgataacgtcatcgtgtatcagagaggcattgtggagcaattccaccgacgccgcaccgcagagcacaccgtccgacacctcggcgccgaaaaacttggcgctgagcacaacgattatcgggcgtatctgcttgccttttgtttccaaatacttgtctacaatcttattgagcagcggactattgcttgagagcgactgctttattatcttctgcagccgctccaaatcggatgatatcaggtctcttatttcatcaaaattcgtcataaaacgatttttaagacacaaaagtaatcatttattctgcgaaaattgtaatttcacggtgaattaatgccgaatcattgatttttttatattaattagtactattcacctacaatatatggaacagaaaaaattatttttgctcgatgcctatgccttgattttccgggcataccacgcgatgaaatactctcctcgattcacgtcggggggaatgaacacttccgccatcttcggctttgtaaacacgctcgaggaggtgctgcgcaaggagaacccgacgcatatcgccgtgtgtttcgaccctgcgggaaaaacgttccgccacgagatgtttgccgactataaggctggtcgcgaggctacaccggaggatatcaaggtggctgttccatacatcaaagacattatacgggcttacggaatccctgtggtggaaaaagagggatatgaggccgacgacgtgattggcacgcttgccacgatgagccgcagccgcggattctcaacgtttatcatgtcgcccgacaaggatctcagtcaacttgtcgacccgtctgtgaaaatctaccgtccgggctacaagggacagccggcggaggtgcgcggcgagaaggaggtgtgcgacgtgttcggcatcaaccgcccgatacaggtgatcgacattctggcgctcatgggcgacaaggtggacaacattgtcggatgcccgggcgtcggtgagaaaacggcgtcgaaactgattctggagttcgacagcgtggagaatctcattgccaacaccgataagctgaaaggcgcgctgaaaaccaaagtggagtcaaacgtggacaacattctgttctcaaaaaaactcgccacgatatgcactgaggtgccgattgaattcgacgatgctctacatcaagaacaacatcgagcaccagc

SEQ ID NO: 2432 - DNA, 11273 bp, synthetic construct
  misc_feature 1..11273: note = Synthetic
  source 1..11273: mol_type = other DNA
tgagtcgataaaagttccggtatgcctgattccaatactgtcaagtctgttaatagtagcggttataccctcttcaccccggtcggcagcatgattatttgcagttaccatgtaattgatgccggcatttttgcaggcagaagcaagggcagccggtgaactgaactgtggatatcctatatagggagtacctgcgagagtgacctcaaagttcgcaattgaaatatcagcttcagaaattaccggttttatgtattggaatacttcatcataattaaatacatgggtctccctgttttctgcagaccaaatctgttcatcgtgccccattatatcaccaatgaacagaagggatattttatctgcaggttttgcagggttctgtccatacacaataaacggtacagatatgagaaacagaacagaaaatagagatctggtataaatattattgagattcattcgtaattttatctattgttaaagtttagtttcaggattaagggtataaagatacatctataaaaaatattcatataagaccaatccttaaaatgctaataattattaactttggccgcttaatttaaaggaggtccggtttaaaatgcggcaggtacagttatgaaagggtcaaaacagcatcttgaaattaagaagctttccctggcagggatgataatcacccttggtgttgtatacggagacctgggaaccagcccgctttatacaatgcgggcgattattctcggcgggaaaagtaatattaatgagctgctcatttacggagctttgtcatgtattttctggacactcactcttcagactacaattaaatatatcattataactcttcgggcggataataatggagaaggtggaatttttgcactttttgccctgatgaaaaaaaaatcgacctgggctgctattcttaccatgattggtggcgcagctttacttgccgacggggttattacaccatcaattacagttacttcggcaattgaaggattaaggctttacagtcacgatattcctgttgttccaatagtcctgatcatttttgccgctctcttcttcattcagcagttcggaactaattttgtcggagcctcgtttggaccgataatggttatctggttttcaatgcttgggataatgggtttttcgcaactgacgcttcatcatgaaataatcagagctatcaatcctatgtttgcagtcaggtttctgagcgagtatcccggaggatttattctgcttggtgctgtatttctctgtaccacgggagctgaagcgctctattccgatctagggcattgcggaagagcaaacattcgtgtttcatggatatttgttaagataaccctcttacttaactattttggtcagggagcatggttaatgctcaatgatggttccggtgcagatgtgaatccgttttttgcaattatgcctaaatggtttcttcttccgggaatattaatagcaactggtgctgctataatagcaagtcaggcgctgatcagcgggtcatacacccttctcagtgaggctgtttcacttaacttctggccaaagatcaggatcttgcaccctacttttatccagggtcaggtctatttgccatttgtcaactgggttctctggatcacatgcagccttgttgtattcttcttcaaagaatcggcaaacatggaggctgcttacggtttagcgataacgatcactatgataatgactacgcttttattgtcatactattcataccagagaggctggaaccaccggtttgttctgttattacttactgtatatcttactattgagggaagtttcctaattgccaatcttcacaaattcaaatatggaggatggttcacccttctgctggcatccctttatttcatgatcatgttcgggtggtatttcggcaggaaactaaaaaacagatatgtaacctttaccggcctttacaaatatttcgatcttttcaaggacctggtgaaagataattctgttcccaaaacagctacaaacctggtttatattatcaaggcaaaccggcaggatcaggttgaatcgaaggtgatcttttcaatattccagaaacagccaaaaagggccgatacatactggcttcttcacgttgataaaatggatgaaccggacagatttgattatcaggtgacccagatcattccgggtatcttaataagggttgattttcatatcgggtttaaagtggaaccaaagataaacctctacttcaaagaggttctggaagatcttattgaatcgggagaaattaagcttgagagcagttttgaatcgatgaagaagcattcttttcccgctgattttaaattcattcttattgacaggataatgccacgcgattataagctttcaggaatggagaatataacacttgcacttcacggtatgtcgcgattgttttgcatctcagacgtcaaagctctgcagcttgattccgcaaatactatcgaggaacaggtccctataacaattgatcaatctgttgaaaagagaatcagccggatcgggtgataatttgtttaatcaattttttttttttagttgcacagatgcaggattctgtttactttgtaagtgcaatctcataatagtatctgatcaatgaatgcaatgccgtttgtaataggaaccattgcggtttttgccatatcttacaggctctatttcagctttgtagcagctaaggttgcagtcaggaacgatcaggcactgactccggctcacaggttatacgacaggcaaaattattacccgatgaacaaatgggtattattcggccaccattttgctgcaattgcaggtgccggccctctggttggcccggttctggctgcacaattcggatttatgccggggtttttatggatgctcatcggagctgttatggcaggatctgttcatgatttcgtgattctgacagcatcagtccagcatgatggcaaatcgctggcagctattgcaaaagcagaaataaacagggtaagcggaattacaacaacatttgcaataatccttataatagttgttgcactggcaggcctgggtctcgttgttattaatgcactggctgaaagttcgtggggtacctttaccatagcttctacaattcctattgccctggtaatgggattatggatgttcaaagtgaggaaaggtaaaacactcgaagcaacactctttggtgtcataatgcttatacttgcagtcattattggtcgttatattcctggttctcaatttgccggctggtttacgtttaatcatagaactcttacgatcctgcttgctgtttatggattttttgcatctgtacttccggtctggcttctgctttctccacgggattatctgagctcgatcatgaagatatcagtgattggattacttgcgataggattaataattgtggcgccagagattaaaatgccggcatttactgaatttatcagtggtggtggaccgataattcccgggaaattattcccttacctttttattacgattgcctgcggcgccatttcaggttttcactcgctggtaagttccgggactacaccgaagatgataatgaaggaatctgatataaagaccatagccgttggttctatgcttacagaaggggcggttagtattatggcactcattgctgccacaagtcttcttcctctcgattattttcaaataaatgttccgcttgagaagttccaggcactactacctaagcttcatgctatgggttttacagaatccaatctggaccagttatcagtaagtgtaggtgaaaaaattgccggccgtactggaggggcagtatcgttaggtgttggaatggcttatatcttttcatcaatacccgggatgaagcatcttatgtcgtactggtatcattttgcaattatgtttgaagcactattcatccttacaaccatcgatgccggaacacgtatcggaagatttttgttgcaggaagcttttggtaaggtttataagccttttcagaagacaaactggctgcccgggaatttaataacaagcggattaatagtatttgcatgggcttattttatatatacaggcactgtatcgacaatctggcccatgttcggaactgccaatcagttactggccacaattgcactggcaataggcacatcatttattattaacaggggaagaaccaggtatgcctgggtgacaatagtaccaatgacctttgtgggagttacgactatgacagcagcgtaccttaatatcaggaacatttatattccacaggccagggaattaacaactatggttccagggctgataaaccttatccttactttgtccattctgatctgtgttgttataatattctataatgccgttcctaagtgggtgaaggcttacagaaacaatgattaattaagaaaaggccgtgggcctgaaatagattaaagcatgggtaaaaccctgctttaagacctgactcccttgtcataaaaccccgtacggggcgaaataaaaagatattttctgcacctgttttcatctatctcttcctgagaataaggaggttggtctctaaaaaatctcatcgacaggctagttttatccttttcatttgtctttgatcagattattttgcttaacttaggtagttctgcaaaaaaacggattatgtgaaaaaaatgcccccgtattaaaggacgagggcggcctaaatgttttcacaacggaataatccttattgtgaattgcttcagttgaaacaaatgtaagaaatatttcaatacaaaacgatatgaaaaaaattcttggattagacttaggtaccaatagtattggctgggcgctggtaaacgaagctaatgatgaaaaagaaaaatcatcgattataaaactaggagttagggtaaatcctttgacagtagatgaattgaccaattttgaaagagggaagagtatcacaaccaatgctaaccgaacacttaagagaagtatgcgccgtaatttacagcgatacaaacttcgtcgggaagaattaattaaaattttgaaagaatatggttttattgatgatgaaacaatactttcagaaaatggcaacataagaacatttgagacttatcgtttgcgttcaaaggctgtaaatgaaaagatttctttagaggagttcgggcgcgttttgttgatgatcaataaaaagcgaggttacaaaagcagtagaaaagttaaaagtcaggatgaaggacaattgattgacgggatggaaattgctaaaaaactctacaatgaaaatattactcccggacaattggtattacaaattttaagaggagggaaaaaatacattcctgatttttaccgttctgatttacaagctgaatttgataagatttgggagtttcaaaaaccgtttcatccggaaattttaattgatgatttcaaaactcaaatttcaggaaaagggaaactaaatacttcaaaaaatttccttgggagatttggtatttacacttctgataataagggtgtggaaaaaagattacatgcctttcaatggcgtgtcgatgccctcaataagcaactgtcgaaagaagaacttgcttttgtcattagcgatttgaatggaatcataagcagttcgagtggatatttgggctcaataagcgacagaagcaaagaactgtatttcaacaaacaaacggttgggcaatacctgatggctcagctagacaaaaactctcatgccagtttgaaaaatcaagtattttatcgtcaagattatttggatgagttcaatacaatatgggaaaatcaggcgcagtaccataaggaacttactcctggactgaaaaaagatatgcgggaaataattattttttaccaacgaagattgaaaagccaaaaagggttgatcagtttttgtgaatttgaaagcaggcaaattagtgttaatattgatgggaagaaaaaagttaaaactatcggttcaaaggtttgccctaaatcttctcctttatttcaagaatttaaaatttggcaagttctgaacaacatcctagtaaatgataaaacaagtggctccaaatggtttttagaacaagaagcaaaagatttgttatttgcagaactttgccttaaaagtaaaatgtccaagttagatgtcttaaaacttttattcagaaattataaagatctggatttaaattttaaagaaattgaaggtaaccggacacaagctgcattattcgaagcttatcggaaaatcattgagttaagtggccatggcgagtatgatttttccaaaatgcctgcccatgaaatcataagtacagtaaaaactgtttttgaggctctgaaatataatactgatattctttcttttaattcaggattagaaggaaaagagctagagaagcaagcaatgtatcaaatgtggcatttgttgtactcttttgagggagatggttcgaaaaccgggaatgaaaacctgattattaaaatttcagatttatacggctttgaaaaagagtacgccattattcttgcaaatgtcattctacaacctgattatagtagtttaagtgctaaggcaatacgcaaaattctaccctatttaatagatggatttgcatatggtgggagaaatgagcgtcctgaagaacctagtgcttgtgaatatgccggctacagacattctaaaaattctctgaccaaaaaagagattgaaaacaaagtattaaaagacattttggatattttgcccaaaaatagtttacgtaatccggtagttgagaaaatcctgaaccaaatgattaacgtagtaaacactgttgtaaaaacttatggaaagcccgatgagatccgcattgaattagcgcgcgaacttaaaaagagtgccaaggaaagagaggcattagctgcctctatcggaaagacaacagcagaaaacgaagaatatcggactaaattgcataatgaatttggattaacacaggttagccggaacgatattattcgctataagctttatttggagttggagcagagaggctataaaacattgtattcaaatacttatattcctaaggagaagctattcggcaaggaatttgacattgagcatattattccacaatcgcgtttgtttgatgattcgttttcaaataagatacttgaaagccacagtattaatatagaaaagggtaatgatacggcctatgattacattttggcgaaagaaggcaatgatgggttgactgattatttaattcgtattgaagatttattcaaggatggaaaaatttccaaaacgaagtataacaagcttaagatgaaagttgatgatattccagacgatttcattgcccgcgatttacgagatacccaatatattgcaataaaagcaaagacaattttggaagaaatagtcagggaagtggtttcaacatcagggtctataaccgatcgcttaagagaagactggcagttgatagatgtaatgcaggagttaaactgggataagtataacgctcttgggatggctgaaattattgaaaatagagagggtcataaaataagacgcattaaagattggaccaaaagaaacgaccatcgtcatcatgctatggatgcattaaccatagcatttaccaaaagaaattatattcaatatctcaataacttaaatgcccgaagcgacaaagcaggaagtatttatggaattgagactaaggagctttatctggatgacaaaggtaaattgaagttcaaacctcctatgcctttgaatgattttagggcagtagcaaaaaaacacttggaggagacccttatttccataaaagcgaaaaacaaagtaactactataaatatcaatgtctctgataaaaaagacggaactaacagaaaaagacagctcaccccacgagggcaattgcacttggaaacggtttacggaagtattcagcaatatgtaacaaaggaggaaaaagttggaggcacgtttaatgaggaactaattgcaaaagtcgcaaagaaatgttacagagtagcactattaaaccgtttaaaagaattccataatgatccaaaaaaggcatttaccggaaataacagtttaaagaaaaatcccttgtactctgacaaattaaagacccaagaagttcccgaaaaagtcaaaatagtctcttcagaaacgatttatacaattcgcaaagatatttctcctgattttaaaattgaaaaagttgtagatgaaaaagtcaaggttgtattgcaaaatcgtttgaatgagtttaacggggatagcaaaaaagcattttcaaatctggatgaaaatccaatctggttaaataaagaaaaaggaattgcaattaaaagggtaactattaaaggcataagcaacgcggttgcattgcacgagaaaaaagacaaagagggaaaactaattcttgataatgagagcagaacacagcctgttgattttgtgaatacaggtaataatcaccatgtagctatttataaagatgaacatgggaatttacaagaaaatgttatttcattttttgaagcgacaactcgtgtaaatcagagtttgactgttattgataaggattacaaaaaatcagaaggctgggaattcctttttagcattaagcaaaacgaatatttcgtttttccgaatgagaagacaggtttcaaccccattgagatagatttacttgatgctgagcattatcacttaatcagtccaaatttgttcagggtgcagaaaatttcttcaaaaaactatgtctttaaccatcatttggaaacaaaggctgttgatggagaattacttaaatcaaaaaaaagtctttcaggtataacatataatttcattcaaacaccatcaaaacttgaaggaattgtaaaagttcgaataaaccatattggacaaattatatctgttggggagtattaagagaatcattagttcgacttattagagatcatatgataaaacgtactctttatttcagcaattcctgtacactcaggaagaaggatatgcagttacatatcaattaccctgttgaagaaaataaagatgatagttctgtaccaattgaagatgtaggactaataatcctagacaatcctcagataattattagtaatgctttgttaatggctctcaatgaaaacaattcagccattataagctgtgattcctcacatttgccatacggattaatgcttcctatgttttcgcatcatgcatttacagaaaaactgcattctcagcttgaagcatcgcaacctcttatgaaaaacctctggcagcaaacagtcatttcaaaaattgaaaatcaggcagctcttttaaaaagagtaggagttgatacaagaaaaatgaacttttatctgtctgatgtaaagagtggcgaccccggaaatgtcgaaggcagggctgcggtatactattgggataatctttttagtggtgcaatattcttaaggcatcgttttggagaaccacctaataaccttcttaattatggttatgcggttcttagggcaatagttgcaagatcgctgattgcttcaggacttttcccgtcaattggtattcatcaccggaataaatacaatccatattgcctcgccgatgatattatggaacccttcagaccatatgttgattcacttgttcttgacataattcaggaaatacaggagttggaagaactgacaccagaaattaagaaaaagcttttgcagattcctgtcattgatgttgttatagatgagaaaagcagtcctttgatggtaggtgttcaacgtacgacagcttccctggcttcttgttttgacggggagacacggaaaatactctatccggcaatgggttgatcaactgaataaatgaacatggaagagcttacgcgactaaatcaatacaggataatgtgggcttttgtattttttgatcttccgactgaaactaaaaaggaccggaagaactatgcaatattccggaaatcattgcaaaaagatggttttactatgttgcagtattcaatttatgtccggcattgcaacagccgcgaaaacgctgatgttcatattaaaagggtcaggtcatttcttgctccaaaaggagagataataatttttactcttactgataaacaattcggaatgatggaattttttcggagcagaagccctgaatcacgaccagaaacaccacaacaacttgaaatgttctgattatgtagtggagataaaaccaaaccgaagaagggatggtcagattacctcaaaggtcgtagaccttaaatataagaaagcatgggcatagccctgcttatgtactacactccccctgaaagccccgtaggggcgagataagcttgagtcagaggtacctctcttcatactgaataccataagcatccagaagatttttgtattcatccataactgataacttcttatgatgctccttctgggttataatgtactttttaacagtatcaacccctgagttgcttacagagaatccaccataaccgtcctgccagtagaaattttgataatgaggtcctttcgttttaatccactttgatgaactcttcttaatttcttctaaaaggtcagcaggtgccattgtctttggtaaagaacagagaatatgtatatggtcagatgttccgcctatctggattggatttgatttgtagtttttcagaataccacccaggtatgaatacaattcaacctctatttctggtctgattagttgcatattgttctttgtatgaaaaacaatatgggcatagaattggacaaaagattgcgacataattattccattttcccgaatttacgaaatctctttaaaagattgcacttttagaataggatttctttggacaagtagcactatttcgcccgctacggggcttaaaagtatttgttatttattaaccgggcattgcccggttttaaatatcctgcccctagcggggctgatttgatgatctcaggaataaaaaaagctccgaaatagatattccggagcaatttcagagcacactttttatttttctgtttttgatattaaagcactcttattaagcaatataactgccggtatgttgtgctcaatatatcaaagatacaaactgagagcaattcacaaccaacactagatattgttgtttatttaaaaa

SEQ ID NO: 2433 - DNA, 11067 bp, synthetic construct
  source 1..11067: mol_type = other DNA
  misc_feature 1..11067: note = Synthetic
taggttaataaacggacaatcaaaatttttataataaaaaaagcgactcaattcatgagtcactttttatttatagaaaaccggttatgaagaagctttctgatctcttccatttttatttcttttacaatgtaggttttacagatctcgttgttgaaatgcatatgaaaatccatccgcatggatttgtttgatgattcattttcgggatgttcataattgatccaaaaaaagaaaagatttgccagacaaagcaaatttcttgcaaatgatttcagaatattgggatagttaccgtaatcatcaatcacttttattttaaaaatctttttgccaagagtacacccgaaaaaatgttctgttactgatcctaaaacaattgcacacggaattgaaagaatcacagcgaaaatcagaggtttatgcaatatgaaaacaaaaagcagggtaaaaggaatcatatctataattttagaacacaatctgtccctgcggttcttttcgtaggtagtatcataagggatttcatattcaaaaaattcatagatacgtcttccttccgaatcaaaatttcgggttgcccttcttgttgtcttattttccttaagctctgaaattttcatcttaccatgtgtttgcatttcatttcaaacttttgtgttatgctgaacagaatttttattagtaatgataaaaccaaaatcatttaaaattcagttattttagatttttcgactccacttcgtttcgctcaaaatgacaatttcgtaaataaaataactatctgaacagacttgaattcaaaaccttaatcattcttacaaaaccatactcagctgaattctttttctcgcttcatcaatctccgttactcttacctgaacgtgctgatgcagttttaccacttcgttcacatcagaaacaaagccgtcttttaactgggaaatatgaaccaatccgctttccttgattcccagatctacaaaacagccaaaggcagtgatgttattaacgattccgggcagaatcattcctgtttttaaatctttgatgctttttacattcggatcaaattcaaaaattttggcagcttttcttgggtccagccccggtttttcaagctcttttaaaatgtctttgattcctaaaattcctatgtctccggtgatgtagttttcgggttttaccagtgcgatcttttctttattggcgatcagttcattggtttttatgcctaaatcttttgccattttttcaacaattccgtaggcttcgggatgtacggcagaattatccagcggatttttggcattgtggattctcacaaatgcggctgcctgctgaaacgctttttctcccagtctcggaacttttttaagttgttttctatcttcaaaagctccattttcagtacggtagttcacaatattttctgccattttctcgccgattcccgaaacatagcttaataaagatttactcgctgtattgagattgattcccacagaatttacacatttcatcaccgtagaatccagttcgttttttaattgggtctgatctacgtcatgctgatattgtccgactccgatggatttcggatctatttttaccagttccgccaacggatccgccagtcttcttccgatggaaacggatccgcgaaccgtcacgtcatagcttggaaattcttcacgcgcaattttacttgcagagtacaccgaagctccggcttccgaaacaacgaaaacctgtaaaggtttgtcgaatgcaattttcttgatgaaaaactcggtttcgcggcttgcggttccgtttccgatggaaatggcttcaatattatacgcattcaccatggaacggatttttttcattgccattccgctttcgttttgtggagcgtgcggataaatggtttcgttgtggagcagatcgcctttttcgtctaaacagactactttgcagccgcttctgtaacccggatcgattgccagaatccttttttctcccaaaggcggtgcgagaagaagctgcgtgaggttttcagagaaaatctcgatggcttttttatcagctttttctttcgcttcctgtaaggtttcgttggagattgcgggttccagtaatcttttgtagctgtctttgatcgccagtgaaatctgttctgatgtttcattgttggatttgatgatggcattttcaataaaatcaatggcttcttccttatcgatcccgatattggttttcacaaaaccttcagattcggctctcaacatggctaaaaggcggtgagaaggcattctgttcaggctttcttcccattcgaaatactgcgagaatttctgtgcttcttcttcgtcttttttggctttcactacttttgaagtaaccattgcttttcgctgaaagaggcggcggagattttttctcacatacatattttcgttgatccattctgccatgatgtctcttgcgccctgcaaagcttcttcttcggaggcaacctgatcgttcaggtattttgaagccaaaaactgtaaatcctgaactttctggctcatgatgatttttgccaaaggttccagtcctttttctttggcggcatcggctttggttttctttctttttttaacggcagataaagatcttcaatttcctgaatatcaaaactttcttcaattctctgtttcagttccggcgttaaagcattttgttcttcaatcgattttaagatggattcttttctttttacaatttcttcaaactgtttactgagtttcgaaatctgttcaatctgtgtttcgtcaaggtttccggttttatcttttcggtagcgggaaatgaaaggaatggtgcagtcttccgccaatagttctaaagtggcattgatgcttttttcggatatgttgagggattgctgtatgtattgtgttgtgttcattgtaaattttaaacggctaaaataatcaaaatgtcttttgtaaacctattttaagtttaactacattatgaagttgtttaaagttaaagagtttgctcctttaggagcagaatctgtgtggaaataagaataaatccatcaatcaatccataggattgatatcttaaatatgataaattttctaaagatagcgttcctacggaacgcagaacgccttgcgaatatggggtctacacagataaaactctatagagttttctgccattttactttaaacaactttactttaagagctcatttaatattgctaaataaaagtttttatagcttttcttaattttaacactaagaatttcagttagttcagttaattgtaattaataagtttatttttatttagttttttagctaaaaagtcttaattccttaatggtaaaaataaatttaaacctgatacaaagattttaattgtatcatgtgtgtttaataattcttattttagcggaaaggtcagtaatggaaaccctgaaatttgatttcttgatgtatgataagataaaagtgtgggatgttttctatttttggttccggaatttagaattcagaataaactttaaacaatttaaataatatgaaaaaactaagtgttattgcattggttgcagtaggattgcttgcagcgtcttgtaacaaagaaaaatcggctgaaaatgcagcaacttctactgagcagaaagtagcagaaagcaaaggggaagtattgcctgtagatacggtaggttctgtggtaaactggaaagcattccacaaaggaggaatggctccgcgttggggaactttaatggtgaaatcgggagatttgagcattgaaaacggaggcgtaacggcaggaaactttgtgatcgacatgaactctattaaagtagatccggcttctgtaacggaaaaagataaaaaaccggcagatcttgaagcacaccttaaaaaccctgatttcttcgacacggcaaaaaatccaacggcagatttcaaaattacaagcgtagcagatcttaaggaagctccaaaagatgcagtagcaggtgctaacaaaacagtaagcggaaaccttacgttatccggaaaaacaatgaatgtaacgttcccagccaaagtggatgtaacagaaaattcagcggcaatccaggctaaattcacggtgaacagagcagactggggaattaaattcggaacttccgaagcggatcctgcagaatggatgatcagcaaagacatcgaaatcgctgtagatgtaaaagctaaaaaataatattgttagatatttcagatttgtaaagctgccttttttgaggcggctttttttgtgtttgggattttgcatttccctcctgaaatagaagaaggcgagttgccccgccttaaatgttttcacaacggaataatccttattgtgatttgctttagattgtaacgcaaatataatatataaaaccacataatataacttttatgaaaaaaattttaggattggatttgggaaccacttcgattgggtgggcgatggtaaatgaagcagaaaatgataatgagatttcgtctattatcaaacttggaacaagagttaatccattaacagtggatgaattaacgaattttgagaaaggcaaaagtattactactaatgcggatagaacgctaaagcgaagtatgcgaagaaatttacaacgttttaaacttcgcaaagagaatttaattgagattttgttaaaatccaaaattatcaaagatgagacaattttatcagaacacgggaatcgaagtacatttgagacttatcgattacgagctaaatctgcttctgaagaaatttcattggagcaatttgcaagggttttattgatgataaacaaaaagcgtgggtataaaagcagccgaaaagcaaaaagtcaggatggggggcaactaatagatggaatggaagttgcaaagaaattgtatgatgaaggaatcactcctggccaattagtattacaattattaaaggaaaagaaaaagtatattcccgatttttatcgatcagatttgcaagcagaatttgatagaatctggtcatttcaaaaacaattttaccctgatttgctagttgaggatttcaaaacgcaaattgcgggtaaggggaaattaattacctcaaagattttcttaggtagatttggtatttatactgctgaatgtaaaggcttagataaaaaaatccaggcttaccattggcgggtcgaagctttgttcaaagaggtaccaaaagaggtacttgcatttgttatcagtgatttaaacggtattattagtagttcgagtgggtatttggggtcaataagcgaccgaagtaaagaattatttttcaaaaagctgactgttggccaatacttgatggttcaattgaaacaaaatcctaatacaaggttaaagaatcaggtcttttatcgtcaggattatttggatgagtttaatactatttgggagaaacagtctaaattccatcccgaacttacttcagaattgaaatctgaaattcgcgatgtcataattttctatcagcgacgattaaaaagtcagaaagggctaattagtttctgtgaatttgaaagcaggcagatcgaagttgacattgaggggaagaaaaaacttaaaactgtaggttcaaaagtctgtccaaagtcatcacctttatttcaggaatttaagatatggcaaatactaaataatattcaggtaaatgtaaagacaaataaagaaaaaagatttctcgagcaagaagagaaagtgattttattttcagaactaagtttgaaaacaaaaatttcaaaagttgatgctttaaatttactatttaaaaatgcgaatgaacttgatttgaactttaaggaaatagaagggaaccgaactcaggctgcattttttgaagcttaccgaaagattatcgagttaagcggtcatggtgaatatgattttgcaaaaatgagatctgccgaagcatataaaactgtgcatgatatattcgaaggactgcaattcaatacagagatactttctttcaatagtgatgttgatggatctgattttgagaagcaagcacaatatcaattatggcatttaatctattcgtttgaaggtgacgattcaaatacaggagatgaaaaacttattcacaaaatttctgagctttatggttttcaaaaagaatatgccagaattattgctaatgtggttttgcaaccagattatggcagtctgagtacaaaagctatccgcaaaattctcccatatttaaaagaaggtagcgagtacagtgttgcttgtgaatatgcaggttacaaacattcaaaaacgtctttaacaaaagaggaaattgataacaaagtcctaaaggataagttagaaattttgcctaaaaatagtttgcgtaatccggtagtagagaaaattttgaaccaaatgatcaatgtggtaaatgcagctgttgaatcgtttggaaagcctgatgagattcgcatcgaattggcgagggaactgaaaaaaaatgctaaagaaagggaagaattaacagcttctattggcgaaaccacaatcctgcatgaaaagtataaagccattttgcgaaaggactttggactaactcatgtaagcagaaatgacattattagatataaactttacttggaattggagggaaggggttttcaaacattttattcaaatacttacatagctcctaataagttgtttagtaaggagtttgacatagaacatattataccacaagcaaggcttttcgatgattcattctctaacaaaactattgaggcaagaagtattaatattgaaaagaaagacgaaacagcattcgattatgttcataacaaatatggcgaagttgggttggcagagtatcaaaaccgaatcgaggaggcatataaagcaggaaagatttcaaaaacaaaactaagcaaactgaaaatgaaaggtattgatattcctaccgatttcattaatcgtgatttgcgtgatactcaatacatagctaagaaggcaaaatctattctcgaagaactatcgagaaatgttatctctacaaccggctcaattactgaccgtttaagggaggactggcaattggtggatgtaatgcaagaactgaattgggacaaatattttgctcttggaatgactgaatttattgaaaacagggatggtcaaaaaatacgacgaatcaaagattggactaaacgtaacgatcatcgtcaccatgccatggatgcgctgactatagcatttaccaagcaaagtcatattcaatatttaaataacttgaatgcccgaagcgataaagctggcagcatctatggtattgagcaaaaagaacttaaccgcgacgaaaaagggaagttgaaatttaagccgccgatgccactggatgatttccgggctgaagctaaaagacatcttgagaacacgcttatttcaatcaaggctaaaaataaggttgctaccatcaatattaatataaccgataaaaaaggagggacaaataaaaaacgtcaacttactcccagaggtcagttacatctggaaactgtttatgggagtataaaacagtatgttacgaaggaggaaaaggtaggatcgagctttaatgaagaacaaatagcgaaagtagctaaagcaaatatcaggcttgctctacttaatcgattaaaagagtttgataatgaccccaaaagagcatttacaggtaaaaatagtttggaaaaaaatccgatctatctggatgttgaccaaacatttaaagtccccgaaaaagtgaaaattgtatttgccgaaacgatttatactattcgaaaggacgtttcaccggatttaagactcgataaggtggttgataaaaaaatcaagagcatcctggaagcccgattggatgaatttaaaggtgatgcaaaaaaagctttttcaaacttagatgaaaacccaatctggctaaataaagaaaaagggatttcaataaaaagggtaaccatcacaggtattagcaacgctgaagcacttcattcgaaaagagataaagaaggcaatcttctttttgacgagaatggtaatacaattccagtagattttgttaatacgggcagcaaccaccatgtagcaatttatagggataaaaaaggtaatcttcaagaaaatgtaatctcgttttttgaggcaacagaaaggattaaccagggattacccatcattgataagggatttaaaagtgaggaaggctggcagtttatgtttagcatgaagcaaaatgaatattttgtattcccgaacgagaaatcgggatttaacccttcagaaattgacttgcttgattctgaaatgtataatttgattagtccgaatttgtttagggttcaaagcatttcatccaagtattatatttttaatcatcaatatgagacaagaaatgctgatggtaatctttttaaaacgaaaaagcagatggctgggataacatacaattttttacgtacccctgacagtcttcaaggaattgtcaaagtcagaataaatcatatcggacaaattgtttctgttggtgagtattgacatgctgccacttatccacattacaacctgccatattttcaatcatggcaacgggtttgaaaatatttaaaaaaaagccgaaaactatcggttttcatggaacagtataaacaacatattcggcaaattgccaaagtgcatgcctgctaccttttgccagatcgttctggactgcttgtgtgggagcaatcaggagtgcaattctccaagaggtgtttgtttactactttcagtcgaagcgcgtgccagtcggagcgcgcgtgccagtcggagcgcgactctaagtcgcaccccgactggcactggcaaaagtacgttggataaaacctaaaccctaaaacataagcttatgctcttcgaacccactggcatatatcatatttataaccagggcaataaccggcagcttgttttttttagccgggagaattacttgttctttacccgaaaaatctgcacccatatcatgccttatggcaatatactagcctggtgcctgatgcctaaccactttcatttaatggttgaggtgaaggatttcgggattgaccggggcgctgcggatagtcgggatgcgactgcggatagtcggggcgcgactgcggatagtcgggacgcgactttgagtcgcactccgactagtactagcacccctgacctcaatcattccattgggataatgcttgcttcatacacccgtgcaatccaaaagcaggaaaatatatcaggctcactatttcgccagaaaaccaaagccatctgcctgaatgaaatacaaggtatttcatctaactggtttacctcctttggtgtaacttttatgaaagttgatattcctgcattccaatatccccaggtttgtttcaactatatacataacaaccctgtaaaagccggtttggtgcaaaaggccgaagattgggaattttcttcgtatgccggccttgccggattaaggcccgaaacactggtgaataaggaaagggtggcagctctggggctaaacatataaacggattaatgaacgaataattgggatatgtacttgtaacgctataataatatgataaaacgtaccctgtactttggcaatccctgctacctgaaaaaaaaggatatgcagatgtatattgaattccctgaaaaagatgaaaaacctcctgtagccattccgatagaagatatcggaatactgatactcgacagtccgcatattacacttacccatgccttactggccgaactgaacgaaaacaatactgcagtgttgagctgcgacaataagcatatgccttatgggctgatgctccctatgttttcgcaccatgcatttaccgagaaaatgtaccagcaactggagagttcgctgccgttgcgcaaaaacctatggcagcaaaccatagttgcaaaaataactaaccaggcggcatttctgcgccagcacggtatcgacgaccgtaaaatgaaatactacctgggcctggtaaagagcggcgacccgcaaaacgttgagggccgcgcggcagcatactactgggaacatttgtttgccagccaccctgggtttacgcgcgacagggaaggagagatgccgaatgccatgcttaattacggttacgctattttgcttgctattgttgccagggctttaaccgccagcgggttgctgccggcggttggtattcaccaccgaaataaatacaatccctggtgcctggcttcggatattatggagccttaccgaccttttgtcgacaggctggtgatacaaatagcggccgaataccctggcagcgaaaccttaacccccgaaataaaacgtaagttgcttcaggttccggtaacggatattgtaattgatggcagcagcagcccacttatggtgggtgtgcaacgaaccacggcctcgttgtcggcctgttttgaagggtcgtccaggcggattttataccccgaaatgcagtgagtcgtgaacggagcttttatcgaacggctaaaccaataccggattatgtgggttttcgtgttcttcgatctgccaaccgataccaaaaaggacaggcgtaactacgccctgtttcgcaaaagcctgcaaaaggatggttttactatgatgcaatattccatttatgtgcggcattgtaacagccgcgaaaatgccgacgtgcatatacgccgtgttaaagggttcctggcgccaaaaggggaaataataatttttacattgaccgataagcaatttggtatgatggagtttttcagggggcgcgatttgaaagatcggccgggcacaccccagcaactggaacttttctgatgttttatccgttagtgttaagctgtagaaataaaaaatccttcgtccgggccgggcgaaggattttttctgaacacttttttacatcctgattacaggtttaagcatttgtgcatgaaatacttgaacaagggtatgttgtgctcagtatttcaaagat

SEQ ID NO: 2434 - DNA, 10692 bp, synthetic construct
  source 1..10692: mol_type = other DNA
  misc_feature 1..10692: note = Synthetic
gggatcttgtcgccatactctttaaggttcttctcgctctggaataccattgcgtctgcgttgttgagcttgtcaattctctcgcgctcctctttatctttagcctcgttagccttagcctcgtcacgcattctcttgatctcgtcctctgacaatcctgatgaagcctcaattctgatctgctgctctttgccagtagctttgtcttttgcagatacgttaaggataccgttggcatcaatgtcaaatgttacctcaatctgaggaacgccacgtggagcaggggtaattccatccaagtggaaacgtccgattgtcttgtcatctttagccattggtctctcaccctgaagaacgtggatctctactgaaggctggttgtcagctgcagttgagaacacctgcgattttcttgtagggattgtagtgttgctctcaataagttttgtgaatacgccaccgaaagtctcaatacccaaagaaagaggagttacgtccaaaagaagaacgtcttttacatcacctgtaagtacaccgccctggattgcagcaccaatagcaactacctcgtccgggttaacgctcttgttaggctctttgccaaagaacttcttcacaatctcctggattgcagggatacgggttgaaccaccaaccaaaagaacctcattgatgtctgaagctgaaaggcctgcatcctgaagcgctttgcggcaaggctcaattgttctctggattagagaatctgccaactgctcaaattttgctcttgtaagggttttaaccaagtgttttggaataccgttaactggcatgatgtaaggcaagttgatctcagttgaagtctggcttgaaagctcaatcttagctttctcagcagcctctttaagtctctgaagagccataggatcttttgaaaggtcaatgccgtcgttctcgctcttgaactcgtcaaccaaccactcaatgattacgtggtcaaagtcatcaccaccaaggtgagtgtcaccgttagtggattttacctcaaatacaccgtcaccaagctcaaggatagagatatcaaaagtaccgccaccaaggtcaaatacagcaactttagactcctggtcctttttgtccaaaccgtaagccaaagcagctgcagtaggctcgttgatgatacgtctcactttcaaacctgcaatctcaccagcctctttggtagcctgtctctgagcatcgttgaagtaagcaggaacagtaattacagcctcgttaacctcctggccaagataatcctcagctgtttttttcattttctgaagaaccatagctgaaatctcctgtggagaatacattctgccgttaatgtcaactctaggtgtgttgttctcacctctaactactttataaggtacgcggctaacctcgtttgtaatgttgtcataagtctcacccataaatctcttgattgagaaaatggtgtttgtagggttggtaatagcctgtctctttgcagggtcaccaacttttctctcgccaccctctgtaaatgcaactacagatggggtagttcttttgccctcgctgttaatgataactgcaggctcatttccctccataactgctacgcagctgttggtagtaccaaggtcaattccaataatttttcccataattctagtctccttaaaatttatattttttctgtttctatttcaattccatattcccgacagtttttcacttatcctttccctgtcaaggacactatcccatatcgccaactttgtgccaaaaggatttttatgacaaagtggcagatgccacggttgtcttacccctcaaagccccttgcttatattgttttttttcagttgctttgcatcaaataaatcaaacattatgtcagtagagggaaaacagagagttattacaactcataaattgttggaaatgaaagttaaaggcgagaagattgcaatgatcaccgcctatgattatacatttgcaggaatagttgaccaggcaggaatagacattattcttgtaggcgattctgcagcaaacgtaatggcaggacacgaaactacattgcctattaccatagaccagatgatttaccacgcccagagtgtaatgcgtgcagtaaaaaatcctttggtagtatgtgatatgcctttcggtacataccagggtaaccctaaagaggcggtaagaagtgccatcagaattatgaaagagtctgaggttgatgcagttaagatggagggtggcagcgagattatggagagtgtggagcgtatcctttcaactggaattccggtaatgggacaccttggcttgacccctcagtcaatccataaatttggaacatacgcggtaagggcaaaagaagaggcagaggcaaataaacttatagaagatgcaattgcccttgaaaaagccggctgttttgcaattgtgcttgagaaaatccctgcagctttggcaaaaagggtgtcagaaaccataaaaatccctacaatcggtattggtgcaggtcctcactgtgacggtcaggtacttgtaatgcacgatatgcttggattgaacaattctttctctccaaggtttttacgtaggtatgccaacttgcacgaggagtcactaaacgccatccgcaactatgtgtcagatgtaaagagctgtgactttcctagcgagaaagaggcgtactagaattgtattaccggcagataacatgattgttatgagggaacaaaattgaatgaatatgtgcccacaagaaaaacaaattaatgctgcagaggggggatctcctgtttacaggagccttccgcagcaggaattcaatgatatagcaggcaggatcctctatgaggacaaccacctgcttattttcaataagcgttcgggagagatagtgcaggcagacaaaacagaagatgaatgcctcagtactactctcaaggcgtttgtggcacagagggaccacaaacccggagctgtgtttatgggtgttgtacaccgtcttgaccgtccggtaagcggcgcggtaatctttgccaaaacgtccaaggcccttggccgcctgaatgaggcattccgtacaggcgaaatgcacaagacctactgggctgtggtatgcaaccgcccaaaagagaacgaaaaagttctcacccattaccttacccgcaacgaaaaacagaacaagacctacacaagccttacccctaaaaccggagcaaaagagtcccgcctgaggtacaaattcctaaaggcaacagaaagatactttctgttggaggtggagctcttcacaggccgccatcaccagataagggcgcagctctcagccattggatgtgtaattaaaggtgacttaaagtacggcgcaccccgctccaacccagatggcagcatatcactccactcccgccacataaggttcacacaccctgtgcgcaaagaggaaatggaggtccttgccccgccattctgtccaataatgaaaagttgtctctaaacaagaaatatcacactttaaagcggatatccggcagtcgggtatccgttttttttgttgcagaatccctctttgtcaaaaagtgacaaacgggtaaaatacctttgcgcaaactgtcgggaagctcagatttctaacttaattattgtaaatttgtagggttctccaattgtttaattattaatgatgaaggtatgacacaacacaatgcagtaaagatttttgaagagaagaaagttcgtgccgtgtgggatgacgaacaggagaaatggtatttttcagtggtggatgtagtgagggtattaacagagcagtctgacttggaacattccagaaattattggaaagtattgaaacacagattggcaaaagaaggaaaccaaacggttacagattgtaaccgtttgaaattgctctcaagagatggaaggttacgttttacagatgttgcagatactgagcagcttttccgtctcatccaatccaccccatcacctaaggcggagccgttcaaactgtggatggcacaggttagagcctgaagggaaataaaaaagccccgttaaaggacgaggctaaacctaatgttttcacaacggaataatccttattgtgaattgcttcaattattgtaagcacaaagttagaagaaaaaaataaaaaatacgctatatgaagagaattttaggacttgatctaggaactaacagcataggatgggctgtggtgaatgaggcagaatctgtagacgaagtatcttctattgtcaaacttggtgttagagttaatcctcttaccgttgatgaaatgactaattttgaaaaaggcaagagcattactacaaatgctgatagaacattaaagagatcagctagaagaaatttacagcgatataaatctaggagagataatctaattgaaatcctaaaagaaaataatttgatatcggactctacaattctatctgaaaatggtaataaatctacctttgaaacctatagattgagagcaaaatctgcaagagagaaaatatcattggaagagtttgcgcgtgtattgcttatgatcaataagaagagaggataccgtagcagtagaaaagccaaatccagtgatgaaggcactctaatagatggaatggagatagctaaacagctttataatgaaaagcagactcctggccagtatatgttaggtttattggaaaaaggaaaaaattattctccggacttctataaatcagatttgcaaaatgagtttgataggatttgggatgagcaaaaaaaatatcatcaagatattttaacagatgagtttaaggctcaaatagcaggtaagggtaagcagaatacttctaaaattttcttggcaaagtataatatctacacagcagataacaaagggaaagataaaaaacttcaggcttgtaaatggagagtaaatgctcttggtagagaagtttcgcaggatgtattggcatacatcattagtgatcttaatggtattataaataattccagtggatatttaggtgctataagtgaccgcagtaaagaactttatttcggtaatcttactgttggtgagtatttgatgagcaagattgatgagaaccctcacttcagtacaaagaatgtagttttttacaggcaggattatctggatgaatttgagaagatatgggaaatgcaggctcaattccatccggaattgacaaaagaccttaagcatgaaataagagatattatcatattctaccaaagagcactaaaatctcaaaagggacttgtgtctatttgtgaatttgagaataaagaaatagagattgaagttgatggaaaaattaagaagaaaacgataggatgcaaagtgtgtcctaaatcttctccaattttccaaaattttaaaatatggcaaatcctcaataatttagaggtaaaaggtaagataaataggtctttgtatgaggaggagaaaacattgttattcaaagaactctcatataagagtaaaatatctgaatcagacgccattaaactgttgttttcagatactaaagggctatctctcaattttaagagtattgaaggcaataaaactcaagcatctcttttcaaagcatacgagagaataatagagatgagcggacacggggagtatgattttgagaaaatggattcaaataaagctgtacaattagtccatgaaatatttgaaactttaggttttaatacagatatactgtattacaatgtgtctttggacgataaagaaattgaaaagcagcctctatatcagttatggcatttgttatattcatatgagggtgacaagtccaatacaggtttggattcattaatcaatattattcactcaaaatatggatttgataaagagtatgctaaaattattgcaaatgtttcatttcaagatgactatggtagcttaagcgcaaaagctataaagaaaattatgcctcatttagtggctggaaatgaatatagtcaggcgtgcgaactggctggctatagacattccaagaactcacttacaaaagaggaaatagagagtaaagtattgcaggataaattgcaggaacttcctaaaaacagtttgaggaatcctgtggtagagaaaattctgaaccagatggttaatgtagtcaatgcatcaatagatgcatacggcaagccggatgaaataagaattgagatggcaagggagcttaaaaagagtgcaaaggagagagaaaaaaatacagagaatataagtaaggctactaaggaatatgaagactacagaaaaatactccagcaagaatttggtttcactcatatcagtagaaatgatatagtacgataccgtctttacaaggagctggaaccaagaggatacagaacattgtattcaaacacctatataccaaaagatcaattatttagtaaatcttttgatatagagcatattattcctcaagcgagactttttgatgattcgttctccaataaaactctggaagcaagagatattaacattgaaaagggaaatagtactgcgtatgattatgtactggaaaaatacggagaggataaaattgctgaatatgagactgccgttaatgatttgtttaaaggtggtgcaagcgagtccaagcgtaagaaacttttaatgaaaggttctgatataggcgaaggtttcattgcaagagatttgagagatacccaatatatagcaaagaaagctaaagagattctgggctctatagttagaactgtaacatcaacaactggttcagttacagatcgtttaagggaagattggcaacttatagatacaatgcaggagttgaattgggataaatatgacaaacttggtttaacagaaattatagagggtagagacggtcaaagaataaggagaattaaagattggacaaagcgcaatgaccatagacatcatgctatggacgctctaactattgcgtttacaaaaccttctcatatccagtacttaaataatctcaatgcaagaagtgacaagaattctgtaatctatgcaattgagaataaagagctggagcgagataaaaacaataaattaaggtttaaagctcctatggaacacttcagggctgaggccaagaagcatatagaagagattcttgtatccataaaggcaaaaaataaggttactaccagaaatatcaataaaacaaagaaaagtggggaagtaaacaaaaaggttcaactgacaccaagaggacagttgcacttggaaacagtatatgggaagtctttgaggtacaatcctaaaattgagaaagttggttccggttttacagccgagtatattgccaatgttgccagcaagatagagagggaggccttgctagctagattgatggaatacggtggtgatcctaagaaagcatttactggcaagaacagtttagataagaaccctatatatctcaatgcagataaaacttttgcagtaccagtaaaagttaaagtggttactttagaagatgtgtacaccattagaaaagatattactccagatcttaagattgataaggtgttggataaaggtgttaaaacaatattggagaaacgcttggcagaatttaatggtgatgccaaaaaagctttttctaatttggatgaaaaccctatatacctgaataaagagaaaggtattaccattaagcgagttacaatttcaggtataagcaatgcagttgctttgcatgataaaaaagataaagaaggcaattttatccttgataaaaatggaaatagaatacctgttgactttgtaaatacaggaaataaccatcatgttgctgtctatagggatgcggatggtaatttacaggaaaatgtagtttcattctatgaagcaacttgcagagcttgccagggagatcctgtaattgacacaaactataaagcaaatgaggggtggaaattcctgtttacaatgaaacaaaatgaatattttgtgttccctaataaagaaacaggattcaatcctaatgacatagatcttcttaatcccgacaattatgctctgataagtcaaaatttgttcagggtgcagaaattagcaacaaaagattacttttttaggcatcatttagaaacaaatgtcgaaaatgtgacggcactcaaaaatattacatggataagatgcggattatcaggaataactaatattgttaaagtgcgaatcaatcatataggtcaaataatggcagtaggagagtattaaaatgggacaggatataatattatatataagcaaagacggtaaaagcaaggtagatctgtatgctaaagacgggagtgtatggctaaaccaattacagttggcagaacttttttccacctctaagcagagtattagttatcatatatctaatatcttaaaagataaggagttgcctaaggagtcagttgtcaaagattttttgacaactgcatcggatggaaagacatacaggaccgcgtattattccttggagatgattcttgcaatcggatacagggtaaaaggtataaggggggtgcaattcagacagtgggcaacggtgcatttagctgaatatttggtgaaaggattcattttggatgatgaaagattgaagaatcctgatgggagacctgattactttgatgaccttttacaaagaattagggatatccgggcatcagaaaagcgcttttatcaaaaactcagagatttgttcaaactcagtgtagactatgatccttcagacaaggctacacaaatgttttatgcaaatgtgcagaataagttattgtatgctgtaactggcaatacagctgcagaaataataacacaacgggtagatcgaaacaaacctaacatggggcttacttcatgggagggaaatattgtcagaaagcacgatgttgtaattgctaaaaattatctttctgaagatgaactggattcattaaatagactcgttgttatctttttggatacagcggagtttagagcaaaaagcaggacatgccttacactttcgttttggaaggatatagttgataaattgcttatgatgaatgagcaagcattgctaaaaggcaatgggtctgtaagcaatgaacaaatggaagagatagctcataaagaatatgacgaattcaatacaattaggaagagatatgatgccaaaaaagctgatgaggatgatttgaaacttctattggaagctcagagtaagtatgagaagaaataatccctaaataatactctcatgataaaacgtacgctttatttcgggaatccggcgtatttatcattgaaagattgccaaatggtaataaggatgcccgaaattgttaaggcagatttgcctgagttgtttgaaaccaaaaccactaagacaattcctgtagaagatattggagtagtggttttggataacaaacaaataaccataacgcatggcttaatggaagccttgctaggtaataattgcgcattaatcacttgtgacagtagcaggctgcctgtaggtcttatgctcccgctatgcggtcacactacgcaaaatgagcgtttcaggtatcaattggaatcttcccttccactaagaaaacaattatggcagcagactatccaggccaagattaagaatcaagctaaagttttgcaaagccagggctgcacaactggcaatatgctggtatgggcagaaaaagtgaaaagtggggacagtaaaaacttagaggctagggcagctgcatattattggaaaaatgtattcccatttcttgagaaattctatcgggacagaaatggtactcctccaaataatctccttaattatggatatgcaattttaagggctataatagctagagccctggtatccagtgggttgtcacctactttggggatacaccaccacaacagatataatgcttactgtttggctgatgatataatggagccatacaggccatacgtggataaattggtaatagacattatccttagcggggaagattatacccagctatcaacagcagtaaaatcaaaactgctgtcaatccctgttttggatgtttttattgatggtgtaaggaaacctctgatgattgcagcctcatcaaccacagcaagccttgccaagtgctttgaaggggaaatcagaaaaattatctatccggaaatgtaagtatggaacgttttagcgaatacagagttatgtggataatggttttctttgacctccccactgaaacaaagagggagcggaaggagcatgccctgttcaggaaaaatctggttagggatggtttcaccatgttccagttttcaatatatataagacactgtgccagtaaagagaatatgcaagtccatatccggagaataaagaaatttattcccgacaaaggtaaagtaggtatcataggaataacagacaagcaatttggggatatggaaatatttattgggaaaaaagagacatccccagaacatggcggactgcaactggaattattctaacaaaaaagagcataaggactattccctatgctcttttctgacatcatttttttaattctaaatcttttgtaaaaatcataacatcagatagttatgcacaatctgttgtctatgatgtcaaagatacaata

SEQ ID NO: 2435 - DNA, 10640 bp, synthetic construct
  misc_feature 1..10640: note = Synthetic
  source 1..10640: mol_type = other DNA
tgacagtctgcctgatgttcctatcctgatgactacgcctccgggatcttatgaaagtttccgtcaacgtcgtcggcgtcgcacatacgctattaatccccgaacggtaacggcagtgaacacgattcatgattttgcccgccgccataaactggtggtgtgggatatgtataatgttgtgggcggaagcctgcgcgcctgcaagaactggtcagacgcccgattaatgcgtccggatcacgtacattatctgcctgaaggctatacgcttcagggagaattattatatgaagccattattaaagcctataatgaatatgtttcccattgatattgatttcagccgcctgttggaggctttcaaatataatccggatgcgccgatgatattcagcagcggaatttttctttggctgttcgctgcgtttatggtaatctatacactgttgcaacatcgcaatacggcacggattctgtttgttgctcttttctcctattatttttattacaagagtagtggaacctattttttcctgttggctatcgttactgttaccgattttgtgatagcctggctgatggatcgaaccgatgtccgctggaaacgtaagttttgtgtggtactcagtgtatcggtcaatttgggattactctgctactttaaatataccaattttctgggtggggtcattgcctcgctgatgggaggggagtttacggcacttgacatctttttgcctgtcggcatctcctttttcacattccagtcgttaagctacaccattgatgtctataggaaagagatcaaacctttgaccagtctgctggattatgccttttatgtctctttctttccacagttggtggccgggcccattgtccgggcacgtgattttattccgcaaattcgtaaaccgctctatgtgtcgcaggaaatgttcggcaggggtatctttcttattgtggcaggtttgttcaagaaagcggttatctccgattacataagtattaactttgttgagcgtatttttgataacccgacactctattcgggagtcgagaacctgatggggctttatggttatgctttgcagatttattgtgatttttcaggatatagtgatatggcaatcggcattgctcttttacttggtttccatttcaatctgaactttaattctccgtataaatcagcgtcgatcactgagttttggagacgttggcatatttctttgtcgagttggttacgcgactatctttatatttctttgggaggtaaccgtcacgggaagttccgtcaatacctcaatctgattattaccatgttccttggtggactatggcatggggcttcatggaattttgtgctttggggtacttttcacggagtggcgcttgctcttcataaagcatggatgtccattattgggcgtaaaaagggggagaccagtcacggtattcgccgggtattgggtgttatcattactttccattttgtctgcttttgttggattttcttccgtaatgctgactttcacaattcgatggacatgctgaatcagatttttattgctttccgtccacagcttttcccacaactgatagaagggtattggcgggtatttgcactgatggcagttggtttcctgctccattttgctccggatagttgggaaaatgccgtttgccgtggagtgatcaagcttcctttcttaggtaaagctattgtaatggtggctatgatttatctggtcatccagatgaagagcagtgagattcagccgttcatctatttccagttctagtagttatcgcctttacttcttgaaagtattttagcttattttgatcttgtcaatatgcaggaaagtcctagtgatgttgttatttattttgaatagaagaatgttattcctgagcaatattctggacgggaaacctgcaacaagagattctatgatcttgtcgttgttcaagatttccctctttgcagtaaaaaaaactctgaatatccgttgtcgtcacaggattttgaagcagagtaatcagtacatcaaccgtaactggcgtatggtggctgaaggtatccgtatggcacagtatttattttgcgtcttttttataaaagagttatattgataattatccggttagttgtaagttattgaggatttcgtataacgttgacggtgttcttccgaagcagtaataccgcaatcattagtggttatcttcactgggatcagtttacccatgcacaggattagctgctttttgaaaagaatatcggtgcttacgtctgtattgataaagttgccctttcgcgcggtgaactctccatactcagcaacaaggcttcccatggtggcaaaggcagtattgtcgccataataagaggtatggatatctatatggtaagctctgtgttattcagactgtcccgtcgtcgttatcaagtgcgtgacatcaaattggatatgactcccaatatggagcagattgttcgtagttgctttcctaccgccaaacgagttattgaccgtttccacaagaaactggcttatgaagctgttctggagactttagtagcacaaaaaaggacgaggcaaatgccccatcctaaatgttttcacaacggaatagtccttattgtgatttgcttcaaattagtgacccaaagataatgaataatttttattatcatgtttatttatggaaaaatattaatatatttggggtgttgtgataaaatgagttaagtatgaaaaggatattgggattggatttgggtactaatagtatcggttgggcattggtgaacgaggcggaaaataaagacgagagatcgtcaattgttaagcttggtgtgagagtaaatcctctgacagtagatgaattgaccaacttcgagaaaggaaagagtattacgactaacgcagatagaacacttaagagaggaatgaggcgtaatctacaacgttacaaacttcgtcgtgaaactttgacggaagtgttgaaagaacacaaattgataacagaagatacaatactttcggaaaatggtaaccgaacaacttttgagacataccgattaagggcgaaggcggtaacagaggaaatctcgttggaagagtttgcgcgtgtattgctcatgattaacaagaaacggggttataaaagtagcaggaaagcaaagggagtggaagaaggtacgttgattgacggtatggatatagctcgtgaactttataacaataaccttacacccggtgaattatgcctgcaacttcttgatgctggtaagaaatttttgcccgatttttatcgttctgatttgcagaatgaacttgacagaatttgggaaaaacaaaaagaatattatccggagattcttactgatgtattaaaagaagagttgagagggaaaaaacgtgatgctgtttgggctatttgtgccaaatatttcgtttggaaagaaaactatacggaatggaacaaagagaaaggcaaaacagaacaacaagaaagagaacataagttggaaggtatttatagtaaacggaaaagggatgaagcgaaaagagagaatctgcaatggcgggtaaatggtttgaaggaaaagttgtcgttggaacaattggttattgttttccaagaaatgaatacccaaatcaataactcaagcggttatctcggcgcaatcagtgataggagtaaggagttgtacttcaataaacagactgtcgggcagtatcaaatggaaatgctggataagaatcccaatgcgagcttgcgaaatatggtattctatcgccaagattatttggatgagtttaatatgctttgggaaaagcaagctgtatatcataaagaactgacagaggaactgaaaaaagaaatccgtgatattatcattttctatcaacgcagactgaagagtcagaaaggattaatcggtttttgcgagtttgaaagtcggcagatagaggtagatatagatggtaagaaaaagattaaaactgtaggtaatagggtgatatcccgttcttctcccttgtttcaagaatttaaaatatggcagatattaaacaatatagaagtaactgttgtcggaaagaaaaggaaacgaagaaaactgaaggagaattattctgctctttttgaggaacttaacgatgcggaacaattagaactgaatggtagccgtcgtttatgtcaagaagaaaaagaattgcttgcccaagaactttttattcgtgataagatgacgaagtctgaagttttaaaattgttgtttgataatccacaagaattggatttaaattttaaaacgattgatggtaataaaacgggatatgcgttgtttcaggcctacagtaaaatgattgagatgtctgggcatgaaccagttgacttcaagaaaccggttgagaaggttgttgagtatataaaagcagtctttgatcttcttaattggaatacggacattctaggtttcaactcgaatgaagagttagacaatcagtcttattacaaactctggcatttattgtattcttttgagggggacaatacaccaacaggaaacggtcgtttgattcaaaagatgacagaactatatggctttgaaaaagaatatgctactatactagcaaatgtttcttttcaagatgattatggcagtctgagcgcgaaggctattcataagattctacctcatttgaaagaaggtaatcggtatgatgtggcttgtgtatatgccggatacaggcattcagaatcgtcattaaccagggaagagatagcaaataaggtgttgaaagacagacttatgcttcttcccaagaatagtttgcacaatcctgtggtggaaaagattctgaatcagatggtaaacgttattaatgtcattatagacatttacggtaaaccggatgaaatacgtgtagaacttgctcgtgagttgaagaagaatgccaaagagcgtgaagaactgactaaatctattgcacaaactaccaaagcgcatgaggaatataagacacttttacagactgagtttggtttaaccaatgtaagccgtactgatattttgcgttacaaactttacaaggagttagagtcgtgtgggtataaaacactttattctaatacgtatatttcacgagaaaaactgtttagtaaagaatttgatattgaacatatcattccgcaagcacggcttttcgatgatagtttttctaataaaacacttgaagctcgtagtgtaaatattgaaaaaggaaataaaacagcgtatgattttgtgaaagaaaaatttggtgaaagcggagctgacaatagtttagaacactatttaaataatatcgaagacttgtttaagtcggggaaaatatcgaaaacaaaatacaataaactgaaaatggctgagcaggatattcctgacggctttattgaacgtgacctacgtaatacgcagtatattgccaaaaaggctttgtccatgttgaatgaaatttcacatcgtgtggttgctacaagtggatcagtaactgacaagttgcgtgaagattggcaattgattgatgtgatgaaagaattgaactgggaaaagtataaggcattaggtctggttgaatattttgaaggcaaataggtagaatcaaggattggacgaaacggaatgatcatcgtcatcatgcgatggatgcgttgacggtagcatttacaaaggatgtattcattcagtattttaataacaaaaatgccagtctggatcctaatgcaaatgagcatgcaataaagaacaaatattttcaaaatggcagagcgattgcgcccatgccattgagagagtttcgcgcagaagctaaaaagcatctggaaaatactttgatttcgattaaagcgaagaacaaggtcattacgggtaatattaacaagacaaggaaaaagggtggcgtgaacaagaatatgcaacagacaccacgtgggcagttgcatttagaaacaatctatggtagtggcaagcaatatctgacaaaagaagaaaaggttaatgcttcgtttgatatgagaaaaattggaactgtaagcaagttagcttatagggatgcattgttgaaacgtttgtatgaaaatgataatgatccgaagaaggcgtttgccggtaagaattcgctggataaacagcccatatggttagataaggaacaaatgaggaaagtgcctgaaaaagtgaaaattgtaacacttgaagcgatttatactatacgtaaggaaatctctcctgatttaaaagttgataaggtaatagatgtaggtgtccgtaaaatactaattgacagattaaacgagtatggcaatgatgcaaaaaaagcattctccaatcttgatgaaaatcctatttggctgaataaagagaaaggtatatctattaagcgagttacaatttcaggaatcagtaatgcgcagtcattacatgtgaaaaaggataaggacggtaaacctatattggatgagaatggtagaaatattcctgtggattttgttaatacaggcaataatcatcatgtggcagtttattatagaccagttatagataagaggggacaattagtggttgacgaagctggcaatcccaagtatgaactggaggaagttgtggttagtttctttgaagcagtgacaagggcaaatcttggtcaaccgattattgacaaggattataaaacgactgaaggctggcaattccttttcagtatgaaacaaaacgagtattttgtttttccaaatgaaaagactggatttaatccgaaagagatcgatttacttgatgtggagaattatgggttgataagtcctaatttgtttagggtacagaaattctctcttaagaattatgtttttagacaccatttagaaacaacaattaaggatacaagttctattttgagaggtattacatggatagattttcgtagctcaaaaggcctggacactattgttaaagtccgtgttaatcacatcggccagatagtgtcggtaggagaatattaatataatgaatgacttatggacaaaaacaataataatcctccaattccatctgatttctttctctataaaaacagcaatggagaggtgaaagtcgaaatctatatttttaatgagacggtttggctaccgcaagacaagatcgcacaattgtttggagtggacagaagcatagtaactgaacatctgaagaatgtatataaaagcggggaattatcaaaaggggtaacttgtgcaatttttgcacaagttcaaatcgaaggcacaaggcaggtcacaaggcagattgagttttataatctcgacgctatcttatccgtaggctaccgtgtcaacagtattcaagccacacaatttggaatttgggcgaacagtgtgctgaaagaatatctgattaagggggggccatgaacgatgagcgattgaagaatccgcaaatgttgtttggtaaggattatttcgaagaacagttagcccgtattcgtgacattcgtggcaacgaacaacgcttctatcagaaaataaccgatatttattcgtaatgcagtgccgactatgaagcgggtagcgatgttactaagaagttttttgcaattgttcagaataagttgcattgggcaatttccaggcaaacggcggttgagattattgtttctcgtgtggacgctgataagcctaatatggcattaactacttggaagaatgcacccaacggaatgatacgcaatccggatgtttctattgcaaagaactatctcaatgaaatggaaatggatgatttgaaccgcattgtttcgatgtatttggattatgcggagcgtcaagcaaaaaaaaggacaagtgatgtacacgagagattgggtgaaaaagttggacgtatttttgcagttcaacgaataagccgtcctacaacatagcggacgggtgagctatgagattgccaaggcattagcggaacaggaatatgacaaattccatgttagacaacttcatagctacaaattgaactttgacaaacttttaaaaggaatgagtcatgattaagaaaacactttatttcggaaatccggtttatctatcgttacgaaatgcgcagctagttattaaacttcctgatgtagaaaaagcaacggttttgccggaaacgttgaaaaagcaggcggaagtaacgaaacctatagaggatattggaatcgtcgtgttggataacaagcagataactatcacttccggtgtgctggaggctttgcttgagaacaactgttccgtaatcacttgtgatagcaggagtatgccagtcggattaatgcttcctctttatggaaatactacgcagaatgagcgttttcgtaaacaattggatacttcgcttcctttgaagaaacaactctggcaacaaactattcaagcgaaaatcaacaatcaggcatctgtgcttaaagattgtatggacgaggaagtaaagtgtatgcgtatttgggctaccaatgtgcgtagtggcgatcctgacaatttggaagcacgcgctgctgcatattattggaagtctttattctcagatgttgatagtttcactcgggaacgtgagggaattcctcccaacaacttgttaaactatggatatgccattcttcgtgcggtggtggcgcgtgggttggtaataagcgggttgcttcctacgttgggtatccatcatcacaatcgctacaacgcttattgtttggcggacgatataatggaaccttatcgtccttatgtggatgagttagtgtttagtttgatacaagagtatggaaaaaatgcggagttgacaaaagagatgaaaactcgattactgactgttccgacattagaagtgataattggaggtaagcgcagtccgttgatggttgcggtagggcaaactactgcttcactttataaatgtttcaatggagagcttcggagaatttcctatcccgaacgatagattatggatcgttttaatgaatatcgtattatgtgggtgcttgttctttttgatttgccaactgagactaagaaagaaaaaaaggcttatgccgattttagaaagaatctacaaaaggatggttttacgatgtttcagttttccatttatgtgcgtcattgtgccagtagtgagaatgcagcagtacatataaaaagagttaaatcatttctcccagaatttgggcatgtcggaatcatgtgtattacagataaacaatttggagatatagagcttttttatggaaagaaagtgcaagatgtcaatacgccgggacagcaattggagttgttctagaacacaaaatctcgcattaatgcgagattttgtgttggaagcagtcttctttttcttttttctaatttactcttaacttattgaaggacaatgtgttatgtaaaatctgctgtttccaatggttcaaagatactaatttgaaagcaaatcacaacccaacctattaacaccttttgcgaatagcgctgtttccaatggttcaaagatactaatttgaaagcaaatcacaacaacattggaataggtcggaataaaatatttgctgtttccaatggttcaaagatactaatttgaaagcaaatcacaacttacatgggactgaccgccttttgcacccgctgtttccaatggttcaaagatactaatttgaaagcaaatcacaacagagtttcaatatacaagcgaatggacggtgctgtttccaatggttcaaagatactaatttgaaagcaaatcacaactacattcctgtgctacttactttcttttccgctgtttccaatggttcaaagatactaatttgaaagcaaatcacaactctctttagctctgtgtaaagggggtgtagctgtttccaatggttcaaagatactaatttgaaagcaaatcacaactggtgtaactttggaaatgatgtattcagagctgtttccaatggttcaaagatactaatttgaaagcaaatcacaacccctaagtgtgagcttgctcacgttattgtgctgtttccaatggttcaaagatactaatttgaaagcaaatcacaactttacgctgtttgggtggtggttctgaatagctgtttccaatggttcaaagatactaatttgaaagcaaatcacaactctgaacgtaagcagaaaaaacaggattttgctgtttccaatggttcaaagatactaatttgaaagcaaatcacaacgggagcggtacaggcgttttctggccgtatgctgtttccaatggttcaaagatactaatttgaaagcaaatcacaacactatcgaactgggatatgcgtgtacttctgctgtttccaatggttcaaagatactaatttgaaagcaaatcacaaccattgttcaggcaacaagaaaacttcaagagctgtttccaatggttcaaagatactaatttgaaagcaaatcacaacctataagctgtatagattatcaagatataggctgtttccaatggttcaaagatactaatttgaaagcaaatcacaacacagtttgtttgcgtactcgcatttatcaagctgttcccaatggttcaa

SEQ ID NO: 2436 - DNA, 10594 bp, synthetic construct
  source 1..10594: mol_type = other DNA
  misc_feature 1..10594: note = Synthetic
atacttcttcgcctcagcagaaagggagtccagctcctcaaatccgccacgggataccattgaggcatacctgcgcggtacgttggttgctatgaatggcaggctgcttttcttcgcaaactcaaccagcggcctgtaatctgtcctgtaattcttccagagtttaacttcagcctcgaacttgtcagcttcatattctgatccgaggtattcatcaagcaacaactggttgtcagcctcgaacatctctgcgcccagcacaagcctctctcctgcaatcttatggagatctgcagtgacctcatattcaagccagtgggcaatgggattgtcgtgcagctccccgaagaagacgacatctgccgagctgattctgtccagcatcttttcatatttaatattctttccctcagaatcataaaggttatatgcgggcttgtccgacctgaaagacaggatcagaatggagacgagggtgaataggatggcggttctgttcattgtcatggcttgtaagggttgataattaagatttattagcaattgaaaacaaattaaaccaatatttccggattgatttggaatatctttggggatacaacaattgttcaatgaaaaggttaatcattctccttcttatcacagttttcgtggttgcctgccaccgaggcgggcagcaacatgactcgacacctgaggcacctgatacaggtgacctgacgatggatgccgggcttcagaaagtcttctctatgaggcgggaagctatacttgatactattggtgacggtttgcttatactccggtcagattatgggtttgacggaggcaggcatgaatacagggcagcaggcaacttctggtacctgacgggatacggtcagccgggagctcttatgtctctgtcaggcacggatgcgcggccttacaccctttatacaagggagagaagcattcgcgaaatcatctattcgggaaacctcccggacccgggtgaacttttaataacatgggctcctgataccgtacttgacttccgtgaggctgacaggaacattgccgaagctgcaaaggagggaagacacatctaccttgacttccgcgaccgcgtcttcagggatcatgtgcaggagatactgggaactgagaattctgccggtgcattgctcagggatatcaatccggcgctgtcagagatgagggttgacaaggatgaatatgaggtaatgatgctgcagaaggctgttgacattaccggcaagggtctcgaagcagtgctggctgagtgcgctccgggaatgtttgagtttgagatggaagcacttctggaatatgagtggcggcgcaacggttccaatatgcccggcttcgagtcgatagtcggttcgggggagaatgccgtcacgctccattattcggctaataacaggaagatggaagagggcgacctgctgctgatggatgttggtgctgagtacggatactacactgcagacattacccgtactgttcccgtgaacggaaggttcacggaggagcagagagatatttatgacctggtattgcgggcccagaaggctgcgataggcgagatgaagcctggtgcgccgatgaccgctgcacacaggatggcaaccaacactattattgacggcctccgtagcctgggattggtcacagaccctgactgccagtggcagcgcaaattctacactgtctaccatatatgccatttcctgggacttgatgtgcatgataccgggacccagggaataccacggtcaatgatgagcagttatctcatagctgatacagcagtgggcagaccacttgaggcgggtatggttcttacggtggagcctggtatctacctccgggcaaacgggcttgatcagcttgagctgctttacggcagcgaagccggggaaggggagattgccgatttcatctcgaaggtgaggcccgtatacgaaaaatatagcaacataggcgtcaggatagaggatgatgtgcttatcaccggtaccggcaacactgtactttcagcatccatcccgaaggaacctgatgagatagagaggcttatgaagtgagtagttactttttgctccaggatgtcaggacagacttgacattgtaatccttggcatacatgtaggcagttttatcttttgtatcccttatcatagggtcagcgcccttttcgagaagaaagcttactatctggcaatgtccgcgtgaggctgctgcgaagagggcagtggctcccgtggtggtcttcgtgtctaccggtgctccgctgtccagcagcatctgaacggtttccatgttgcccttcaatgaagccagtatcagcgcggaattgccgttcagggtctgccggttgacgtcagcgccgctttgcaacagcatccttgctatttcagtctgtccttcctgggcggccaggataagtgcagtggatccgttcaagtcctggatatccggatcaatgcccttgcctaacaggatcctgactatttcttcattgccgttctgcgatgcgagaatcagtgcagtggagccatggttatcctgcagggacgcatctgcccctttttcaaccagaagggctgcaacgtcagtgtggccatattctgatgctgctatgagtggtgttgcgccgttatcaggccgtatgtcagggtcagctcccttttcgaggagggttctgaccactccggtgtgcccgttctgggctgccaaatagagtgccgtagtgccgtttgcagtacggagactgtgatctgcccccctttccagcaataccctgcatacatcagctgctcccgtttctgcagcatacatcagcagcgtcacacctgacttgtcggaataatttggttcatcgaccttacctgccaggtcaagggcatgtttgaattcccttcccgcaagagcttcaagaactttcttgggagaaacgcctgactgtgctgagacagttattggcatagaaaagataataacagcacagattgctgcgaggacgaatgttttcatggtgtcggactaaactggaataaaattatcatggagacccagaatccggaagtcaattttgacattcagcgccagtgtattgacggacagatgcttttcgaaggttttgtttaagtgatgacagaacaaaatacgacctggtccgtataagtggataagtcaaaatatggaaaaatccttggcatgaaaaagatcatccttctgcttcttttggtgctgaccggggtcggcgccttttcgcagacctacaaaagcagggccgcaaccatcaggagagatggcttcgagattgaccggaccgagaggtctattgtcatcagtgacagggagatagttatctccaactaccttaacgggaataccgagccgcttcgtcttgaggtttatcttaccgaggacaaggaggaccgttttgacgggatttgcaggcactattactgcaaggcaaagaatgataagactctgagtccttgtaagaagattgtggtgatcaggaagccgtattcaatcacccttgagttgtacctgtctgacgacaacaagtatgtccatgacctggagataaacggttaatggtacatcctgccgcctttcggagcaagttcatttaccaggggtaaattttcctgttcgaagcgaaacattctcatcaatcggaaaatcggcacggagccatatttgttcgaggctctctccgtcaaagagatcatctacggtatactgaaatattgcccggttttctgataccgcaagtgaatcccagctttctgcggcgggaagcatgaccatgactgactccagtgcgctgagctgagcagcttcccaggtgaaatctcccttctcaatctgttcaaaagtcagggtattggctgtcggttcatcatctatgaatccggaaacatcagcaggactcaggtaccagaaggttttggcgtacagaatgaagcattttgatgtcgcgttgtagttcttctggccgatgacaaaggggaacagctgcggaggatcttctgacaggccctgataatcaatctcgtcccagtcacagtcgaaacaaccatggtactcgaattcatcccagggtacagaatacagctcaacggtgagagtgttgacccttacactggttgcacggcttaatgaatccttcagggccattccggcatccacgaagagatcgatatcggcaatgaattccagggtacaggtagtgtcaaaagctgtcgagaagcttgaatcagaggcagtgaacatgaccggaacggacaccggtctgtccatatagattgatatgttgaaaaacataccgttggttgtggtatcgcagagaatatcaacattcaaaaagccgtcttcaggtgtgaggcggctttcgatagtcctgctcatttcatacgacagtatttcgtatgtagcgtttccctctgcatcagaaaggtactgcatgatcacggaatcacagtcaaaaacttccgataggtcatcatcgaccagtttttcggggtctatttcacaggcacccaggagaaccggttgcggtgtgcgggtattcagcaggctggcaagtgttttggtcagtccggtgaacggcacccctttgtatcgggtggaatcagggagctgttcaccgccgtaagccgggctgaatgaccggaatatgaaaagcaatattagaaggcttgttctggacatccatgaatatttcattgcagggactgatcattggtacgcatatgtaaaacaactgattggtgtttctattgctccgatttgtgtttaatcaaatggctatatgttttgccaggcatcaaagtatggtccaattgagatagttttccatctccaaagaagatagaaatgcaaaggcacaatgtctttttaagcaattcaattaggatttaatccggtttagttctcttaatcttgaaggatttcaaagtttattatttttttgttatgaacaaatgatttttttttaaagtctagcccggtatgaacaggttgttagtcgcgatcggtttaatgttcactctccgggatactgtagtagcagaggagttttgaggcggagaaaaaaatgcccccgatataggacgagggcgccttaatgttctcacaacggaaaaatccttattgtgaattgctttaagaatgttgaacaaagttattggataaaacttgaaaacaaaataaactatgaaaaaaattcttggactggatctaggaacgagcagcattggatgggctttggtcaatgaagcagaagatgatatccaaaaatcatcaattattaagcttggagtaagggttaatcctctgactgttgatgagctatcaaactttgaaagaggcaaaagcattactacaactgccgatagaacattgaaacgcagtatgcgtcgcaacctccagcgttacaaacttcgccgtacaagtctaatcaaaattcttaaagacaataatttaataagtgaagaggctatattatcagaatccggcaacttctcaacattcgaaacttacagactacgtgcaaagggagtggaagaagagataacactggagcaatttgcccgtgtgttgcttatgattaataaaaagaggggttataagagcagcagaaaagccagaagtcaggaagaggggcaactgatagacgggatgagcattgcgaaacagttgtatgatgaaaacttaactccggggcagctgtgtctgcaaatattgcagtctggcaaaaaatatttgcctgatttctaccgctcggaccttcagaacgaatttaacaggatatgggattcacagaaatattactaccctgagatactgactgatgagctgagggagaaactggtcaatagaaatgacaaggctacatgggcaatttgcgaaaagcctatgaaactgattggtattaagcgagaatcaaaggggcgggacatcagactggaaaattttaaatggcgggttgaagcattatcctctaaagtagatctggaacatgtcgcaattgcacttcaaaaaataaacggtcagataagtagctccagcggttaccttggatccataagcgaccgaagcaaagaactatattttagaaatcagactgttggccagtacctgatggatcagttgaagtccaatccgaacatcagcctgaaaaaccaggttttttacggtcaggattaccttgacgagttcaatattctttgggaaaagcaagctcagtttcacaaggaacttactgaaggattaaaaagtaaaatcagagatgttgtcatcttctatcaacgtcgattaaagagtcaaaaaggattgatcagcttctgcgaatttgaaagcagtcgggtcgagatagaaactgagggtaaaaagagggtaataactattggaagcagggtcatacccaggtcttcaccattatttcaagagtttaaaatctggcagggtcttaacaatcttgaagtgttttccaaaggacaatcgagtagaaagtctgcctcatccagaactgtctctgcacatagggagggggatgtcagaagaagtctggatcaggaagaaaaactccttttgttcagagagttaagtgtgagagacaagctgaacaaggcgacaattttaaagatgctcttcgacaaccacaatgaactggatttgaattgttcggaactggatggcaacaaaacgtcagcagctttttttagggcatttaacgaaatcacagaggtgtccggacatgtgaaaattgatttcgacaagttaaacgcagacgagatagtatcctcaatagatttagtcttagatactcttggttgtaatcctggcattcttcattttgattcggatgtcgagcccgacaaacagatgttttacaggttatggcacctcctttactcctatgagggtgatgattccaacaccgggattgatggtttgattgacaaaatttcaacattaagtggtttgaagagagaatatgccagaatactgacaggaattacgtttactgatgattacggaaatttgagcgctaaggcaatcagaaaaattctgccataccttaaaacgggaaacagatatgatctggcctgtgagtatgccggatatcgtcattctaagagctcattgacatcggaagagattgccagtaaagttttgaaggacaaactgatgattctgcccaagaacagcctccgcaatccggttgttgaaaaaatactgaatcaaatgattaatgtgataaacgcaatcattgaggagtatggtaagccggatgaaatcaggattgaattggctcgggaacttaaaaagaatgcaagtgagcgggaaaaaatgacaaaaatgatcaacgaaacaaccttagctcatgaaaagataaagaaaatcattcaggatgagttcaaactgtcacatgttagccgtaatgacatcataaggtataagttataccaggaattggaaaccaacggttttaaaaccctgtattcagatacttatattccaagagagaagatattcagcaaagagtttgatattgagcatattatcccgcaggcacgattatttgacgattcattttcaaataaaacactggaacgcagggatatcaaccttgagaaaggtgacaagactgcatcggatttcattcgtgacaaatggggagaatctggtcttcaggcatttcaggacaaaatagagagaatacagaatcaaaatggccagggcatctcaaaagcgaaatactccaagctaaaaatgtcagaaggggatattcctgatggctttatcgaaagggatttgaggaatacacaatacatttccagaaaagcgctaggcttgttgggagagattgtcaggactgtagtccccacaactggttctattactgatcagttacgtgaagactggcagttggttgatgtgatgaaggagcttaactgggagaagtataaagcccttggcctggctgaatatctggtggataaggatggacgtcaaatcagaagaattaaagactggacaaagcggaatgatcacaggcaccatgcgatggatgcactgacgattgcattcacgaagccagtttatattcagtattttaataatgtaaatgcccgctatgataaaggttcagaggcatatagaattgaacagaaatatttttctgaaagaaaagtaatacctccgattccggttgatgaattcagggctgaagcaaaaaaacacctagatgaagttctggtatctatcaaagctaagaataaggtggtaacgaagaatacaaatgttattaagatcaaaaagagagagtgccctcaaagtcagcttacaccacgggggcaattgcatctggagactgtttttggtagtaacagggtgccggttgttagagaaatcagggttggtggcactcttaatgaagaaataatcagactggttaccaaaccaaagtttcgggatgcattgttacggagactcgctgaatacaatcatgatcccaaaaaagcatttacaggacgaaacagccttgagaaacaacctttgtacattgatgaacttcatactaagagagttcctgaaaaagtaaagataatcacctttgagccggtctatactatcaggaaacagattgctcctgacctgaatattgataaggttattgattctaagatacgtagtctattacaggagagggtttctgtatatggagatgcaaaaaaggccttttccaatcttgatgaagacccaatctggctcaataagcaaaagggaatctcaatcaagagagtgtcgattaccggaatcaataatgcgcaggctctacatgaaaagaaagacaaggagggtcgacttatcactgattctgaaggccgaaccatgcctgttgattttgtcaataccgggaacaaccatcatgttgcgatatacagagatgcaaatggtgatctgcaggaaaatgtagtgtccttcttcgaagcggtgaccagagcaaatcttggccagcctgttattgatagggaatacagaagctctgaggggtggaagttcctgttcacgatgaagcaaaacgaatactttgtttttccgaattttaaaaccggatttaatcctaatgacatagaccttctggatacaagaaattacagtagggtaagtcctaatctattcagggtccagaagctttctacaaagaactatgttttcaatcaccatttagaaacaactgcggttacaggggatacgctgaaatttaataagcaaatgtctggtattacatacagattcatacaaagcctgccacctctggagggtgttgttaaagttcgcattaaccatattggtcaaatagttacagtaggcgaatattgatatgataaaacgtactttatattttggaaatccatgttctctccagaagagggatttacaactggttattacctatccagaagaagggaaggatgttgtaaatgtacctattgaagatattggcctgatggttctggataatcctcagataaatatcacaaatgccctgataatgtcattgaacgagcacaatacagcagtaatcaattgtgacacatcacatctgccattcgggcttctattgcccatgtattcgcaccatgcttttaccgaaaagcttaaagaccagatagaagcatcactgcccttgaagaaaaatttgtggcaacagaccgtcatagctaaaatctcaaaccaggcagccttattaaaatcaaagggagtgagtacagaaaaaatggagtattatattcgtcaggttaaaagtgatgacagcactaatgtggaaggacgggccgcggcacactattgggattgtgtttttggcaatctcagcttcattcggcaccgtttcggggagcctcctaataacatgttgaactatggttacgcgatactaagggcaatagtggcgagatcgttgatcggatcagggcttttccctacaattggaattcatcatcgcaataagtataatccgtactgcctggctgatgatataatggagccatataggccttatgtggattctttgattgtcgacctgcttgaaaagatggaacctccggaggaactctcacccgggataaaaaaagaattactgaaaatcccggttctggacgtaataattgagggatccagaagccctttaatgattgcaatgcaacgaaccaccgcctcgctagcaggatgtttcagcggcactctgaggaaaattgtatatccggtcctgcagtgaggtacaaccaatacagagtaatgtgggtttttgtcttttttgaccttccgactgacacaaaaaaggaccggaaaaactacgcatttttccggaaacagcttcaaaaggatggttttagcatgttgcagttttcaatttatgtcagacattgtaacagcagggagaatgcggatgtacatatcaaaagggtaaggtcattcctggcgccgaagggtgagattataatattttccctgacagataaacaatttgggatgatggaattcttcagaggcagatacc

SEQ ID NO: 2437 - DNA, 10526 bp, synthetic construct
  source 1..10526: mol_type = other DNA
  misc_feature 1..10526: note = Synthetic
ggtggaggttctgaccatgcctcatttgtagcggctggagtaccgggaatttctttaggttctttgaactggggatatttcggctatacatggcatactacaaaagatacctatgataaaattgttttcgacgaggtaaaaaacaatgtggttttgactgcagcattggcttatatggcttctgaagatccggaatttgccaatagagagaaaagagtaatgcctcaggatgataaaggggaaacaataaaatggccggaagctaaagagccgagaagaagctacaaaagattataaataacaattaaatagtaatgattcatgtccgcggctgcttcatgaacagaagcagcgcggtcactttaagtatattttacagtaaaaatccgtgttacaattaaacgtgaagcttaatttctgaaaactgtgagataaaaggctggtaatctgcagtatttaattgtccgaaaccatagctgcagaatataaacggcagattattatagagagcggaagtataatccgtttgagtatcacctatatataccgagttttcagggttcatatcattcctttccatgatcagcctgatattttccgatttcggttttccggtccggccatgagactcaaagtctttgaataaagggttaaacttataatagtctaaaaaggcttcaatatatccatcctggcaattgctgacaataaaaagatcatgggtaccggcaagaagctgaagcgtttctccgactccggggtagagaacaccaccgtgttgacgcaatgcgatattttcatatcccgaaacttcagtaagaatacgctctgtctgctgatcggaaataccgggaacaatatccctgataatatcttctgtaagaagtcccatatactgatccagatcttcgggtctcatctcttcccgtagcaggttatgtttagctaaaacatcattccatattttgatgatggtcgctcttgaatcccataaggttccgtccagatcgaaaattaaattcttgtaattcaatatattttttgtttaggtgttatgttcttgtttgtaatatttaataataggctcactttttttaaggaagctagaattgagtttcttttatttttcttgataatgaaagaatagtgattagtgttttctcatgacggttgatgtactccattgttttatctgtaataacccggataagctctggtaatttaaatgggttatcatgcaaaaactgaagaaaatcaatatcagaaaaatcaatattataagattcaaaatttccgatgctctctatacctctccaccatccactgattttcatatcgggaaaatattctttaaagagtatctgataactattgtaaaaatccagtattccaatgaacaggtcattttgattattgctatagccactgaaagattccagtccgaagcagataatttgtttatcatcttccttgtaatcttttaaactaaaccaaatgtgtgagttcttttcttctgctctgttatggttttcaaagaaatagtatctgtcttcatatattttttccagctcttttttttagcccgtctctgattttattaagaatgacagcttttgcagaatgaaaattatctgagatttccttggcgcttttttaaatcgcttaataataaacttttttatttcatcactcatatcattattgatggtctggttggttaacttttttaccaaatgtaaatattgcttaatggtttctctcaagacaggttgattaacaacctgctggtggctttcttcaagccagtttttaatatgacttttataagttatcaaataaaaatctttattgacttctaattgtcccttacttttaccggagggttcattcccataaaggttcaaatacagcagtactgcctgtttgtaatgatttttatatctttcaagttgagatacctgatcaacggcataaattttattttcaatgatgatcgtattgttaccatcttcaataataatatctatatatccgcctgtttttctttcaaggtctatacttccaaggtatttttcaaccgttactttagcattttcaaaattaaattgatggatgggctttaagcattctatctccttaaaaaacaattttagaaagacagaaccctgtccatgagagcctctaggatttaataattcaccaatcattgcagaatgggtatatctttcatttgtttccatactcatgattgaaaaaatgttgaaattttctccacggatttgagctatatcatggtatttttttgaaattacagatacattttccaataaaccttttatttgtgataactgcgtattactcatatttataaaatcatgctcaactgtactctttttcttgcctcatccacttctgttacctttaccttaacgtgctgatggagcttcactacttcattcacatcagatacatatccgtctttcagctgggaaatatgaaccaatccgctttctttgattcccaggtccacaaaacatccgaaagctgtaatattgttaacgattcccggtaagatcatgcctgctttcagatctttaatactttttacattgggatcgaattcgaatattctggcagcttttctcgggtctaatccaggtttttcaagttcctttaaaatatctttaatgcccaggattccaatgtctccggtaatatagttttccggttttatcagggcgattttttctttattggctatcagttcattggttgtaatgcccaggtctttagccattttttctacaataccatacgcttcaggatgcaccgcagaattatccagcggattttttgcattggcaattcttacaaacgctgctgcctgctggaaggccttttctccaagtctaggaacctttttcagttgttttctgtcttcaaaagcaccgttttcagccctgtaattcacgatgttttcagccattttttctccaattccggacacatagcttaataatgatttgctggctgtatttaaattgatgcctacagagtttacacatttcatcacggtagaatccagttcgttttttaattgagtctggtctacatcatgctgatattgtccgacaccaatagatttaggatctatttttaccagttctgccagcggatcagatagtcttcttccaatggaaaccgctccgcgaactgttacatcataggtgggaaattcttctctcgcaattttacttgcagaatataccgatgctccggcttcagaaaccacaaaaacctgaatgggcctgtcaaaagcgatctttttaataaagaattcagtttcacggcttgctgttccgtttccgatagagatggcttcaatattataggcgttgaccatggaacggatttttttcatcgccattccgctttcgttctgaggagcgtgagggtagagggtttcattatgaagcaggtctcccttttcatccaggcaaactactttacagccacttctgtaaccaggatcaatagccaggattcttttctctcccaacggcggagccaaaagcagctggctcaggttttcagaaaaaatttcaatcgcttttttatccgctttttctttcgcttcctgtaaagcttcattggaaatagccggctccagaagtcttttatagctgtcttttatggccagggcaatctgtgcagaactttcgttatcagatttgatgatagctttttcaataaaatcaatagcttcttccttgtcaattgccacattggtttttacaaagccttccgcttccgctctcaacattgctaaaagcctgtgagaaggagttctgttgaggttttcttcccattcaaaatattgggagaatttctgagcgtcttcttcatcttttttcgcctttaccactttagagctaataaccgccttacgttggaataaacgacgcaggttcttacggacatacatattttcattgatccattcggccataatatccctggctccctgaagggcatcttcctcagaagggacattattattcagatattttgaagccagaaactgcagatcattgtttttttgactcataatgatctttgccagaggctcaagacctttttccttggcagcgtctgctttggtctttttacgctttttaaaaggcagatatagatcttccagttcctgaatatcaaaactgtcctctattctttgttgaagctcaggcgttaagcctccttgttcttctatagattttaaaatagattcttttctttttacaatctcttcaaactgtttgctgatctttgaaatctgttcaatctgggtttcatccaggtttccggttttatctttcctgtaacgcgaaataaaaggaatggtgcagtcttctgctaatagttgtaaagtattgctgatgctcttctcagaaatatcgagctgcttctgtataaatgctacggttgtcattgtttggttttcggatagctaaaataggggtttaaaaagaaaaaggcgagttgccccgccttgaatgttttcacaacggaataatccttattgtgaagtgctttcaaaatttatcaatcaaagatataaaatcaaaatcaaaatacaatacgggaaaccgtaaatggttttctttttttcttcttacatttatgaaatactaataacaaactgctatggtggaaagaattttaggactcgacttaggagtttcttctataggctgggctcttgtagaggaagatgtgaaaaatccggaaaataacaagattataaaattaggagtaagagttaatcctttaacaatagatgagaaaaccaattttgaaaaaggtaaatctattacaactaatgccggacgtacttcagcgagaagcgcccgtaggaaccttcagcgttttaaactgagaagaaaaaaattattagagattttaattcattataaaatcataaaaaacgatgctgttctggctgaaacaggtaaaaacactactttccagacgcaatatctaagagcaaaagcggccagagaaagaatagaactggatgaactggcaagggttcttcttctgatcaataaaaaaagaggatacaaaagcaacagaaaagtccaaaatgatgatgagggaaaagctattgacggattatcagtagcgaaggagttatatgagaaaaattataccccgggtcaatatgcctatgatcttttaaaaagagggaaaaaacagattccggatttttacagatcagatcttcaaaatgaattggatcgtatttgggaatttcaaaaacaatatcatcctgatattttaaccgatgaatttaaaaaagaacttgaaggaaagggacagagagcaactgccgctatttttctgaatcgttataaaatttacactgccgataataaaggaacacgggaagagaaaaagattcaggcttatcagtggcgagtagagactctttctcagccattggatgttaaagaagtggcatatgtaattgcggaaattaataataatcttaataattccagtggatatcttggtgcgatcagtgatagaagtaaaaaactatattttaacggacaaacaataggagaatatctttttgaagagctttcagcgaatcctcatacccgtttgaaaaatcaggtgttttaccggcaagactatcaggatgagtttgaaaagatctggaaaatacagacaaaattccatcctgaattgactaaggaattgaaagaacaagttcgtgatattgttattttctaccaaagaaagctaaagtcacagaaagggctgataagtttttgtgaatttgaaagtagagaaattgaaattgaagaaaatggcaaaagaaaaaggaagaaggtcggattgaaagtagctcctaaatcttcacctttatttcaggaatttaaaatctggcaggttctcaataatatagaaataaagaatgaagatgaacgaaggtatttggagccggaagaaaaagaactgcttttcaatgagctgaattgtaaaggaaatcttacttcacaaaaatgcctggaacttttgggttttaaatcgaaagatgcaaaacttaattttaaagttgtggaaggaaacagaaccaatgaaaagttatatgatgcttttctgaaaattctggaactgcaaggctataatgtttttgagcttttaaaaataaaagaggataaggatgaggctaaattatctgaactgaaagcttctgctgacgagattaaagggatgataaaagagatttttaatgcaaatcttattaatacatccattcttgattttaatgcagaattggagggaaaggattttgaaaatcaggcttcttatcagttttggcatttgatgtattcttacgaaggggataattcgccatcagggaatgaaaaattatatgaattgctggagaagaaatttggctttaaaaaagaacactccaagattttatcaacgattgttttttcacaggagtatgggagcctgagtacaaaggctatgagaagaatttacccttatattaaagataataagtatagtgaagcatgtcttcttgctgggtataatcattctaagcactctttgactaaagaagaattggaaaacaggaaattaaaagagcaattggaggttttacctaaaaattctttacgaaatcctgttgttgaaaagattttaaatcagatgattaatcttgtgaatgctacaatttctgaatatggaaagttggatggagttagaatagagctagccagggagctgaagaaaagtgcacaggagcgtgaagatatggcgaagagtattaatgaagccacactccttcatcaaaaatatgcaactattttaaagcaagaatttggtgttgttaatccatccagaaatgatattatccgatacaaactatatatggaacttaccgttaacgggtataaagatctgtatactaatactaaaatagaaaaagaaaatctttttacagataagtatgatatagaccatattattccacagtcaaggttttttgatgatagtttttctaacaaggttttagttccacgacagtcaaacttagataaaggaaatctgactgcgtatgattttatgtctaataaagggagtgaaagagaagaacatttcctgaatgtaattaaagaattattggataaaggcagtatttcaaaagcaaaatatgaaaagctaaagaaaaaaggattagaaataggagatggatttatagaaagagatttgagagatactcaatatattgcaaaaaaagcaaaagaaattctttttgagattactaattctgtggtaaccacttcaggaagaatcacagacaaattaagaaaagattgggatcttgtcaatatcatgaaagaacttaatcttgataactacagaaggttaggtttaacagaaattgtcagaaattcaaaaggagaagagaaagaactcattccggattggacaaaacgtaatgatcaccgtcatcatgcaatggatgctcttaccgttgcattcactaccagaaatcatattcagtatctgaattatcttaatgcaagaaaagatgaaaagcataaagaacaccagaatatttatgctattgaaaatattattacagaagtcattgagaaaaaaaaatggttcaaagaccaggagatttaaggctccaatgaatagtttcagacatgaagctaagcagcatctgaaggaaatattggtttcacataaaactaaaaataaagtagtaacctcaaatatcaataagactaagaaaaaaggagggattcataaaaaaacagaacttaccccacgaggacagcttcataaagaaacggtgtatggcagcaagaaatttctacaatcgagagaagaaaaagtatctgcaaagtttgactatgaaactatattaatggttgttaatccaatacatagaaatgcattactgaatagattgaaggaatatggaaacgatcctaaaaaggcattctcaggtaaaaatgcaataaataaaaaccctgtttacttggatgattctaagactgatattcttcccgaaaaagttactctttcctggtacgagaccgggtatactattaggaaatctgttacgcctgataattttaaagactataagaatctggaaaaaataacagatcttggtataaagaaaattttaaaggaacgtcttgatcaatttaaaggaaatgcaaaagaagcattttctaatctggataaagatcctatctggctgaatgaagaaaaaggaattgcaataaaaaccgtaacgattactggtgtgagtaatgctgaatccttacactttaaaaaagatcatttgggtaaagaaattctggatgaaaatggaaataagatccccggagattttgtaagtactgggaataatcatcatttagctatttacttagatgaagaggaaaaacttgatgataaaatggttacattttatgaggcagttttaagagtaaatcaaggtttgcctgtaattgataaagactataatagagagaaagggtataagtttttaatgactttgaaacagaatgaaatgtttgtatttcctaatgaagattttgatcccaacgaaattgatctacttgatgagaggaacttagagcggatatccaagcatttatttagagttcagaaaatttcaaaggttgggtatggaaattcttttgtcagagattttgtattcaggcatcacttagaaacaaccgttgaagagagaaaagaactgcggaatataacctatatacagcttaaaagccttgaaggactaagaaatattataaaagtaagattgaatcacttgggaaaaatagtacaaataggtgaatattaaataattactatgataactcgatctatatacattggtaaccctgcctatctaaaacttaaggatgaacagatgtatattctggatccctctaccaaagatttgaagggtaaaatccctgtagaggatcttgggttgctgatgctggatcattttcagatcacaatctcccatcagctgattcaaaaaatgatgggaaataatgtagttgttataagttgtgatgctcatcatcttccccacggaattatgcttcccatatatgggcatactgaacattcggatcgtgtaaaagatcagctggaagccagtgaaccattgaaaaaacaactctggaaacaaactgttgaatgtaaaattgaaaatcaaaaagaagtactgagacggttgggaaactattatgaacccatgacagaatatcatagaaatgtaaaaagcggtgatagtacaaatatggaaggaattgctgcacagcattactggaaatatctgatcagtcttgattttttaagggcccgttttggtgattctcccaatcagtttttcaactttggatattctgtcctcagaagtatagtggccagggcaattgtagaaacaggattattaccggttctcgggattttccataaaaataaatataatgcttattgcctggcagatgatcttatggaaccatttcgcccatttgtagatcttttagtgatgcaatggcttgaaaggaaaccggaaacagaggagttggataaagagtttaaagcgcatatccttaaaatagcaacggtagatgttggaattgatggaaaaacaaggccgcttcttattgccgtaaaaatgaccgcttcttccctttataaatgttatacaggagaaaaacgtttgatctcttatcctgaattactatgaacgccgaaaggtttaatgcataccgtattatgtgggtattggttttatatgatttgccgactgagaccaaagcaaatatgcgggatgccaatttgttcagaaaacgcttgctggatgatgggtttacactttttcagttttcaatgtatgtaagacattgcccaagccgtgaaaatgctgaggttcatattaaaagagtaaaaaatatgcttcctaaagctggaaaagtcgctattatgtgtattacagataagcagtttgcagatattgaaatcttttttgccagaaataaagaagagccacctccaacgtttcaacagcttgaattattctaatttttaaatcctaaataaataataaatccgttgaaattcaacggattagattttgaggctgtgactaatcacgaagataataaattttgaaagcacttcacaactttgtgaatatcagccagatgagtttcaacgctgtgactaatcacgaagataataaattttgaaagcacttcacaactcgtgagaaatcgaacataataacctcgaagctgtgactaatcacgaagataataaattttgaaagcacttcacaacacctccacatactgcgcatttcttcggcttgctgtgactaatcacgaagataataaattttgaaagcacttcacaactagtactatcgatgtgttagaaacgatttgctgtga

SEQ ID NO: 2438 - DNA, 10385 bp, synthetic construct
  source 1..10385: mol_type = other DNA
  variation 10226..10239: note = n is a, c, g, or t
  misc_feature 1..10385: note = Synthetic
tgtgggagagacattttggaatgagacttttcaatccaaaaattttataataactgaacctggaatctatacatatgaagtcaacaataattgtggagaatttaaaggaacggttagtgttgctttagatgaagtcacaacattaccaaatatattttctccaaacggagatagtataaatgacgaattccccggaatcaacttaaaatctttttttaatgttattatttttgatagatggggaaatttggtttgggaaggctcaaaagactgggacggatcacacaagagtggaagcgtagcaaatggggtgtatacctacatccttaagtcattaggttgtgagagacaacttgtaggtactatcacggtcattaggtaaggtagtatttgaataatttattttctcaaataatactttcgtcacagcttgactccctgggaattaaaccttaaacaactaaaacttaaacatcaaaaaggggcgtagccctgacatctttgtagcaaaatattaaaaaccaccaccgaaggggcgtagccctgacatcttaaatagtcggcattaaaactttgagacttcgcgtcttagttgcaattagaagtcatcaatcttaatttcccttaactccttaatggttagcaaaaataactatgaatgtaatgaaaatcaaataataattacttcacagcttgaatccttgggaataaaacattaaacccctaacccttaaacgtcaaaaaggagcgtagctctgacttctttgtagcacaatattgaaaacctccacccaaggggcgtagccctgacatctttattagccttaattaaactttgagacttcgcgccttagtggcaattaaaagctctgaactcttaattccacttaactccttaatggttaaccaaaaagagtttgagtgtaatgaaaatcaaattatgcgatctccgtttgtctaagagtgaaaagacaattccccaatcgagtgcagcttcaacagcatcagcaatcgtgtgcagcttcagcagcatcagcaaaaccaacaaatcaccgattccgcaatttcagcaattctgcaattctgcaaatccaccaaattagcaattccaccatttcctaaaacggatcactcaattcacttaccctgatcaattttttattgacaaattcataaatgcctaattcagaaagttccctcccatatcctgaacccttagttccaccaaacggcaaatccgcttgcgtccacgtaggatgattgataaaaaccatacctgtatctatttggtctgctacccttttgcccctttcaatgtcttgtgtaaataccgaaccacccaacccaaatggagaatcattggctaaatcaatggctgcttgttcatttttaaccttaaaaaagacggccacaggaccaaaaaactcttcgtaatacacaggattatcgggcaacatattggtcaacactgtggcttccatataggcgcctccttgatccattcttttgccaccaagggatattttagcgccacctgccacggctcttttcacttgatcggcaatgtgatctgcagctgcaacattacacaaaggacccaattccgtttttgcatccatcggatcacccactactagattggcaaacttatgttgcaatttttcaaaaaacgtatctgcgatttcttctacggcgataaatctttttgatgcgatacaacactctccattattattgattctacctactacagcccatcccacagccttgtcgatatcagcatcttccaatacgataaacgcatcactaccacccaactccaacactgactttttcaaatgtttaccagcttctgtggcaatgctagcgccagcagcctcacttcctgtaagcgacacacctttgattctgtgatctgataccaacgccgatgccctttcgccagagataagtagattggtgtatagtccaatcggcgcaccagcttccaaaaataaatgctcaatagcgatagcacactgtggcacaatcgaagcatgtttgatgagcatcgtattgcccaccatgatattgggtgcggcaaatcgtgctacctgataaaatggaaaattccatggctgtacaccgagtaacacacctatcggactatgtctgaccaaggcttgcccatgcacaggatgaaggatcgtatcggataaaaaagcttctccatgattgccataataatcaaaaatctcagcgctgagtttgatctcaccctctgcttgtgagaccaacttacccatttctagggtgatcagtcgggcaaaatcttttttattttcacgcaacaaaccagctactttgtgcaataagctcgcccgctcttcataagatgtatttttccagtcagcaaatgtttccaccgattttgcgatggcttcatcaacttcagtgtcaggcatttcttcgtatattttcaccactttattggttgccggattggtgctatatattggcatgttatttaattttaaaatttaatttaggaatctacccagcttgatctatggtaaaatatttatttctaataaactgataatcaaagtcatacccctttggggtcgggggcgttcccctttacgggaaggagtgttttacttaagagccaagggtaaaaaacgattgctaatcattctatttatgttttcgaagtgggcccaaaaatacacaaccaaaggagcgtagctatgacatctttgataaaacggagacttcatatcttactaaataaagtccataaacattaaacaattaaaccttaaacatccaaagattcgcagccctaacttcttaaataaacagaataaaaacttggggacttcgcgccttagtgccaagtaaaagccatcaattttaattcctcttaactccttaatggtttgcaaaatcaggaaggaaatcacgaatgttttggtgccaaatctgcttcgatacaccacagcaactcttttataaaaactgcggcaaatttgtcagaattggctttatctagcgcttttccgttttcatcatacgctttatctacagtaggcacagaaaacatcgcaggaattgtccatgccatcattttccataatgtaaattgcagtgacatgaccgcctgactaccaccgaaaggacctgatgaaacagtggcaatcccaatcggcttgtgtctccactcatcatacaataagtcgatcgcatttttcaaactagcaggatacccaccattatattcaggcgtaacaatgataatgccatcagaagatttgatcttatcagcatattccaagacttttttagaaggactatccatgttttttaacgtggcatcaaagaagggaaaactataggccttcaaatcaatgatctccgtcgatgccaacttatgttccgtaagataatttttaaaatacagcgccacattgtgactttttcgcccctccctaacgcttgatgatataattgaaatgtgtctcatttttatccttttttgtaaatactgtctatttccttagaaagttttacttccttgtccgtcacactatctttggcctcatgtgtaaataactgtatatccactttgttgtacacattggtccaagatggatgatgtcccattttttcagccgcaaaagcaacaccagtcataaaagtaaaagcttctacaaagttcttaaactcaaagctacgtctcaattgattattttcttctttccacataatgatttattttttagattttggaagtttttcagcctcactaagtgcaatggcaatcgcttgttttggatcggtgacgatcttatctgatttgccaatatgtagctcgccttctttaaattcgtgcatgacctctgcaacctttttttgggtcttactttcttttttcttctccatatgaacttgtgtaggaatcttaatgccctactagacaaaggtaggtagctttgattgggaaagcattacagaattttttgaaagtgttgtatgatttgggatagattataggcaggttgtttaaaataatgcttagaaaccaataaaaaataaagccttttttaaaattaataactgagtcttattatctttgggactaaagttataaaagactaattaaagttcaattagcagaaaaatttaaagtccaaaaaatgaaaataaataagtttaaatctgatataaaagttggaaatttagattcaaaccaagataatcaaaataattccaaaacggcagtattggaaataattaggagcaaggtataaaaaaatataaaaatatggaaagcctgactcaagcaaaatggagaagaaaatgtatttcattgatccaaagctttattttgagaaatggtactagtttaaataaaaaaagcgagttgccccgctttaaatgttttcacaacggaataatccttattgtgaattgcttttgttgacacaaagatattataaaactttaaataaaaaaacaatgagtaaaaaaattttaggtttggatttggggactacatctattgggtgggcttatgttgtagaaagtcaaaatccagagcattcagaaatcatccaaattggtgcaagggtaaatccattaaccactgatgaacaaactaactttgaaaaaggtaagccaattactatcaatgccgatagaactttaaaacgtggtgcaagaagaaatttagatcgatttcaattacgaagaaaacatcttattgaagtacttacaaaggctaaaataatatcaaaagaaacagttctagccgaagatggcaaaaatacaactttcgaaacctggcaattgaggtcaatagctgcaaaggagaaaatagagaaaatagaactagccagagttttactagctattaataagaagagaggatataaaagtagtcgtaaagcaaaaaacgaagatgaaggtcaagccattgatggtatggcaattgctataagattgtatgaagacaacctaacaccaggtcagctagtattgcaacttcttatgggtggcaaaaaacatattcctgatttttatcggtcagatttgcaaatggagtttgataagatttggcattttcaaaaacaattttatccagatatttttactgacgagttttacaaagaacttcaaggaaaaggccagcgagcaacagcaacagcattctgggcaaaatataaattcaatacagcagaaaacaagtcaaaatcacgagatggtaaaaagttccaagcatataaatggcgaaatgatgcactatccattaaacttgaagtggaagaagttgcgtatgtgataactgaaataaacaataacttaaataattctagtggatatttgggcgcgatctcggatcgaagcaaggcattattcttcaagaaagaaactgtaggccaaaatttgtataatcagttattagagaatccacatactcggcttaaaagtcaagttttttatcggcaagattatttagatgaatttgaatctatttgggcagaacaatcaaagcatcatgcagaactcactccacaacttaaaactgagattagagatattgtcattttttatcagagaaaactaaagtctcaaaaaggattaataagtttatgtgagtttgaaagttataataaaatcattaatggcaaaactcaaacaataggacaaagagttattccaaaatcatcaccattgtttcaagagttcaaaatttggcaaatattaaataatgttgaagtaaagaaaaaaggaaataaaataattaccaaaaaaaatcaaacatctctttttgacgataataatgaaacttttatctttgatttagaaacaaaacaaagattatttgaagaactcaatcttaaaggaaatctttcggcaaataaaataatagaaatattagagcataagcctgcggaatgggaactaaactatactcaaatagaaggtaataatacaaataaaatcctttataatgctttcttggatattcttgaatatgaaggatatgacgtaaaagatttacttggggtaaaattaaacaaagatgaagtagatttggatgacttggatcttccagcttctataattaaaaaccaagtcaaactaatatttgaaacactaaaaatcaatactgaaatcttggagtttgatgctgggcttaatggatcgcattttgaacaacaagctgcctatcaattgtggcacttactttattcatacgaaggagacgactccccaagtggaaatgaaaaactatatgagttacttgcaaaaaaatttggttttaaaagagaacatgcaaggattttagcaaatatatcatttagtaatgattatggaaatctaagtgctaaagcaatcaaaaaaatatttacgtatatcaaagataacaattatagcactgcctgtgaattagcaggatatcgtcattctgcttcatctttaacaaaagaagaaattgataatagacctcttaagaatacacttgagatattgaaaaaaaatagtctgcgtaatcctgtagtagaaaaaatacttaaccaaatggtaaatcttgtgaattgtctaatagaaaaatatagttctaaagatgaatttggaaacatcatcgaatatttcaaattcgatgaaatacgtatagagttggcaagagagttaaagaagaatgcaaaagaaagagccgaaatgacaacaaacataaatgcatcaaaaatagtgcatgagaatatatttaagattttacaatcagagttcggtataaaaaatccatcacgaaatgacattattagatacaagctttacgaagaactaaagaataatggttacaaagatttatacacaaatacatatatacccaaggaaattcttttcagtaaacaaatagatattgatcatatcatacctcagtcaaaaatgtttgatgatagtttttctaataaaacggttgtttatagacaagtaaatctggataaaggtaaccaaactgcttacgaatatatagaaagcaaattcggaaatcatcagctagaagagtacacagacagaattgaaaaaatgtttaaacttggtaaagatgaaggcattaccaaagcaaaatatcaaaaactcttaaaacaagaaaaagacataggcgaagggtttatagagcgtgatcttagagatagtcaatacatagctaaaaaggcaaaaaacatgttattggaaatatctcgtgctgtagtttcaacatcaggaaatataacagataggctgagagaagactggggattgataaacatcatgcaagaattgaatttcgataaattcaaaaccctaggacttacagaaaaaatagaaaagaaggatggtagttttaaagaaagaattattgattggactaaaagaaatgaccatagacaccatgcgatggatgcacttacagtagcatttacgaagcataactatattcaatatttaaattatctcaatgctagaaaagatgtgagacacaagttgcacaacaatatcattggcatagaaaatttagagaccgaacttaaaattaatgatcaaggccaaaaaattagggtctttaaaactcctataccacattttagacaagtagctaaggagcatttagaaaatgtattagtatcacacaaggcaaaaaataaagtcgttaccaaaaataaaaatatcataaaatctaaaaacggagttaataccagaattgaactgacgccaaggggacatttacacaaagaaaccgtgtacggaaaatatcagtattacgtaaataaagaagaaaagattgggacaaagtttgactttgataccatccaaaaaataaccaatcccttgtacaaatctttgttactaaaaaggttagtagatcatgacaacgatccaaaaaaagcattcggtgggaaaaatagttttactaaaaatccgatttatttaaatgataataagtctaccataatgcctgaagtagtaaaattaagatggctagaagaagattattctattcgtaaagatgtgactcctgataactttaaagatgctaagtctatcgaaaaagttctggatcaaagcataaaaaagatattattagcgcgttttgcagcttatggcaatgatgcaaaaaaagcattttcagatttagaaaaaaatcccatttggctcaatgaaagtaaaggaatagcaataaaaagagtaaccatatcaggtgttaaaaatgctgagttcctccattacaaaaaagaccattttggaaatgaaattctggatgagaatggcaaacccatccctgttgacttcgtaagcactggcaataaccaccatgtggctatatatagagatgaaagtggaaaactgcaagaaagagtcgtatcactttttgattcggtacaattagtcaatgctggcgaacccgtaattgataaaaccttcaaccaaggtcttggttggcaatttcttttttctattaaacaaaatgaatactttgtttttccaaatgaaaaatcgggatttgatccaaatcaattagatttactagaccctcagaataaaaaactgataagtccgaatttatttagagttcaaaagtttggctccctactatcgggattttggtttaggcaccatttagaaacaagcgtggaagtaaataatgccactaaaggaataacttacaaggtcatacaaagtgtttcaaacttggagcatgtttataaagttagactcaaccatttaggtgacattattcatattggagaacagtagtctttattaataattatttggcaaagtatttgatatacccatatcaaatactttgcctatgataaagcgcacattatattttggaaaccctgcatacttatctgtaaaaaatagtcaactttgtatacgtaaacctagtaccaaagcaggtattgaggatgagcatgccataccaatagaagacataggtattgtggttgctgatcatcagcaagtgaccttcacccacacagtgatcacatcacttcaagaaaataatgcggtgatcatttggtgtggtcttaatcatttaccacttgccatgaccttaccacttatggccaatgatacctacagccaaaaacttaaatatcaaatagaagcaagcgaaccactcaaaaaacaactttggaaacaaaccatcaccgctaaaatccagaaccaagccaatcttttgagaattttgggatataaaaccttgcatctggacaaaatgatacctcgtatcagtagtggagatactgaaaactatgagggacaagcagcagccatttattggaatcaaatattagataaatataatgtgaccagaggaaggcatgaaggcggacctaatgccttattcaattatggatatgctatcctgagagcagtcattgcaagaaaccttgtaggaagtggctgcctgcccgtacttggcatccatcataccaataaatataattcctactgtctggcagacgacatcatggaaccatacagacctattgtagataaatatatactagactatctgaaagataaatcagaaatcaacgatgaactgacaatagtagacaaagcacatttactcaaaatacctgtaatagatatttgcatacaaggcaaagacagcccacttatggttggtgcacaacgcactacagcaagcctggtcaaatgttatcagggcacagctcgtaaaatcttataccccgatcttttatgctaaaccgactcaacaaatatcaaattatgtggctctttgtacactttgacctacctaccgaaaccaaaaaagatcgtaaggaatacagtaagttcagaaaatttttattggacgatggatttaaaatgatccagtacagtatgtacgcaagacactgcagcagtagagaaaatgcagatgtacacaaaaaaagggtaaagaccaagctaccacctttgggtcaagtaattgtatttgaaatcacggatgtacaatttggtcgattagagtttttttatggacaaaaaccaaaaccacctagcaatctgcctaaacagttagaactattttgaagagcatagaaataaaaaaagccagagttctggctttttttatttctgatacttactttttaacaattctaaataaagtcgtaaaaaattgaattacagatatttacactatggtacgttgtggcaaatatcgaaaattnnnnnnnnnnnnnnaacaaaagcaattcacaactaatgactaaaaactatcaaatcaaaatgagttgtggcaaatatcgaaaattcaaagaacaaaagcaattcacaacaaattggctaaaggttcagcaaatcctattgttgtggcaaatatcgaaaat

SEQ ID NO: 2439 - DNA, 10213 bp, synthetic construct
  source 1..10213: mol_type = other DNA
  misc_feature 1..10213: note = Synthetic
cttttcatcacggaaaaccttgatttttaggaagctttcaacgaaaaaaatccgtttttttttacttttatagtgtgtgaatgaaatgtcagtgtctggagaacacaaaaaaagacgaacatttaaatgtccgtctttatatgaaagcattcggcaaggatgaatgtagccttctggaatgtagtgaagaaaacttaggtcacagttgtatactgtcagtttttagtcacttgataacccctttcgcatccgcaatcacttgcaattttccatcgtcaaatccgatggttacaaccttttggtaaaacattgatttctccttatcttgattattctctaagtactttcttacggtatttcctaccaatagctgaaaatcttcgtagtcgaaatgtttgcccgtatctgaaaataattcaaatttatcgaaggcaagatacttctcttctggttggaaatctgaattgcaggcccaatcatcatcttgaggatcgtacgttttaccgccgcataagtacaatgaatatcccgattccgtttcaaaaagtccaatatgaaatgcggcaatatcttcatgaaaaggttggtcattgatttctaaccagtaaagaatcctgctctttactgatttgcatagttgaaggggtataagatgaaatcgttgcgtgagatactgcatctgttccatcgagtttttgatgatttgtccgtcttgcaattccttcaaagggtagagagtgtacatttgataggggtaacctgtaaggatttgcagctctccttgtctttacagtatgcatagatttcctcttcgaatttcttctgtagttgcccctgtttgtctaaaatatcagattcgtgcccatgtttaggtgtgaaatacaggcaaaccaagaagcaaggtttgaaaccaattatttttttcttggcatttataattggaacgagcgaatgagctacttcaaattcatattccttccaaagaaaaacgtagttggtataagataaccttctcacattagtggcatccggtatgtaagttgtgaagaattttgagagtctttgagttacctttttaaaacctacgaatgactggtaataggatatcgcccatataaaaggcagaaaagaaacaaacatcgtgcaaaacattccgatgatgagtggccaatgaaagctttcgcccgcttcccaatcttgatatactaaaggaataagcatggtcaaatcacccaccagtaatggtatgcaccaaaaggttgtggtctttttccaccagctccatacggaagagtagaccaaacgtttgttcttcaagaaagtggtcgtaaagtattgtttgagtgaaatcttatctccgttaatgtaatcaggatttgtagcaatcatgtctttcaattttatggatggctacaaatatagataattatttatttctcttcttgttttttgttgattaaagcacggttgattctaatttcacgaatcttgactccttccgatggaaaccaaacttttaccgtatggtttttccctttgaaaaagttgactttaaaggaagcctttacactattaataagcttgtttttgatttcaatgtgctgtgctttctgtgtattgatgccgatactgatttgagggctttctggtgccttttctttatcaatggcataaaatactgtaatattataagtccccccaggaaatttggtcttgatagcatattctgcacatggctgcaggaggatgcctgcattggcttctccgtccttattgtaagagctggcttttcccttgatatactctttccctttgatcgtttctttttcaatgaatttgcagtttttataggacgccgcattaatggttacatgcatgttttctaactcatgtcgagaatcctcatcagctgatatggggtgaacgaaagtaaatagtagagataaaatcaggaatagtttgtttgctcggctgtaagtcttttgtttcatttgtcgtttagttttaattgtaaaaaaagtgatcttcttttgggaagataatggcttactttgtcttttagtcgttatcctcttgaaaaagccgacaaaagtaattatttagctttttagctctattccttttgggaaagcttaagcttttcttgatttctttagactttgtttacaaaaagagaggccgtttatataaagaggaaagcgttaagatgatcacttaaaaacatttaaagcgaccttgcggccgctttaaatgttttcacaacggaataatccttattgtgagttgcttcaaattagtgggacaaatgtaagattttgtttgaataaaaaaaagtttttctggaaaaaatattatttttgaaaaaaatatggaattaaactatgaaaaagatattaggacttgatttgggtataagcagtattggctgggcccttgttactgaggcagaaaatgagaatgaaaaatcttccattgtaaaggttggagtgcgtgtaaatccgttgacagtagatgagcaaactaattttgagaaagggaagagtatcacgacaaatgccaatcgtacattgaaaaggacagctcgaagaaaccttcaacggtataagttgcgtagagagaatcttattgaatgtttgttgaagaacgggattattactgaacatacaatcctgcatgaatcaggcagtggttccacctttgaaacatatcgattacgtgcaaaggccgctcgtgaagaagtgactttggaggaatttggacgtatccttttgatgattaataaaaaacgaggatacagaagctgtagaaaagcgaagtcttctgatgaaggtcagcttattgatggcatggctgttgctagacggctgtatgatgaaaatattactcctgcacaacttgtactttcattgctgcaatcagagaaaaaatatattccagccttttatcgttccgatttagagaaagaacgtgaacgtatctggaattttcaacgagcattttatcctaatgtgttgactgtttctttaaaagaaaaattggaaggaaagtcttttaaacagtcttctgttattttccatcaggaatgtggcttttatacggcagatgacaaaggtaaagacaaacgcttgcagcgttatcagcgaagagtgagtgctcttgagtttcaactccctattgatgaagtggctgctgctatttgtgacttgaacggtgctatcggtaatgcaagtggttatttgggtgctattagtgaccgaagtaaggaattgtattttaataaacagaccgtaggtcagttcctaatgtctgaattggataagaatcctcattatagtttaaaaaatcaagtattctatcgcactgattatcttaatgaatttgagactatctggtctgttcaggccaaattccattctgaacttacggaagaattgaagcatgaaatacgtgatatcgttattttttatcagcgtgccttgaagagtcagaaaggcttagtaggcctgtgtgagtttgaatcccaaaaaatgcagatagttcgtgatggaaaagtaactaccaagttagtaggacgtaaggtatgtcctaaatcatctcctttgtttcaggatttcaagatatggcagaacattaacaatttagtagtaacagataaagtaaccgaagaaaaatatattttgactttggaagataagcagcgactatttgaggaacttcagcttaaagaaaaaatgacaaagtctgaagtactgaaattcttattcttgaagccaaagcagttggatttgaattatgaaaaagtagaagggaatcagacaatggctacattttattctgcttatcaaacgattgttacgatgtctggacacggagagtataacttttccaagatgccatcagccgaggtgcgcgtattggtacatcaactctttgaaggattaggataccatactgaatatttaagctataactctacgttgataggtaaggagtatgaaaatcagcctttttatcagttgtggcatttattgtattcctatgagggtgatcagtcaagtactgggatagacagtttggttgggaagttagctacaatgtttgggtttgagaaagaatatgcttctgtattagcaaatatttctttcccttccgattatggcagtctctcagctcatgctatgcaaaaaatattggttcacatgcgtgaaggtaatgaatatagtcaggcttgtagttatgctggctaccgtcattctgcacagtcgctgtcaagagaagaactggagcataaagagctgaaaggaaaacttgaacttttgccgcgaaatagcttacgtaatcctgtagttgagaagatactgaatcagatgattaatgtggttaatgaagtttctgatacttacggtcggcctgatgaaattcgtctggaaatggctcgtgaactaaagaaaagtgctaaggaacgtgaggaattggtttctgccatcaataaggccaatcgtgagaatgaaacatttcgtaagatcatacaggatgaatttggtatttcacatgtgagccgtaatgatttggtacgttataagctatatatggaattaaaagaaaatggttttaaaacactctattcaaatacttacatacctcgtgagaagctgttttccaaagaatttgatatagagcatattgttccacaagcaagtttgtttgatgattcattttcaaacaagacattggaggcacgtgctgtaaacattgaaaagagtaatactaccgcttttgattttgtgaaagcaaaatacgatgaaaacgaattggtacgatataaagaacgagttgacagcctattaagaacaggagtgattagtaagtcaaagcacgataagctattgatgactggtgaacagattccaaaagactttctgaaacgtgatttgcgagactcccaatacattgcacgtaaagctcgtgaaatactattagatatggtaaggcatgttaatactacaacaggttctgtaacggcgagactacgtgaggattggcagttggtagatgttatgcaagagctcaactgggataagtatgctcgtcttggtaaagtagaggagtggaaagacagggacggaagagtaattaaacggattacggattggacaaagcgtaatgatcatcgtcaccatgcaatggatgctttgactatagcattcacaaagccggtatttgtacaatatttgaataatttgaatgctcgtagtgacaagtcaagtagtatttatgctattgaaaagactcagttgcatcgtgataagaataataagttgcgtttcaattcgccctttatgccacttgaagaatttcgtcaagaagcaaagaaacatcttgaatctgtcttaatatccataaaggccaaaaataaggttattacccgtaatatcaacatcaccaaagtaaagggtggaacccgtatgaaggttcagttgactccaagaggacaattgcataatgaaactatttatggctctgtgcagcgttacgtgaccaaaatagaaaaggttggagcaaatttttcgaaaaatcagatagcaaaggtcgctaatcagaagtatcgtaaggcattattgaatcgcttagaaatgaatggctttgatgcgaaaaaagcattcacaggtaaaaattctcttgagaagaatcctttatacatagatgtggaccaaatgatgcaagttccagcaagggtgaaaaccgtttctttggagactatctatactattcgaaaagaagtgacacctgatttgaaattagataaagtgattgatgtaagagtacgcaagatattggaagaacgcttggctgcatacgttggtgatgctaagaaagcatttgttaatttagatgagatcccgatatatctaaatgaacaatgtggaattgcaataaagcgagttaccatattaggtgtcgcaaatgctatagctcttcatgacaagaaggactcaaatggtaaattcttattggatgaaaaaggagggaaacagcctgttgattatgtaaatacgagcaataatcatcatgttgcaatttttagagatgagaatggctgcttgcaagaacatatcgtatctttttatgaggctgtagctgctgctacgactggtgaaaaagtaatagatcacaattataattctaatcttggatggaagtttctatttactatgaagcagaatgaatattttgtatttccaaataaggagacaggttttgatccgaaggagattgatcttttggatcccgagaattattctcatatcagtcctaatctttatagagtacaaaagatggcaactcgagattacttctttcgtcatcatcttgaaacgacagtggacgataaaaatgaattaaaggaagtgacgtggaaacgatgtggcttaaacggattagaaggtgtcgttaaagttcgtgttaatcatttaggagagattgtttatgtaggcgaatattaagattatgataaagaaaacgttgtattttgggaatcctgcttatttgtcgttaaagaatggtcagttagtaattaagttaccggaagtagagaaaaacgattcgcttctggagtcattcaaacggcgttctgaaatcacaaaacctatagaagatataggggttgttgtacttgatcattcacagataactattacgacaggacttatggatgccttgttggcgaatcaatgtgctgttataacttgtaacaagaaaagtatgccacaaggtctgattcttcctttgtgcgggaattcaactcagaatgaacgtttccgctaccaaattgatgcttctttgccattgaaaaaacagctatggcaacagactattaaggcaaaaatagagaatcaaggggaggtgttggaagcatgtactcattctggggtgaaatgtttgaagatttgggctagtgaggtcagaagtggtgatcctgataatttggaagctcgtgcagccgcattttattggaagcatttatttcccgatttggattattttactcgtgaacgggaaggagtaccacctaataatcttttgaattacggatatgctatcttgagggctgtagtagctagatccttggttattagtggtatgcttcctactttaggtattcatcatcataatcgatacaatgcttattgtttggcagacgatataatggagccttatcgtccttatgtagatgaactggtatttgggttaatgcaagattatgattatgaaaatctttctcaagagataaaagttaagcttttgtccattcctacgttggaagttcgcataggtaaggtgagaagtcctttaatggtagctgtgagccaaactacagtttctttattcaaatgttttacaggtgagcagcgccagttagtttatccaaaacgatgatttatggatcgtttcagtgagtatagggtgatgtgggttttagtgttgtttgatttgccgacagatacgaaaagagatcgtaaggcggctgatgtgtttcgtaagaatttgcagaaagatggatttacaatgtttcaattttccatttatattcgtcattgtgctagtgtggaaaatgctgatgtacatataaaacgtgtaaaatcttttctgccagaatttggtcatgtaggcattctatgcattaccgacaaacagtttggacaaatcgagttgttttttgggaagaaacctgaagaacctaaatctcctgggcagcaattagaattgttctagtaataaagaatcccgccatatagcgggattctttatttttgagacacactttttttattctatttattcgtgtaataagttgattcattgtgtattgtgtaggttctgatgtctctactgatacaaagatactaatttgaaagcaaatcacaacgcccctcagtggattaaatgccaattttttgatgtctctactgatacaaagatactaatttgaaagcaaatcacaacaaagatggaaatatgaatcccgacctcgcagatgtctctactgatacaaagatactaatttgaaagcaaatcacaacaacgacatctttgcttcaacgcttgagaacgatgtctctactgatacaaagatactaatttgaaagcaaatcacaacgcaggactttatttttaataccaaacagaagatgtctctactgatacaaagatactaatttgaaagcaaatcacaactgaaagattatggttcaaatcgatacaagcgatgtctctactgatacaaagatactaatttgaaagcaaatcacaacacagacagctaacttttatttggaccctttgatgtctctactgatacaaagatactaatttgaaagcaaatcacaacctccggtcgtatcgttgaacgtattactaagatgtctctactgatacaaagatactaatttgaaagcaaatcacaacactatgcgatattataaatctaattatgagatgtctctactgatacaaagatactaatttgaaagcaaatcacaacaatccgtaatgagtgtgctactaatgaactgatgtctctactgatacaaagatactaatttgaaagcaaatcacaacgcggtgcatatgtatccggaggtatgtcgcgatgtctctactgatacaaagatactaatttgaaagcaaatcacaacatctgccattctgtaccccttttcttcctggatgtctctactgatacaaagatactaatttgaaagcaaatcacaactgatgaagacaagaatgttgaagttcttagcgatgtctctactgatacaaagatactaatttgaaagcaaatcacaacttaccaatccatgaagatacctttccggtgatgtctctactgatacaaagatactaatttgaaagcaaatcacaactacatcggcttctcagtgtgagatagttgtgatgtctctactgatacaaagatactaatttgaaagcaaatcacaaccgcactccaaaggttacagagttgctaaaagatgtctctactgatacaaagatactaatttgaaagcaaatcacaacccaatgaatcttgacactactttgctactcgatgtctctactgatacaaagatactaatttgaaagcaaatcacaacaactctttcacgctatccaggttatccgtcgatgtctctactgatacaaagatactaatttgaaagcaaatcacaacagtccttaatccatagtcggtcgtgtatgcgatgtctctactgatacaaagatactaatttgaaagcaaatcacaacgatagattaataatgttatctttgcttatagatgtctctactgatacaaagatactaatttgaaagcaaatcacaacttggtgtatttcccgatagccagttaggtggatgtctctactgatacaaagatactaatttgaaagcaaatcacaacaatcataagaagaaatatgagaacctataaaaatgtctttttttatatctaagtattggatataatcacacacaaaccttttagaaatttctagggcacttacagaatagaggtcttgtctttttccttttcgataggcttttgatattataagtcagtacgccccatatcatgaagtcattctcttctgttattttgatggaagggtagttcccgtttgcgggaatgagccagagacattctcctgaaggatcgacctgtacctgcttcaaggtaaagtcaccatcaatgaaggctactacaatatcaccgttcttcggttctagtgacttgttgatgaccagcagatctccgttgtcgatgccgcatccttccattgagtcgccaacggcacgagcaaaaaaagtacaagcgggattcttgacgagctctatgttcaagtccaaggattcggatatagtgtcatcaatggagttggtttgtcttgactcggagaaaaaggagagattatcggatgtttgattcttcatgcttctagggatatggatatgcgaagatagcgaaaaagactgaaacgagtgggtaattgataacagctttggagttgtcagactttaatatattgcataaaattctaataattgtaaacgcgttggcagaattaaattgattattatttggataactattgtcattttgttatccgtttatctaaattgaagtgattaagctattatatgaagtcat

SEQ ID NO: 2440 - DNA, 10199 bp, synthetic construct
  misc_feature 1..10199: note = Synthetic
  source 1..10199: mol_type = other DNA
cggacagcagggcttcaacgtgatcatagtcgataccgccggccgccttgcggtggaccaggagctgatggacgaaatccgcgcgatgcatgcggcagtaaagcccactgagagcctgttcgtggtggacgccatgaccggccaggatgcggtcgccagcgcgctcgccttcaacgaggccatagactacgacggcgtcgtgctcaccaagctcgacggcgacacccgcggcggcgccgccctctccgtcaaggccgttacaggaaagccaatcaagttcgtcggcaccggcgaaaagatggacgcgctcgacgtcttctatcccgaaagggcggccgaccgcatactcggcatgggcgatgtcgtttccctcgtggagaaggcccaggaggcgattgacgaaaaggaggcccgcgagacccgcaagaaactcgcccgcaaccagttcaccctcaacgacttctacgaccagatccagaaggtccgcaagatgggcgacatcaaggacctggccgccatgctccccggcgtgggcagccagataaaggacgtggacatagacaacgacaaggtcttcaagaccaccgaggccatctaccattccatgacgccgtatgagcgcgagcatcccgaggccatcaacggcagccgccgcaggcgcatcgcagacggctccggaaccactgtcgcagacgtcaacaaactcctcaagcagttcgagggctcccggaagatgatgaagatggcggtggacggcagcctccgcgaacgcctcaagaattttcgcggatagtacggcttcctgacaggaatttgctatatttgtgcgttcatggctccgggcaactacatattgctgctgataattgacctgctccttacggtggggctgtctttcctttgcagcatactcgaggccgtgctcatgtccacgccgatttccttcatcaccatgaaggagcaggaagggtacaagcccgccgtcaagttcaagaagtacaagaccgaaatcgaccgtccgatagcctccatcctggccatgaacaccatagccaacaccttcggcgcctccatggtgggcgtcctcacggcaaaggtgtggtcttcgggcgtgggctggatgtccgccatcatgacccttctcatcctggtctgctcggaaatcatccccaagaccataggcacggcgcgctacaagtccctgatgggcttcaccacccgcggaatcagcgcactgctcgtgctcatgtggcccttcgtcgagcttatccagctggtgcagaagagccttgcccgccccgacgacgacataacggtgagccgcgaggaggtgagcgcgatggcaaacgtcggcgaggaggaaggcgtgatagacaaagacgagaacaaggtcatccagaacatcataaagctcgacaacataaaggcctacgacgccatgaccccgcgcgtggtctgtaccgtggctccggagagcatgacgctccgcgagtatttcgaaggggaggatttcgagcaccactcacgcattccggtatatgccgaaagtcccgaatacataacgggttacatcctcagggacgacgccctcgaagacctcgccgaagacaaattcgacaaaaccctcggcgagattaagcgcgaggtctccttcttcaacgaagagacgagcctcgacgaaatctgggagaagctcctcaagacccgcgagcagatggccctcataatcgacgattacggctctttccagggtatcctcaccctcgaagacataatcgagaccgtcttcggcctcgagataatcgacgagatggacgaggtgaccgacatgcagcagctcgcccgcgagcgctggagaaagcgccagaagcgctaccgcaaggtttccctccctgagccggatgccggccggtaaaagaagattttttcttcccggaaaaatcatatattgcaaattatcactatatttgcgaaacaccgaaactgtaaagctcaatgcttgaagacatccaggacaagataacgaagctagtcgcgctctacgagggcgaaagacaaagggccgaaggccttgcggcggaattgtctgaaagcaggaaggttctgcaggagcggcaggtacagattgctgaacttaaaaacaagatagagaacatgcagttgcaaagcgcgttcacggcgggcggcactcccgaggccaaggcgcgcataacagctctcataagggagatagacaaatgcatagccctgcttgaagaagactagaatggacgacggacagagcataaccatcaagatagccggaagggaatatcccctgaaggcaaaaacacctgaggcagaacaggttatgcgcctcgccgcagatgacgtgaacgccatgctggcccactacaacgccagctatccggacaagtcggacgtcgacaagcttgcattcgtcaccctgagtcaggcagtgggcaagataacggcccagcgttcggccgcgaggctgtctgccgaccttgacgccctcgacgacagactgggggcatatcttgcaggaattgaaaagaaccgttagtccgtcccggcgaaacaaacaagttcttcggaaccgggcgtactcgaatggctaaggcaggcccttgagtgggaagcctgaaacatcacggaacccaaatcttacagaaaatttttctgccctgggactaacggtttgttttaacggcagcatctggtacgcacagatgctgctttttttgacattttgaaacaatatatacaaccatgttctacattttagcggcattgggcggggcagtcctcgcacttgccatttacataatcatcaggagcatcatcctcaagggacgtgcctcctccataatcgagaaagccgaactcgaaggcgagaagataaaacagcagaagatactccaggccaaggagaagttcatccagctcaagagcgaccacgagaactacatcgcggaaaagaacgccaaggtccaggaggccgagaaccgcgtccaccagaaagagagccagctgggccagcaggcttcggaactcggccgcaggcagcgcgagctcgacgccgcggaaaccagggtggccgcccgtgcggaggcccttgaacacagggaggccgagtacgaaaagctcaccgcccaggtgaacaagcagctcgaaacaatcgccggcatgagcgcgcaggatgcgcgcaacctgctgattgacaatatgaaagctgaggcgcgcagccaggcgcaggcctttatcaacgaaaccatcgactctgcccgtctcgacgcggccaaggaagccaagcgcatagtcatcaacaccatccagcgcacagccactgaaactgccatagagaacgccgttaccaccttcccgatagacagcgatgaaatgaagggacgcatcataggccgtgaaggccgcaacatccgcgccctcgaggccgccaccggtgtcgagatagtcgtggacgacactcccgacgccatcctcatcagcggtttcgaccccgtccgccgcgaggttgcccgcctggccctgcaccagctggtcatagacggccgcatccatcccgcgcgcatcgaggaagtggtggcaaaggtgacggcccagctcgaagaggagatgcttgaaaccggcaagcgcacctgcatagacctcggcatccacggcatgagcctggagctcgtgaggctcatcggacgcatgaaataccgttcctcctacggccagaacctcctgcagcacagccgcgaggtcgcaaacatagccgccaccatggcctcggagctcggccttaaccccaaggtcgcaaagcgagcaggccttctgcacgacataggaaaggtctccgacgccgatcccgagctcccgcacgcccttctgggcgccaagctggcggagaagtacaaggagcggcccgaaatcgtaaatgccgtgggttcccaccatgaggaaatggagatgacttcgctcatctcgcccatagtgctcgtcgccgacgcaatatcgggcgcccgtcccggtgcccgccgcgaggtcatcgagagttacatcaagcgcctcaagggcatggaggacctcgcagcctcgtatcccggagtcaccaagagctacgccatccaggcgggccgcgagctccgcgtgatagtgggtgccgaggaagtcaccgacgaccaggccgcccgcctctccggcgacatcgcccagaagatccaggacgagatgacctatcccggccaggtgaaaatcaccgtcatccgcgaaacccgctccgtcgcctacgccaaatagcatcggcacctgtccgccagctatattcaagcacttcgttccgggactccatgtgtcaactcctcccctctcgaggggaggtggccgcaggccggaggggtcccgtgtgtaaatcaccccattctgcacactacagccgcaggaaagattccggaagcgtggagttggaatggaggaaaatatttcataactttatgccaacataaccaataactcgattatgcaaaaaaagcgagccttgcagcccgctttgaatgttctcacaacggaataatccttattgtgaattgcttcgaattgttgcaaaaataataaaattttcgatatgaaaaaagttttgggacttgatttgggtgtggcaagtgtaggttgggcagttgtgaaccaggctgaaggtggtgacgagaaatcttccatagtaaaggcaggagtcagaatcgtacctctcggtgcgaacgaggccgataacttcgagaagggcaaaccgtgcgagacgaacgttgcgcggcggacttaccgctcaatgaggagaaacctccagcgttacaaactcagaaagtccaatctgaagaacgtgctggtcgagaacggctggattgacgaaaatacgattcttgcggaacattccaaccactctacttttgaaacctatatgcttcgcgcgaaagctgtggatgaggcggtatcgttagaggaattcgcccgcattcttttgatgatcaataagaaacgcggctataaaagcaacaggaaagcaggaggagatgaggaaggccagctgtttgacggaatgtcggtggcgaaagaattgatgaattccggcctgactcccggacaatatggcctgtccctcttgaaatcaggaaagaaatatgttcctcagttctaccgctcggacctcaaggatgaactttcccgtatatggaattttcagaaggaattccatcctgacatcctcacagatgaattccgcagcaagattgaggatgccgggaggaatgaggtttcaaaggcgttctattccgtgtacaagatttataccgaggacaataaaggccagcttcgcaaatacaggtcttacgaatggaggagtgaagcgcttgagggaaggcttgaacctgcaattctggcatatgtcattgcggacgtgtccgggcagataaaggcatcaagcgggtatctggctgctatcagcgaccgcagcaaagaattgatgtcaggagggatgacggtcggacagtacctgtactcacatatcaaggcggatccccatttctccacaaggaatctggttttctacagaaacgattatgctgccgaattcaatcgcctgtgggagacccagtccggcttccatccggaattgacacccgcactgaaggacaggattcgagatgaaatcattttctatcagcgcaggctgaaatcccagaaaaacctcatttccgtatgtgaatttgaaggcagaaagaggacaataacagttgaaggaaaagagaaggaggtggtcctggggccgaaagtcgcaccgaaatcctcacttgtctttcaggagttcaagatttggcaggtccttaacaatgtggtgatcacggataaggaaacgggggagcaaaggtatctcttgccggatgaaatgaatctgcttgcaggagaactccgtaaccgtgagaagctgtcatcggcggaagccctcaaactcctgttccgctccgtccgcggaaaggacctgaacttcaaaaaccttgaggggaatgtcacctttgcggcatttgtctcaaagttcgtcgaaatcgcaaacctgattgacgacacggaatatgatgtcaaaaagatgtcggctgaagatgccctggatttggtgcggaaggtgttcgaaagagagaagttcaacacggcggtgctggatttcgatgcgcttcttccaaaggaccggttcgaaagtcaaccgttgttcaagctgtggcatctgctctattcctacgaaggggatgattctcgcaccggttatgaaagccttgtggcaaagataagctcgatcaccggaatgcctgaagaatttgcgcgcatggtgtcttccattacgttcaaggaggattatggatctttgagtcataaggcgatgcggcggatactgcctttcatgaaacaggggcattcttattcggaggcctgtcagctggcagggtacaaccattctgcaagatcactgacaagagaacagattgacagtaaggaacttgtcgaccgtctggctctccttccaaaaaattctcttcataaccccgttgtcgagaagatattgaaccagatgataaatgtcgtcaattcagtctcggatgaattcggaaagcccgatgagatccatattgaatttgcgcgggaactgaagaagaaccaggcgcagcgacagaaaatgtcagcggacatagcggctcgggaaaaggacaatttccggattgaagagattctgcacaaatcaccgttcgggctccagtatgtgagaaaatccgacattctgcggtaccggctttacgaagaattgaaggaaaacggatacaagaccttgtactccaacaagtatattccccaggaactgctgttctccaacagcgtggacattgagcatatcattccgcagtctgtgctgttcgatgattcgttctccaacaagaccttggaatacaaggacgtgaatatcgagaaaggcaatatgacggcgcgggattacgtgacgtccaagtggggacaggaaagatacgaacaatacaagggaaccgtggaaaatctgctttccaacggtgctatctctgcagccaaatgcaagaatctgttgaaaacggcggaggatcttccgaaggatttcctgaacagggacctcgtcaattcacagtacatcgccaaaaaggcgggagaaatcctggaatcttatgtaagagtggtaatgccgacgacgggggctgtgactgcaaaactcagggaggactggcagctggtcgatgtcatgaaggaattgaatatcaagaaatattcagaagccggacttactcattccgagcaacacggggaacaccgccctgtcgagaagattgataactggacgaaaaggcaggatcatcgccatcatgccatggatgcactgacaattgcttttaccaaaccggcgcacattcagtacctgaattataccggagacaaaaatgatccttcttcgccggtatacggcataaggcagaaggaaacggttaaaatcaaggataacaagcgcattttcgtgccgcctatgcctttggatgaactcagggcagccgtcaggaaggaaatggaatccacgcttgtttcaataaaggcgaagaacaaggtggtgacgagaaatgtgaacaggacaaagaagaagaatggatataacactgcagtcactcttaccccgaggggacagatgcacaaggagacggtctatggagcaaggtcagtatatgaagtgttctatgtacccgtgggcgcgaaaatgaacgcggaaacgatagcgcaggttgcttctcaaagggagaggaccgccctggaagcccgcctggcggaatttggtggagatcccaaaaaggctttcaccggtccgaactctccggccaggaagccggtatttcttgacgccgcccattcggaacaaataggggagaaggtgaaatgcgtcaggctcaaaagggtatactccgttcgtaagaatattgatgccacactatctgtggacaaggtgattgacagtcatgtgcgtgctttgctaaaggcccggctcgaagaattcggaggaaatgcggcaaaagccttttcgaatctggatgagaatcccatctggctcaacaaagaaaagggaatatcggtaaagaaagtgacgattgccgagaatttcgaccttgatgcaatcagagagaaacgggataatcgcgggcggaagattcttgacgataatggacagccggtagcgtccgattatgtgaatctccgaaacaaccaccatgtcgccatctacaggactcccggcggcaagtatgaagagaaggtagtgtctttctatgaagctcttgacagaatcaatcaggggttgcccgtggtggataagaattaccgtaaggatgaaggctgggtcttcattttcagcatgaagataaatgagatgttcgttttcccgaatgcgaaaacaggattcgatcctcatgaaaccgaccttttgaacccggagaattatgcgctgataagcccgaatttgttcagggtgcagaaactgtcaagcaagtactataatttcaggcatcaccaggatacgggggctgaagaaataaaagaactgagggatgtaaattggaaaaggatccaaactgtcgataaaatggcggaagccgtcaaagtccgtatcaacaatatcggtcaaatagtagctgttggcgaatatgattaaacgtactctatactttggcaatcccgcctatctttctctcaggaacaaccagctggttgtcaagagggcggaggacggcgacatcccgtttccggaccagaaagacaacgaaaggaccattcccattgaagatataggcgtcgccatcctggataacaggcagataaccatcacttccggcgccatcgaaagtctgcttgagaacaatacggccgtcattacctgtgattcccattcgatgcccaccggactcctgctcccgttgtatggtaacactcttcagaatgagcggtttaccgaccagatagaggcatcccttcctctgaagaaacaactttggcagcagactgtcgaaagcaagataaacaatcaggcggcaatgctccgttacacgagagggacagaagcccgaaatatgcttgtctgggcgaacaatgtccgaagcggagacgcggaaaacatggaggcaagggcggcagcgttctattggaagaatgtttttccggttttgccggattttacccgtggcagggacggcgccgcgccgaacaaccttcttaattacggctacgcgattctgcgtgccatcattgcaagagcccttgtgggaagcggtcttctgccgactctgggaatccaccatcacaacaggtacaatgcttactgtcttgcagacgacatcatggagccgtaccgtccatatgtggacaaggtcgtttatgactattgcgaggagcgggagaattggagccccttccttgacagagacgccaaagtgcgattgctcggtcttcctgttcaggatgttgtaatcgacggaaagcgaagtcccttgctgatagcggcaaccaccacgacttcatccctgtacaaatgcttcagcggggaatccagaaagattttatatccggagttcaatggatgacaggtattctgagtacagggtaatgtgggtcctggtctttttcgatctcccgacggagactaagaaggaacggaaggttgctgccaaattccgcaaggaccttgtgggggacggcttctcgatgttccagttctccatctacgtccggcattgtgcatctttcgaaaatgcaaaagtccacgtggcgagagtcaaggcggcattgcccgaactcggaaagatagggataatgtccattacagacaagcagtattcggacatggaattgtacgtcgggaaaaagaagtcagacaaaccgcaggttgagcaacagctcgaattgttctgaaaagcatggcgataacgaaaaaatcctgggtaaaaccaggattttttcatttctgtgacagctgataaatctttgaccttcaaccaattgcgtggaatgtgctgtgttgtgtctgtcaaagatagtaattcgaaagcaattcacaacgtacggtcggtatagcattattgtaccccgctgtgttgtgt

SEQ ID NO: 2441 - DNA, 10159 bp, synthetic construct
  source 1..10159: mol_type = other DNA
  misc_feature 1..10159: note = Synthetic
ccaacaatggcggcaatggctccgccaaggagcaaaataaattgattgctgccgctcagagcatcacctccatatacatagacgttgaaagctaacatgcctatcaacagaacgactggcaagagagcttcccagagttttaggttcgttttttccacttagttcgaaaagttagattaaaaatgagcccaagaatacggataattctttaagttttaaaaaaaacgaaataaaatgctggaattctgtaataattcatttggaaaaataaaattttcaatgaagaaatgccttgatttacaatatgctgtatgtctaagatagattgaacaaaaataatctttgcgcttatttttcaaatagcgttaaaacaatttcctcggctttttccaaatctttctcatcaacgtaaacggaagccgcatcatcgctgccggcggccgcaaatccggccaatgcactttcttgcaaaaagtcgcgaacaaaacaaggaattttattttccgaaagtacgctttctaaataattggcattgagagcggtgcctacataaacacaaattaaattttgattggacatagaaatgggttttgagctaaggtacaattttttggttgtagtaaggaaaacttatgtaattttaatttttgttagcggaaaactagcccaacaaaattccaagtcgtttaggcaatactgaactagagcaatttcatgaaactgcattaattttcagaaaattccaactcgtttgggcaataccaaaacatagcgattttataaaaggtgaaacgaaatacgattttagaaaaagtaaaaaaggtaaaatggaatattttaataccctgaaaatgaacgagaaaaataaatgcataaaaaaagcgatccgcctaggcggaccgcaataaatgttttcacaacggaataatccttattgtgaattgcttcgaattgtaacgacaaatatagcatataaaaacataaaactaaataatatgaaaaaaattttaggtcttgatttgggaaccaatagtattggttgggcgttggtaaatgaatcggaaaatgaagatgaaaaatcttcgattattaagcttggtgttagagttaatcctctaactgtagatgagcaaacaaattttgaaaaggggaaaagtataaccacaaacgcggacaggacgctaaaacgaagcatgaggagaaatcttcagcgttttaagcttcgcaaagataatttgattgatattttaaaggagaatggttttatttctgatgaaacaattttatcagagaatggcaacaaatctacttttgaaacctatcgtttgagagcaaaagcagcctcatacgaaattagcttgaaacaatttgcaagagtcttgttgatgattaacaagaaacgtggttacaaaagcagtaggaaagccaaatctcaagatgagggacaattgattgatggaatggcagttgcaaaagagctttatgaaaataacttaacgcccggacagtttgtattggagttgttaaaatctggaaagaaaacagtaccggatttttaccgttccgatttgcaagtcgaatttgataaaatttggaattttcaaaagcaattcaattcggaaattcttacagatgaatttagagtagaaattgaaggtaaaggccagcgagcttcttctgccatattttggaaaaaatacaatttcaatacagcggaaaataaaggcacaagagaagaaaaaaaattacaggcttacaaatggcgaagtgaggctactaacaagcaactcaccaaagaagaagtcgcttttgtccttgctgaggtcaacaataatttgaatagttcaagtggttatttaggctcgattagcgatcgcagcaaggaattgtatttcaacaaaaaaaccgtggggcaataccttatggatcaacttgacttaaacccacattcaagacttaaaaatcaagttttttatagacaagattatttagatgagtttgaagcaatttgggaaacccaagccaaattccattcaaaactaacgcagcaattgaaaaccgaaattagagacgtggttgttttctatcagcggaaattgaaaagccaaaaaggcttaatcagtttttgtgaatttgaaagccgtaaaattgaagtggaagttgaaggaagtaaaaaaataaaaactgtggggtcgagagtctgcccaaggtcgtcgccaatatttcaagagtttaaaatatggcaagtacttaataatattcaagtatttagtaaaacgggaggtgataaacgctttttggaccaagaagagaaagaagtgctttttaaagaattgaattttaaagataaaatttctaaaaacgactgcattaaaattttatttaaaaaccaaaaggacctcgattttaattttaaggaaaatattgagggcaataggacttatggagcattcataagtgctattcaacaaataatcgatatttctggtcatggcgaatttgaattttcgaaaatgaataccgatgaaattttaaaggtgataattccattttttgatggctttggttacaatcttgatttattgaaatttaattcaggatcagaaggagaggcatttgagcaacaagcattttatcagttgtggcatttgctctattcatttgaagatgataattccaatactggcgacaaaaagttaattcaaaaaatacaggaaaaatatggcttcgaaacagaatacgcgcgcatcattgcaaatattgcattgcaaagcgattatggcagtttaagtacaaaggcgatacgtaaaattttgcctcatttaaaagaaggaaacgaatttagtgtagcttgtacttatgcaggctatcgacattctaaagattcacttacaaaagaagaaatagagaacaaaattttgaaagataaactggatatacttccaaaaaacagtcttcgaaatccggttgtagagaaaatattgaatcaaatgattaatgtggtgaacactgcaattgaaacctacggcaaaccagacgaaattcgcatagaactggctcgcgaattaaagaagagtgcaaaagagcgtgaagatgctacaaaatcgatgaaccagactactctagatcacgaaaaatatagatccacattgcaaaatgaatttggattgactcatgtgagccgaacagatattattcgatacaaattatatttagaacttgaatctcggggttttcaaacattgtattccaatacttatattgctcctaataagctatttagtaaagaatttgatatagagcatatcattcctcaatcgagactttttgatgattcattttcaaataaaacgatcgaaagccgaagtgtaaatattgaaaaagggaatgagactgcctacgattacgtgaaaaatataaaaggtgaatatgcactcaatgagtttctgaaaatcattgaagaattgtttaaagcaggcaaaatttcaaaaacaaaatataataaactgaaaatgaagggaattgaaatccctagcgattttattgcccgcgatttgcgcgatactcaatacattgccaaaaaagcaaaaaatattctgggggaattggtcaaagtggtagtttcaacaaccggttcaataactgatagactgagagaagattggcaattaattgatgtgatgcaagaattaaattgggaaaaatacaatttgcttggactgaccgaaattattgaaaatcgcgagggacataaaatcaaacgaattaaagattggaccaaacgaaacgaccaccggcaccatgctatggacgctttaaccattgcattcacaaaacgcagccacattcaatacctaaataacttaaatgcacgcagcgataaagcgggcagtatatatggaattgagcaaaaagaacttgaacgaaacgaaaaaggaaaacttaggtttaaatcgccaattttgcccatagaagcattcagaagtgaagcgaaaaaacacctcgaaaatactttggtttcgattaaagctaaaaacaaagttgctacgattaacattaacaccaccaccaaagcgcatggagtaaataagaaaaaacaacttacaccgcgcggacaactgcaccttgaaaccgtgtatggaagtcaatgtaaatatgttacaaaagaagaaaaggtaaacgctagtttcaccatcgaattaattagcaaagtagccaatcaaaaaatacgagaagctttgctaaaaagacttactgaattcgacaacgaccctaaaaaagcttttactgggaagaatagcccagataaaaatcctatttttctagattctttacaaatgcaaaaagtacctgaaaaagttaaaactgttactaccgaaattatatacacgattcgaaaagaaatctcgcccgatttaaaaattgaaaaaatcgttgattcaagaattaaaaaaattcttcaagctcgattatcggaatacaatggagatgctaaaaaagcctttactaatttggtcgaaaacccaatttggctcaataaggaaagtggcattgccattaaacgggttaccattactggaataagtaatgccgaggcgttgcactacaaaaaagacaaggaaggaaacctaatccttgataaaaatggaaataagctagccgtagattttgtaaataccggcaacaatcaccatgttgcaatttatagggatgctgatggcaacttgcaagaaaatgtagtgtcgttttacgaagccaccgaaagagtgaaccagggtttgcctattatcgacaaaacctataagcaaaatgatggctggcagtttctttttaccctgaaacaaaacgaatattttgtgtttccaaacgaaaaaaccggttttaagcctgccgaagtggatttattagacgaaaaaaactatcatctaataagccctaatttgtttagagtgcagaaaatatctagtaaaaattatgtttttaaccatcattacgaaacaaaatctgtagatggggaattattaaaaactaaaaagagtttatctggaattacttattactttgtacaaaccccttcaaaattattagggattaacaaagtccgtattaatcatattggtaaaattgtaacagtgggcgaatattaactaaaaaccgaccgcctgggtaatattacaatataaaaacatcacgcctttggtatcacgctaaaggtgtgatgctaaaagcgtgatgaaaaacattacaattgatgcatttcgaaaaaggctatatttatcacatttacaatcaaggaaataatcgtcaaaaaattttctttggtagggataattatttgtttttcttgcgaaagataagaacgcatattttgccttatgcagatgttttagcttggtgtttaatgcccaatcatttccatttgatggttttggtaaaagaagtggtgttgcctgaaagcagtcatacgatgactcaaaaaagcagtcatacgatgactcaaagtcatcgtatgactgctctaaatgaatcgatagcgattatgcttcgttcctataccagagctatcaataagcaggaaggttttagcggctccctttttaaggcgcatacaaaagccgaatgcatcaattgttcgaaagggataagtcctttgtttagtgtaaaacaagaccatacacaactccatacccaaaatccagaactcgaataccctcaaatttgtttcaattacatccatcaaaatccggtaaaagcaggaatggttcataaaacaaccgattgggaattttcttcggctaaagagtatgcaggcattcggaaagggaagttggtgaatatgaaaattgctagggataatggtttaatcattgagcaactttagataatccttgacaaatgcgattaaaatgtttaagatttaaaagcagattatgataaaacgaacactttattttggaaacgatgcctatttacacacatcaaacaaacaattggttattacttttgccgacaaacaaaaagaggaagtcaagattccgatcgaagatattggtgtagttattcttgatgcttttcgattgacgatttctcaaaccttgatttctaaattattagaaaacaatgtagcccttatcacctgcgatgagcgccatcatccacaaggattgatgttgaatttggttggaaacactttgcaacaggagcgttttggcgatcagatcaatgcgagtctgcctctaaaaaagaatctttggcagcaaaccatcaaagccaagattcacaatcaggccattttattggccatgaatggaattccgatcgaaaatatgaagtattgggaaagcagcgttaattcgggcgatccggagaattacgaagcaagagcggctgcctattattggaaaaatctgttcaaagattttcaagacgattttgtgcgaggtagattcgaagcggagccaaacaacttgctcaattatgggtatgctgtactgcgagccattgttgcccggagtttggtggcttccggcttgctccctactttgggcattcatcatcacaatcgctacaatgcttatgccttggccgacgatattatggagccatatcgaccttttgtggacaaaatagttttagaaattatcgaaaagcatccctcgatcgacgaattgactcctgaactgaaaaaagaattgttgcaaattccggtgttggatattttcatcgacgggcaatcgagtccgcttttggtgggaatgcagcaaacaacagccagtttggcgtcttgtttttcgggagaagttcgaaaaataaaatacccggaacttggataattcactacgttttaatcaatatcgaattatgtgggttttggttttttttgatttgccaaccgaaaccaagaaagaccgaaagcaagccggtttgtttcggaagcgactgatagaggatggatttgctatgtttcagttttccatttatttgcggcattgttcgagcaaagaaaatgccgatgtccatacacgaagagtaaaatccaatttgccacccaatgggcacgtggggattttgcgcataaccgacaaacaatttggcatgattgagcttttttatggcaaaaaagaaagcgaaaaacccaatacgccccaacaattggaacttttttaaaataaaaattcagggtttggcctaggctcaaaccctgaattaaacagcttttttaatttcaaattatcgagttaattaattgctattcagaatattgagtgcagctctgctgttttcaataattcaaagatacaattcgaaagcaattcacaacaagcaataaagaaatatttaaaggaggtttgctgttttcaataattcaaagatacaattcgaaagcaattcacaacctccaaccattgttcggcagtagacaaagcgctgttttcaataattcaaagatacaattcgaaagcaattcacaacgtttgattaaaaagatagcactttccttcgctgttttcaataattcaaagatacaattcgaaagcaattcacaacttcaatccattttattttctttgctgcctgctgttttcaataattcaaagatacaattcgaaagcaattcacaactcttcctgtcaatgcatcgttaatgtattggctgttttcaataattcaaagatacaattcgaaagcaattcacaaccaggagctatcacagccacaggagcttggggctgttttcaataattcaaagatacaattcgaaagcaattcacaacctgcaggcaatatggaagacaaaccggcttgctgttttcaataattcaaagatacaattcgaaagcaattcacaacatattaattcgcataattacttaagcgaacgctgttttcaataattcaaagatacaattcgaaagcaattcacaacctggcgtcaaactaattggaccatcatagagctgttttcaataattcaaagatacaattcgaaagcaattcacaaccaaagcgcatcccattaagtcagtagtttgctgttttcaataattcaaagatacaattcgaaagcaattcacaaccaaatgatgcagctattaatatacatgaaagctgttttcaataattcaaagatacaattcgaaagcaattcacaacatggcgtacaacaaaaaaaacaagcttcttgctgttttcaataattcaaagatacaattcgaaagcaattcacaacgctttagtaatattattgtctttacagtacgctgttttcaataattcaaagatacaattcgaaagcaattcacaactggagaagtacgcaaatattgaaagtaattgctgttttcaataattcaaagatacaattcgaaagcaattcacaactgatcatccattttcaatttagcatctgctgctgttttcaataattcaaagatacaattcgaaagcaattcacaacatcatggaagaaaatgagttaactcaagaagctgttttcaataattcaaagatacaattcgaaagcaattcacaacacttgggttgcttaacttgtaatattcctcgctgttttcaataattcaaagatacaattcgaaagcaattcacaacgtcccagagcggcttgatgatgatagatagctgttttcaataattcaaagatacaattcgaaagcaattcacaacctgcagagctctctacctcaatcatgcattgctgttttcaataattcaaagatacaattcgaaagcaattcacaactctttgatctcgttgtctgtatgtttttgcgctgttttcaataattcaaagatacaattcgaaagcaattcacaactcttacttcaaaggttggtgtatcttgtatgctgttttcaataattcaaagatacaattcgaaagcaattcacaactaccgatattgaatcgcagaaatgggatgagctgttttcaataattcaaagatacaattcgaaagcaattcacaactcactttatttttgaacgaatcatcttttcgctgttttcaataattcaaagatacaattcgaaagcaattcacaacggatactccttttttaatttaaaataggaggctgttttcaataattcaaagatacaattcgaaagcaattcacaacagtggccttggcggattggcaaaggcgcttgctgttttcaataattcaaagatacaattcgaaagcaattcacaactagttgctcaggaatttgacaacaaacaaagctgttttcaataattcaaagatacaattcgaaagcaattcacaacttaaactaacagagattaaggaagccaaaggctgttttcaataattcaaagatacaattcgaaagcaattcacaacgcgtagttgagaatcatcttacttttataagctgttttcaataattcaaagatacaattcgaaagcaattcacaactgctaataatcttttcaaccatttagtatcgctgttttcaataattcaaagatacaattcgaaagcaattcacaacaaaatgttttccacggatataatgtttgttgctgttttcaataattcaaagatacaattcgaaagcaattcacaacaagcgagatgttattttgttttacttgctcgctgttttcaataattcaaagatacaattcgaaagcaattcacaacgtataatcaactttcaaacgtgcgaatgttgctgttttcaataattcaaagatacaattcgaaagcaattcacaacactctcatttcgtttattatttgatggtttgctgttttcaataattcaaagatacaattcgaaagcaattcacaacgaagtaatagaattagggggtgtcatattagctgttttcaataattcaaagatacaattcgaaagcaattcacaacaagattacataacgtatgttaatattacaagctgttttcaataattcaaagatacaattcgaaagcaattcacaacaaaaagccataaacgaaaaaaacggtcaaggctgttttcaataattcaaagatacaattcgaaagcaattcacaacgggccggtatctacagcgccacagacgttggctgttttcaataattcaaagatacaattcgaaagcaattcacaacgaaaccggcagcgtgtaaagcatctgcttt

SEQ ID NO: 2442 - DNA, 9957 bp, synthetic construct
  source 1..9957: mol_type = other DNA
  misc_feature 1..9957: note = Synthetic
ctaacttgatcgttgcatactatatcataaaaagactgaggccttatcaggtgtaagtgtgtgacgggtggttggtaatatttacaaataacgactcattgccgctattgcgtgattgttcctacaatgcttctacccattgggcataaaggattttttatttcggattaagctgtagggattggtaatttattgaatttattatacagtgtccataccacttgtttcaataaaatataaccactttcttaaattacttgctgtttgaactggctgtccacctatttttttcccctataataagatagtcatttgctaccattactgttgaattattgtgatgtttaggagtaaagacaaccagcaccattttgtgaaagaagttatcatgaacagcttgaatagtcggaactaaatttgctatcgctgatatatgcatagccgtatcatacttggcctgataggcatttataattatttgagtggcaatactaacaaccgtcattttttcattgtatttaggacagatattgccacagcgtttatttgcaataaggtcggactaacaatgatcataatacacttcaatatccataattgctaagacatcgatatcggtagtctgaagtttttgtttaatgggattttttcctacacgactagtaaaatattttatacctaccaactctgatgtaacaatccaaaggaacatgttataataacgttaaactcctagtaataaaacacttccgagcgatcgagtttgctttcaaaaagtgaataatgtttaatctttaccaattaattgctatttattttttatttgttatgagattgtaaatcggttgcgtattatatttgaaatatatatcttagtaaattcttagttagaagcatactagcttcaaggtcgatgaccgtagtgaatgaaatattggcaataattatgtttgcttgttatgataacctccctatcatctatacaaaaaaaggcgagttgcccccgccttaaatgttttcacaacggaatcatccttattgtgaattgctttctaaggacaaatataataatattttgaattagcaacatacaggaactcatataaatttaataaattttactacaaaatattgatacttaaaaatctggattatggctaaaaatatactcggtttagacttaggaaccaattccatcgggtgggctcatgtaatggaaggagaaaattctgaaaactcaagcattgttcaaattggtgtgcgagtgaacccgcttactaccgacgagcaaacgaacttcgaaaaaggaaaacccattacgaccaatgcagaccgaactttaaaacgtggcatgcggcgtaatctcgatagataccaattgcgtagagaacatcttctcaatgctttgaggaaagcaaatatcatcactgcagaaagtaaattggctgaagacggtaagaatacgacgcacgaaacctggcgtctccgcgcaaaagccgtaaccgaaaaaattgaaaaggatgaactggcaagggttttattggctatcaataaaaaacggggatacaaaagttctcgtaaagctaaaaatgaggaagaagggcacgcaattgatggtatggccatcgccaaaaggttgtacgaagaaaatctgacaccgggacagttgtcttttcagttgcttttagaaggcaagaagaaattgcccgatttttatcgttcggatttgcaggcagaatttgataaggtttggaataaacaaagaacatactatccggactttctaacagaagaattatatatagccttaaaaggtcagggaaaagaaaataccagaaagcgaattttggctatagccaatgtctatacagcagatattaaggatatggaagatggtttgaaaaatgaaaaaaccatcaaactcccaacccgagaaaagaaaaaacttcaagcatacaaatggagaaatgatgccgttacccaacaattgtctcaagaacaagttgcttttgtgttaaccgaaatcaataataatatcaatcaatcgagcggttatttgggtgaaatctccgatagaagtaaggaactatttttcaataaactcactgtaggccaatacctttacaatcagcttttgcaaaacagacatattcgcttaaagaaccaggtgttctatcgccaggattatatggatgagtttgaggcgatttgggaggaacagcgaaaacatcatccggaactgaccgatgaactgaaagaagaaattagagacattattattttctatcagcgtaaattaaaatctcaaaaagggttaatcagtttctgcgaatttgaaagtaaagaggttgtaattaatggtaaaaaaagtaccataggtgcaagagtagccccaaaatcatcgccattattccaagaattcaagatttggcagaacttgaacaatgttcttgttcgaaaaaaaggaagcaagaaaaggaaggctcaagatacactaacaaatttctcggaagatgcagaagttttggaactgagtttagaagctaaagaaaccttatttgaagaattaaatttaaaaggcaatctttcttctgctcgaattatagaaattttggggcataaacctgctgattgggaagtaaatcattcacaattagaaggaaatcgaaccaatcaggctttatacaacgcttatctgaaaatccttgaaatcgaaggatacaacgaagaccttttaaaattgtccgacaaagatgatattaatgtggctgatctcaaaaccccggcgagagagatcaaagcaatggtgaaatccatttttgaagttttgggtatcgacacggaaatattggaattcaatgctgaattggatggcaaagacttcgagcagcagaagtcatatcaactgtggcatttattgtattctgccgaggatgatgataaaaaatactccgaggaagatatcttgacctatggtcaggaacatatcggacttaagaaaaaactatgcgagaaattcggttttcaaccggagcatgcaaagattttggtgaatgttagtttccaggatgattacggaagcctcagcaccaaagccatgcgtaaaatttatccgtacataaaagaaaataaatacagcacggcttgtgcatatgtagcttcagactataaaaaactatctcaaaaggaaggtgattattttgatgttttatcaaaaaaatatcgtcattcaaattgggagaccaaagaagaaaatgagcaacgcctgttaaaagatagattggatttattacctaagaacagtctgcgcaatcctgtagtagagaagattctcaatcaaatgatcaatgtggtcaatgctctattggataaaaaaagaaaaacagagccgaattttaaattcgatgaaattcgaatcgaattagcacgtgaattgaaaaaaaatgccaaagaacgtgctgagatgactaaagaaatcaatcaagctaaaggcaaaaatgagaagatagtagaaacgataagaaaagattttggcattcttaatcctaccagaaacgatattgtaaaatataagctttatcaggaattggcttttaatgggtataaggatttatacaccaataccaaaatcgattatcataagcttttcagtaaagagtatgatgtagaccatatcatcccacaatccagattgtttgacgacagtttctccaataaggtattggtgccccgacaagctaatttagataaaggtaatagaacggcctatgattacatggcaaccaaatcaaaagaagcattcgaaaggtatttagctgccattgagagtttatataaagaagataaaatttccaaagccaaatatcaaaaattgctgaagcaagaatcgaaaattggcgatggctttatcgaacgcgacttgagagacagccagtacattgccaaaaaagcgaaagaaattctaagtcaaataaccagacatattgtctccacaagtggaagcattacagaccgtttgcgcgaagattggggattaatcaatgtgatgaaagaaatcaacttgccgaaataccgtgcattgggaatgactgaattcgaagaacgaaaagacggtaataaggtagaagtgattaaagattggacgaaacgcaacgaccaccgccatcatgctatggatgctttaacggtagcgttcaccaaacgtcagtacatcagctatttcaactaccttaatgctcgctataacacgacacacaaagaacaccaaaatatcaaaggcattgaagaaaaattcatcgagtggaagtatgatgagcaaggcaataaaaaacgggtatttaaactgcctatccctaactttcgtcagctggccaaagaacatttagagagtgtattggtttctcacaaagcaaagaacaaagttgttacccgaaataaaaatataaccaaatccaagaaaggggaattggtaaaaatcgaactaacgcctcggggacaattgcacaaagaaactatttacgggaaatatcattattacgagagcaaagaagtaaaaatcgatggcaaattcgatgaagcaacgattgcgacggtaactcatccattgtataaaaaattgttgttagaacgattacaagccaatgataatgacccgaaaaaagcgtttacaggcaaaaacgcattgagcaagaatccgatttacttggatgaagcccgaacagaaacgatgcctgaaaaagtgaaattaacttggttagaatcggattatgcgataagaaaagacattactcctgaaaacttcaaagatgaaaaatcgcttgagaagattattgaccatgaggtaagggaaatcttgagacaaagattaaaagagtatggagatgctaaaaaagcattttcagatttagataaaaatcctatttaccatacgaatggttatgtcattaagcgcgttcgaatttccggggtcaaaaatgccgaaccgttacatttcaagaaagaccatttgggcaactatcttttagatgaacgaggcgaacgtattcctgtggattttgtgagtaccggaaataaccatcatgtagctatttacagagatgccaacggcaatttgcaagaaaaagttgtatcctttatggaagccgttttaagaaaaaattacggtttgccgttgattttcaaaaatccaattgaggatattgatttggttttaaacaaaggaataaaggaggaattgattttaagtaatcttcctgaaaaagactgggagttcctctttaccatgaagcagaacgaaatgtttgtatttcccaatgatcaaaccggatttaactcacaaggaattgaccttttagatccgaagaataaaaaactaattagcccttatttatttagggtgcagaagatatcaactaaaaactatgtttttaatagtcatttagaaactaagtctgtagatggggacatgttaaagaataagaaacagctaagtggagtttcatactattttatacagacaccagcttatttgaaagatataataaaagttagaataaatcatttaggagacatagttcaagttggcgaatattaatgaaatatggttaaacgaaccttgtacttcggtagtcctgcttatctaaaaacgaggaatgagcaaatggtcatcgaactccctgaagagaagggagctcgacttgtagcagagaccaaacaaactccgattgaagatatcgggatattaatcctagatcatcaacaaatcaccatcacacaggcattgatcgccaagttactcgaaaacaatgtcgctgttattacatgtgataggacacaccatcccacaggactcatactgaatcttgatggtaatacccttcaaagccaaaagttcaaagcgcaaatagaagcttctgtacccctaaaaaagcagctttggcaacaaacgataattgctaaaatcactaaccaagctgcgctgcttaagttaattggcgtagaaaataaaaccttgttgcaatacgccaaacaagtaaaaagcggtgatagtgaaaatcatgaggccaaggctgcaaactattattggaaacatctatttcccgatttcctgaacttttatcgtcaacgagaagggctcccaccgaataatttgttgaattatggatatgcgatattgcgcacgatggtagcccgcagtctgataggatcagggctgctgcctacattaggtatttttcatagaaatcaatacaacgcctattgcttggccgatgatatcatggagccctatcgaccctttgttgatagagttgtttgcagcatcgtgagtatgaacggtaaatttctggagatgacgccaaacatgaagaaagatctgctaagcatccctgcaatggatgtgtacattggaggcgaaagaagtcctttgatgaatgctgtccagcggacaaccgccagtttggcaaaatgctttgaggggaaagcaaaaaaactactttatcccagtttaatgtgacatgataaaaccataacaaaactccactatagaaaaatgtacctaaatattacagatcgattacaaaggggttcttatggcggtgagtggggcaatgcattgaatgcttatcgaatcatgtggatacttgttatgtttgaccttccgacagagacgaagaaagatcggaagaattatgtcatatttcgaaaaaagatgttgatggatggatttcaaatgtttcaatttagtatgtacatacgacattgtagtagtagggagaatgccgaggtgcatgtaaaaagggtaaagaagaatttaccacagaatggacatgtggggatattatgtattactgacaagcaatttgggatgatggagatatttcgggggcatgaccaagtggatccgcctgagactattcagcagttggagcttttttaggatatggaagtataagttaagattttaaaaaatgggtttatgtacaaaaaaacggacactataagtccgtttttttaacctataacaggtctaaaatcctttactgtagcgattttggtcatactcagttgttaaagacctaagctacataaaatttgaaagcaattcacaacatgtatctcaaagggcttttgcatttcgttgttgttaaagacctaagctacataaaatttgaaagcaattcacaactgtatggactgctgtaaactttgtgagttcgttgttaaagacctaagctacataaaatttgaaagcaattcacaaccagctcgctctccttacaccaatcgccatcgttgttaaagacctaagctacataaaatttgaaagcaattcacaactttggagggcagattaatataacgaaaatgttgttaaagacctaagctacataaaatttgaaagcaattcacaaccatgtggtttgccttgcctccagagtaccgttgttaaagacctaagctacataaaatttgaaagcaattcacaacatctgaccaaaaagttctctccttccaaaagttgttaaagacctaagctacataaaatttgaaagcaattcacaactagcctgtgttcgtgcaagagaaaaaacgagttgttaaagacctaagctacataaaatttgaaagcaattcacaacatgttaattagcctagaaggcgaaacaccggttgttaaagacctaagctacataaaatttgaaagcaattcacaaccccatccttaacccgccctttacatccggggttgttaaagacctaagctacataaaatttgaaagcaattcacaacgatatgcgaaggaagcagtacgaggaagcgttgttaaagacctaagctacataaaatttgaaagcaattcacaactaatccctgttttggtggtctagccatatgttgttaaagacctaagctacataaaatttgaaagcaattcacaacgttcaatgatagcatagtgaatgagttgctgttgttaaagacctaagctacataaaatttgaaagcaattcacaactccgcaattgactctattgtagtacctgtagttgttaaagacctaagctacataaaatttgaaagcaattcacaaccctacaggacggcagactatgaaagatggcgttgttaaagacctaagctacataaaatttgaaagcaattcacaaccattttcatctgcatctcttaatcttatgtgttgttaaagacctaagctacataaaatttgaaagcaattcacaaccaatgaatgtgtgcagccattactgtcactgttgttaaagacctaagctacataaaatttgaaagcaattcacaacacgatgaaaagggcgtagcacaatggaatggttgttaaagacctaagctacataaaatttgaaagcaattcacaacaatgcgatatctaaaatggattattcctgtgttgttaaagacctaagctacataaaatttgaaagcaattcacaaccatctcgaatgccttttcgtttctagcaaagttgttaaagacctaagctacataaaatttgaaagcaattcacaactatgtgagccgggcgatgttatagtagattgttgttaaagacctaagctacataaaatttgaaagcaattcacaacagctagctgttgagctaaaaaatcaaggtcgttgttaaagacctaagctacataaaatttgaaagcaattcacaacgtcacaatgattttgttgattattctacaagttgttaaagacctaagctacataaaatttgaaagcaattcacaacaggtggtacgagggttgcacagcaggcatggttgttaaagacctaagctacataaaatttgaaagcaattcacaactgtactgagtgtggcacattgcaggacttggttgttaaagacctaagctacataaaatttgaaagcaattcacaacccatagttgatatgaagccaacagcatttgggttgttaaagacctaagctacataaaatttgaaagcaattcacaacaatatttccagagggctaaaacaaatagctgttgttaaagacctaagctacataaaatttgaaagcaattcacaaccaaacgaattccagtctttcaaacatttctgttgttaaagacctaagctacataaaatttgaaagcaattcacaacatcaccagctacataaccatgtaatacccgttgttaaagacctaagctacataaaatttgaaagcaattcacaactgctgtaattaacggacaattgcacgaagttcattaaaccagcaagcccctcagcttttgcaaactaaggggcttgggttgcccgggtcagtggccccggcattgcaaatatacaacaattatgaaaagaatatctattgaccggacaaggctttcagaagcgctgaaatatcaccaaactgtacctcaagtaaatcagcaagagactgaagctcttgttcgtaattcgctgaacgaactgatgacaactcgtcatttaaattctttgacaaatcaggatgtatctgctccaaaagcacattcacttttgcgtgaagctctttgttttcggcgcgtaaaatggctatatgtgtcagtaaaaaggctgctaaatcatcttcgctaatagcgatttttctttctttcataaatcaaatttaaatgaacgccgacattttgcacaaaaaagccaaagaactgcaccgggtggtgaatcaggtgatacccaaacgggtaaaagaccttggcgtacagtttttcaaatcccgcttccgggcgcagggatggttggacgaaagtttccagccctggccaaaacgcaaaaaagccgataagaaaagacccggacgtgccattctcatggacaggggtaaggttgttaaagacctaagctacataaaatttgaaagcaattcacaacggtgcacctgactctcccgatagctatcgggacaggggggctag

SEQ ID NO: 2443 - DNA, 9705 bp, synthetic construct
  source 1..9705: mol_type = other DNA
  misc_feature 1..9705: note = Synthetic
gccgaaaaagcccgtttgcgggaccgactacattaaaataaaccgcttcgtgcccaaaacagggcttttcgggaacgaaacattatttgaagcacttgggtctacaggtatctgtaggcccaagtttatttgtaaatactccgattatattataaatttgcatgatttggtttcttcacgtcatcccggcgcgtccgtttacagtcattctgaacgtccgtttacggtttatccgcaacgtccgtctgctgtcattctgagcgtagccgaagaatctgaggaacttgaatgtagattatacattaatttaacatattatgacactgattaaatccatttccggtattcgcggaactatcggtggcgctccgggggatgcgctgactccaattgatattgtgaaatttacgtatgcgtactgcaggaagctgagggacaggcgtccaaaggcagaaggagaaaggtaccgcgtggtggttggcaaggatgccagactgtcaggtgagatggttgaggacctcgtatgcggaacaatcatatcatgcggaatggatgtcatcaaggcaggcttcgcttcaaccccgaccacagagatggcagtgattttcgagcaggcagacggaggtatcatcctgactgcttcccataacccaaagcagtggaatgcacttaagctccttaatgagaggggagagttccttaatgctgctgaaggtgcagaaatccttgcttgtgctgccgaggagaatttcgatttcgcagatgttgattctcttggtaccgttgaagagaaggactttacagaccagcatctggacgctgtacttgccttggatgcagttgatgcagaggctgtcagaaaggctggattcaaggttgccttggatgcagtcaactcggttggcggtataatcatgccgcgtcttctggaaaggcttggggtcgaatgcgtcaaggtgaactgcgagccgactggcgatttcgctcacaatcctgagccgctgcctgcaaatcttactgagctttgcgacgctgtagttgccaataaggctgacttcggtatttcagtggaccctgacgttgaccgtcttgcacttatctgtgaggacggaaagccgttcggtgaggaatataccttggtgagcgtggctgactaccttctttcaagggtgtacaacgaggcactcgagaccggaaaatccgtggaggaggttgctgcaccatacgatatgacaacatcatccaacctgtcttcgtcacgtgccctgagggatgtgacagagaagttcggcggtgagtattttgctgctgccgtaggtgaggtgaacgttaccaccaagatgcgtgaatgcggtgctctgataggtggtgaaggcaatggcggtgtcatctatcctgcattgcattatggccgtgacgcaatggtcggtgttgctctgttccttaccaatcttgcctacaggaagtgcaaggtttctgaactccgtgccacatatcctgaatatttcatagcaaagaacaagatagagctttctgacaaggggatgattgacgctattcttgaaagggtcaagacagtgtgggctgccgaggatatcaataccatagatggtgtgaaggtttccttcgagtcaaagagagagtgggtacatcttcgcaggtcaaataccgagcctatcatcaggatttatgctgaggctccgacaatggaggctgccgaagctctcggaaaggctgtgattgatatagccaatgaggttatcagaggctgatccggacttcgtcatattgaatccagtcggggaaccttgaacggtttctcgactttttatgaaattaatcggacgtaacatgttttctttcaggacgactcacttggaggagcagctggacaaggcactggtcgacgggaaggtcggctgcttctgcacgcagaactgctgggacacagagcgtggcaggtatatgtacgacattttcagggagaggggcaatcttgctgtgattttctcaccgcgggacactgaacttacacctctgacgaaccatatagtgtttgagccttcagaactggatgggctcaatgccatagtggttgaaatccaggatgtcgggacaaggtatttcaactatacccgtgacctgttcctccttatggagacactcaagaccatcgggaatgccccgtcgctctatgtcgtggaccatatcaatccggccggcagggtggtggaaggtaccatcacatctggagaaagcatgtccaatgtccctaaggtcgcccacaggcacgggcttaccttaggtgagcttgccaacctttatcacaatgagataggggcaaaatatcctctgcatgtgatttctgccatgtccaaggataccaacaggcagttcatgccatggacaatcgctcctgcttcggacattcccgggcttttcacctgtgacatgtacagcggcggcgggctctggaacaacacaaatgtgtcgcccggtatcggtaccgcacgtccctatgagtatatcggcgcgcctttcataaagacaatgacgggtgacggagtcccggcacctgacggtgtgcagctgcggccgtgttccttcactccttcctgcggaatgtatgaggggcagaaatgcttcggctatcagattctcctgcagcccggggctgagtaccattccctgatgcatgtccttcagcttatccggtatttccgtgggaagtataccgaattcaggcttgacgacagcttccgctccaagcttgcagacgatgtgctctacggttatgtcctcggcgagaccgactgggacaccgcccgtgaacacatcaaggtggaggagcagaaatggataaggaaagccaagaagttcctcctttatgacgaccagccatacaggatgaaataggctcctgtaagatatagtcagcaagccgatggcagactgaaataaaaaagcgaggctcggagagtcccgctttaaatgttttcacaacggaataatccttattgtgaattgcttcaaacttattgcaaaggtattcaaaactttcataattccaatattctttttaaatttaacagctttataagaagtttatagtttttcttaatattcggaatgtcattatgaaacggatacttggacttgaccttggcaccaacagtatcggatgggcagtggtgaatgaagctgaaaccaatgaagagaaatcgtcaattgtcaaattgggcgttcgtgtaaacccattgaccgtagatgaaaaaagtaattttgaaaaaggtaaaagcataactaccaatgcagaccgtactttgaaaagaagtatgaggcgtagcctgcaaagatataaactgcgccggaatgctctgcttgacctcctgagggagcaggggtggattacagaaaagactatattggctgagcaagggaattttacgacattccagacattggggcttagggcaaaagctgctacagaagaaatctcactggaggagtttgcccgtgtcctgctgtccatcaacaggaaaagaggctacagaagttcacgtaaagtgcagggggatgaggacgggaagctgattgacggtatggatatagcaagggaactgtatgaaaccggcaggactcctggggaatatgtctttagtcagctttcatctgacataaattacagaatacctgatttctaccgttctgacctgcaaaatgagtttgaccggatatggactgcgcagaaggcgttttatccagatattcttacggatgaactgaaggaagggctgcggaacagaaacgagaagcagacgtgggctatatgtcaggaaccatttgcgttagaagggattaaaagagtggcgaaggggaaggaacaggtaaaagaaaattacggatggaggaccagggctctatctgagagattagacctggagtctttggctgttgtcctgcagaaggtcaattcgcagataaagaattcttcaggatatcttggggacataagtgaccggagcaaggaactgtatttcaatggtcagaccgttgggcagtaccagatggcacagctggagaagaatcctaactatagcctgaagaatcaggtattctacaggcaggactatatggatgaattcgaaacggtatgggaatgtcaggccaagtctcatccggagctgactccttcgctcaagcatcagctcagagacatcattattttctatcagcgtccgcttaaaagccagaaagggcttgtcagtgtatgcgaactggagggaaggcaggtggaaatagaagcggacgggaagaaaaagacaaggaccatagggcctaaggtctgtccaaaatcatccccattgttccaggagttcaagatttggcagatattgaacaatgttacggtagacaggagataccttacacaggaggaaaaggaaaaactttacgacaggctgtgcacctgcgacaagctttcaaaatcagaaatactgaaatacataagtccagagcctgaacctgtccgtcagccagattcgctgttttctgatgatgaaatgtatgattctgatgcaattgtgcgtaatgttggcaataaaaaagaaatcaagcttaactataaggagctggagggcaacaggacaatggcggctttgctcaagtcatacgcgaaaatcatcatgctgaccggccatgatgagtacgatttcagtaaaatgcctttttcagagtccgttggcatcatttcggatatctttatcgctcttggctgcaggactgattttctgtattttgattcatctcttgaaggtagggcatttgaagagcaggcatcatatagactgtggcatctcctatattcttacgagggtgacaaatctgtttctggtaatgagaaacttattgacaagatatcggaaatcaccggatttgaaccggaatatgcaaagattcttgcaaatgtcacttttgcacctgactatggtagcttgagtgcaaaggcgatgaagaaaatcctgccttatatgaaagaggggaacacttacagccttgcatgcgaatatgcaggatataggcattcaagacgctcccttactaaagaggaacttgaaaataaggaatataaggacaggctggaacctcttcctaagaacagcctgaggaatcctgtagtcgaaaagattctcaatcagatggtcaatgtggtaaatggagtcattgacgaatatggtaagccggatgaaataaggattgaacttgcacgtgaactgaaaaagagtgcgaaggagagggaagagatgacagctgccatatccgcatcatctgccgaaaacagtaaaattcggaatgaattgataaatgagttcggtatggagaatccgagccataatgatgtcgtcagatataaattgtatcaggaacttagtgaaaacggctacaagacattatataccaatacatatatccctcttgagaaacttttctcgaaagaatttgacatcgagcatataattcctcaggcaaggaggtttgacgattcgtttgcaaacaagactctggaggcacgtcaggcgaatatagaaaaggggagttccacggcgtttgattatgttaaaggcaaatatggagaggcaggggctgaagactatcgttcgcgtgtagatgttcttctggaaaaaggcaagataagcaggactaaatggaggaatctgcttatgacagagcctgaaatacctgacggatttatagacagagatttgcgtgattctcagtatattgcaaagaaagcccgtgaaattctggagagtatcgtccgagatgtagttcctacaacaggttccgttacggacaggcttcgtgaagactggcagcttgtggatgtgatgaaggagctgaactggaaaaagtatgacaggcttggaatgacggaggcttatcaggacaaggatggaaggactataaggaaaatcaaggactggacaaagcgcaacgaccataggcatcatgcaatggatgcgctgactatagcctttacgaaacgtgcctatatccagtatctgaataacctgaacgcgcgtattggcaagagtgcagatgaggcaccgctcattgatttgagtgattatgccttgaaggatattccgaaatctgaaatgacaagagttgtgcgtgccattgagaggatctgtctttatagggacaataaaggtaaactgcgcttctgtccgcctgttccgcttgatgaattcagggcagaggcaaaacgtcagcttgaaaatatccttgtgtcaatcaaggcaaagaataaggttgttacaagaaatctgaacaggactaagaaaaagggtggtctcaacactaaggtccagctgactccgcgagggcagctgcacaacgagactgtatatggaagtatcaggcagtatgtgacaaaagaggagaaagtcggtgcagcatttactcaagagaagattgcgacagtagccaatgcggcttaccgtgaaattttgctggcaagactggcagaattcggaaatgacccgaaaatggcatttaccggaaagaacagccttgaaaagaatccattgtatgttgatgaacttcatacaacttctgtccctataaaggtcaggactgtttctatggaaaccgtatatactatcagaaaggcagtcgcacctgatctgaatgtagataaggtgattgatgctaaggtcaaggaactgttgcagaaacgtcttgaggaatatggcaatgaccctaaaaaggcttttgccaatcttgatgataatccgatctggttgaacaaggagaaaggtatctccataaagcgggtcgcaatccgtggtgtgaacaatgcagagccgcttcatgaaaagcgtgaccataacggcagtcttattatggattgcaacggggataggattccggttgattatgtcaatacaggtaacaatcatcatgttgcaatctatatggattccgatggaaatcttcaggagcaggtggtgtcgttctacgaggcggtggcacgtgtgagtctcggaataccggtaatcgacagggaatatagaaaagatgagggatgggagttcatgttcacgatgaagcagaatgagtattttgttttcccgaaccccgaaaccggatttgaccctaatgagattgaactgatgaatcctgagaactattcgcttataagtccgaatctgtttagggtacagaaatttactaaaggagattatttctttaggcatcatttggaaacaaatgttgaagacaaatctgtcctaaagaatatagtctggaaaaggttgtcaacaaaagctcttaatggaattgtaaaagtacgtatcaaccatatcggacagattgttaatgtaggggagtattaacattaaagtgcagtggatatgagcagcatcaagttttttcaggacaggaaaatccgttccgtgtggaatgatgaggaggagcagtggtatttctctgttgtcgatgtcgttgaggcgctgacagatagcgtagacccgaaacagtatatcaaaaagctgagaatgagggatgaacagcttgatttcaactggggtacaatttgtaccccagttgaaatggttgctatggacggaaaacggagaaaaatacaagcagccaatatcaagggtcttttccgtatagtgcagtcaataccgtcaccaaaagcagagccgttcaagttgtggctggcacaagtggggtatgacagggttatggaaaatgaggcatacttttgaaaagaaccgtaaaataagcattttgttatgattaaacgcacattatatttcggaaatcctgcatatctttccatgaagcttcagcaggtggttataactttgccctctaaagatgccgggtctgagaaaggggaggtcaggactatacccattgaagacatcggtatagtgatacttgatcataggcagataaccataacacaagggcttatggaaatgctgattgataataactgtgcgataataacctgtggaagcaaccatctccccgttggactgatgcttccgctgtatggcaatactgtgcagaacgaacgtttcaggaatcagatcgatgcttccctgccgctgaagaaacagctatggcagcagaccatacaatgtaagattgctaatcaggcagtaatgttgaaatacgcgacaggggaactgcataacaatatgtttatctggtctgaaaatgtccgtagcggagatacagacaatatggaagcccgtgctgccgcttattattggaagactatcttcccggaccggcctgattttaccagggggcgcgaagaggcagagccgaacaatcttctgaactatggttatgcgatattgagagcaattgtggcaagggcattggtggcaagcggactgcttccgactcttggtatacatcatcacaatagatataatgcctattgtcttgccgatgatattatggaaccataccgcccgtatgtggacaggattgtatatgatatcgtctcagaaggagggcctgttgaattgacgaaggaggtaaaggcaaaactgctgtctataccgacaactgaggtacagataaacggaaaacgcagtccgttgatggttgcggtgtctcagaccacggcatcgcttgcgaaatgtttcaacggagaatcaaggaaattggtctatccggaaatgacatagttaaataaggtataatatgaacgacaggttcagtgaatacagaattatgtgggtactcgttttctttgaccttcctacggacacaaagaaagagaggaaggccgcaactgaattcaggaagcagctgcttctggacggatttattatgtttcagttttcaatctacatgcgtcactgtccgagtgtcgagaatgcaaatgtgcatatcaagagggtaaagaacaatcttcctcctctcggacaggtcggaatcctgtcggttacagacaagcagtttggcgcaatggaacttttttccgaaaagaaggcaaaggagcctccaacagaatatatgcagctggagttgttctgagtactgcatatcaaggcggctttgaaattcctttataaaaataaaaaatgcgacagattctgccgcattttttaaattctgataacattacttaaatagttgtgttataaatctttgctcacattctgctgttatcagcgtgtcaaagatataaagtttgaaagcaattcacaactagcggatatgtatccgttattggcaggatgctgttatcagcgtgtcaaagatataaagtttgaaagcaattcacaacatatacgcagtaaatacgacaagggtgtcagctgttatcagcgtgtcaaagatataaagtttgaaagcaattcacaacgaatcgcatcattgacccggattttgaaggctgttatcagcgtgtcaaagatataaagtttgaaagcaattcacaacacagagaaaacttgagcttaagcttatattgctgttatcagcgtgtcaaagatataaagtttgaaagcaattcacaactttgaaatatttcattgcttccgaaatggggctgttatcagcgtgtcaaagatataaagtttgaaagcaattcacaactgtacctgatgctactcttgatagagctatgctgttatcagcgtgtcaaagatataaagtttgaaagca

SEQ ID NO: 2444 - DNA, 9657 bp, synthetic construct
  source 1..9657: mol_type = other DNA
  misc_feature 1..9657: note = Synthetic
aggggcgaaacgacccaaagtacaggcgtcccgacacgtccggcattgaattctgtccgaaaagagggcgaagttcgtggccttgttgttctggtccaatttagcgatgtcaagttcaagcgggataatgctgccgaagaatatttgaattacctcaatcaggagggatattccaatttttatatgagcggcagcgtgagggatttctttatttcaaattccaacggcaagtaccagccgacatttgatgttgctgggccgattactctgaaaggtactcgcgattcgtacggctctcaagtgaacccgaataacatggcggccggtgccgtcaaggctattagcgaagcgatggactcgcttgttgcgagcaatgtagatttttcgccttacgatagcgatggtgatcgggttgttgactttgtctatatgatctatgccggtgtcggctctgcggatacagatgtgcaatctgcgatttggccccattcatacaatgttgcaaagcgtcttacgcgtaacatgtcgatgaaccgttacgcttgctctccagaacttgatggccagtcgtatatgtataatagaaatacgaccgcattgaatggcatcgggacgttctgccatgagtttagccatgtgcttggactccaggaccattacgatgtgcaggtcaacgacacgagaacgaaggtccgttatacgcctggtcaatgggacctgatggatgccgggtcatacaactgcccgcaaaacagatcgtatacgacgtcttgctctcccgcaaacatgtcctcgtttgaacgctttagcttgggctggcttgatccaaggtatctagaaatttcggatacaacatttgttctaaagtcgattcaggaaaatgacgggcttgtgctgacgtctaaaaaagataatgaatattactttgtcgatttccgtttgctgacgggctttgacaaggggcttcccaataagggtgtcttgatttggcatataaactatgaccggtattcatggacgtataatgaagtcaacacatcggacccgatgaaggtggatctgatcgaagccgatggcaaagcggatatgtattcggtatctggtgacgcattcccgacgaatcgagtcaatagctttaacggctttgtgacgtggagcggcgatagcctcgggcttgaagtttatgatatcaagatcgttgatgatcatgtcgaatttaaaactcgggggagccgtaccccgcgcgtgacggtatcttctagttcggcaaaggtttcttcttcgagtgttgctgtctcatcgtcgagtaaaaatgtttcgtcttcgagccggatcgcttcgtcgtcaagccggatcgcttcgtcatcaagtcggattgtttcctcttcaagtcaaatagcgtcgtcctcaagtctttttgaaaagaactcctctattgccgaggccacttcgagttcatcggaaatgatgagcagttcttctgatgcatcctcggttttggaaagctcaaagtctagctcttcgaagggtactattgccttggataaaaagaattcgaccatgccgaatgtccgcatctctgtaatggatggcgttttgatggtgcattccaagattgcaggccgtaagacggtcaaccttttcgatgccaacggaacgcttcttaaaacggaaatgttctatggcgaatcctgtgaaattcgtttgggcgaaattcgcggaaaatcgtttgtcatcgcgacggttgaaaacgaaggacggataataaaatcatataaagttcgaatgaactagaaactggggcgaaagccccttttttacaatatgtcatcctcgccatgataaaatgtcattcccgcctccgagcgggaatctccttttttagaaaatatctaaattgtctaacatgaaaaaacttttcgctagaattgctatgagctgcgcgcttgtcccgtcacttttgacggggacgtctagggccgcagtaaacttgcccgtgcataaggaagtccttgataacgggcttaccgtacttttgtacccgaacaagcaggctccgacagtgagcttccgcctgttttacgtgaccggctccgtccacgaagttcccggcaagtcgggccttgcgcatattctggaacatgaactcttcaagggcacaaagaaggttggcatctccgatagcgttgccgatgtcaggttcatggcgacgcaggattccttgcaggctttgatccgctcggcaagacttgctgacgataccgcccgcgtgaaagagctgactgtagaacacgattccgtgctgaatgagcaccgcaagatttttatcaaggatgaactgtggggcgcctaccaggctgctggcggaacgggtctcaacgcctttacgagcgacttggtcacggcttacaccgtaacgcttcccaagaataaaacggaactctttatgtggctagaatcggaccgcatgcagaacgccgtgttgcgcgagttctattcggaacgctctgttgtccgtgaagaacgccgtatgcgctacgatgaccgcccgacgggccgcttttacgaaacgctgaattccatgatttacgaagcgttcccgtaccgtgtgccgaccatcggctggccaagcgatatcgaaaacctgacacgcgaacaggccgaagagcattaccgcaagtattacaaaccgcgcaatgccatcctcgtgatggctggcgatttggacacgcttgaaacgatgaagcttgtcaaaaagtattttgctccgatcccagctggcgaagcgtttcctccgcttaccgtgcgcgaccccgaacaggctggctaaaagcgtttgaccgtcaagcgcaaggatgccccgaacctttacacgctcgttttcaagactcccgctgtgggcgacagcaccctctacgcacttgacattgccgaaggcgtgttgaacggacgttccggccgcctctacaagcgccttgtcgaagaagaaaaaatcgccgtcggcgtgagcgcaagcaacagcccgaacaagtacatctccgagttttctgtccgcgtgaatctgcgccccgatgccaatcgcgagaaggtcgaaaaaatcgtctgggaagaacttgaaaagttgaaatcgcagcaggtcagcgaacgcgaattccagaaagtcaagaaccgcgcttatgcaggactcgtccgtagcttgaccgatatggaaaatgtcgcgaccatgctcggctggtacgaagtctatggcgattaccgcatcttcctcaactgggctgataatttggacaaggtaaatgtcgctgacgtgcagaacgtcgcaaagaaaacatttgtccgcgaaaagtccattgccggattcctcgtgaaagaataaaaatgagcgacgctaatgcgtcgcttttttgtattatcatactctcttcgaaacatgactgctgcggatatcaaatgcgagtccacaagtgacctctcgcttgatacccttgcatgtcattcccggcttgaccgggaatctccttacaaagcttcgatttcctctttggtgaaccctgtgaattcgatgatttcttctatggaccttttcttcaagagcatcttctttgctattgttttcagcactttcgcatcgtgttttttgaacgcatctgaatcgtgctgctcaatgtagtccagcactacttcgttatcccatctggcgttcttcatcataagatactcctcaagtttgtttcccttcaaattagatatttgagagaccgaagtcaagtgcttgaattttttgttttggagaggaaaaaataaaaaagaggacgatgctttcgcaccgccctaaatgttttcacaacggaataatccttattgtgaattgctttcagattatgcaatgaatatagacaattattttatgctggtcaagagatttgtttgaaaaaatagtgaattgatgctttgaaaaaagaaaaatgagaaaaattttggtttgacaattaatgacattgaaatgaaattatatttatatgaatatactttcgccaaaaaagtagaaaaatgcggaaatttgcgtaaaaacggcttttttgagctggaagaacgtatatttgtaatatcttgttagaaaaagtttggagtaatcctttttatgaagaaaattcttggacttgatttgggcacgaacagcatcggttgggctgtggtgaatgaagctgaaaaagaaggtgaaaagtcttctattgtaaaattgggtgtcagaaccatcagctttgacaattttgtaaatacggtatcgaaaaaagcctgtatggacgccgttgcagattttaatggcgggaaaagcatttcttgcaatgcagggcgaacacaaagccgttctatgcgacgtaatttacagcgttataaattacgtagagatcatctaagaaaactactcaaggaacatggctttattgacgattcgacgattcttgccgaaaaaggaaatggctcaacatttgaaacctatcgattaagagccaaagcagcctctgaagagatttctttaacagaatttgcacgcgtattgttgatgatcaacaaaaagagaggttataagagcaatcgaaaagcaaagtcttctgacgagggcaccttgattgacggtatggctattgctgaaaaactctataatgaaaatttaactcctggtcaacttgtcttttccttgatcaatcaaggtaaacgctacgaacctgaattctatccatctgatttgcaaacggaatttgataaaatttggagttttcaaaaaacattctatccagatctcttgaccgaatccttaaagcaaaatttagaaggaaaaaataaatctgctacatgggctatttgcaaggctccgttcaacattgttggcattaaacgatcaacaaaagggttcgatcagaaaaaagaagattacgaatggcgaacgaaagctctttcagaaaaaatagggttggaggaattagcaatagttcttcaaaatatcaatggtcaaaaaagcggaacaagtagctatcttggaaatattggtgaccgtagtaaggagcttcgaattaatcatttgacggttgggcagttccaaatgaatgaattggccaagaatcccaattatagccttaaaaatcaggttttctatcgtcaagactatttagatgaatttgaggcaatttgggaaacgcaatccaaataccattccgaattaactcctgagttaaagcatgaaatacgtgatatcaccatcttctatcaacgtcctttaaaatcgcagaaaaatttaatcagcatttgtgaattggaaggtcgtaaagttacaagaactattgatggacaaacgaaaaatattttgtcagggccgaaggttataccagcatcatctccgctttttcaagaatttcgcatatggcatgtgctaaacaacttgatgctgacaagcaaggaaactggagaatattgtgctttaaagcaagatgaaaaagagaagttgtttgtcgagttgaatgtaaaagatcaattaagtaaatcagatgcattaaaagtcctgtttaacaaagaatatcgtgattacgatttgaatttcgataagttggaaggtaatcggactcaatcaaaattatttgatgcttaccgtcgtattattgaaatgtgtggttgcggagagttcaacttccaaaagatgtctgcaaaagaaatctttaacaccgtacataaatcattcgaaaaattaaacatcaaaacggactttttgagtttcaattcctctttgtcaactcctgaactcgaaaatgagcctttattcaaactttggcatttattgtattcataccaagatgacaattctcttaccggaaatggatgtcttattgcaaagattgaaaatctttgtaacatggaacgaacttgcgctgccatcctagcaaatgtcacttttgaagacgcttacggaagtctttctgcaaaggccattaaaaagatcttgccttacatgaaacaaggtcaaatgtatagtgaagcttgtgcatctgcaggatacaaacactcaaaacgttctcttactcgcgaggagttggctaataaggtctataaagatcatttagatgtacttccgatgaactcgttaaggaatcctgttgttgaaaaaattttgaaccagatggtaaatgtggtcaattcgattattgacgtttatggaaaaccagatgaagttcgaattgaattagcaagggaattgaagaaaagtgctaaagaacgtgaggaaatgagtaatgctattaagaaaagtaccgctgattatgatgtttttagaaaaactctcataaatgaattcggtttggaacatcctagcaaaaacgacttacttcgctatagattgtataaggaactagaatctaatggattcaaaacgctttattcagacacgtatattcctcaagaaaaattgttcagtaaggaatttgatattgaacatataattccccaagcaaagcgttttgacgactcgtttgctaacaaaacgcttgaaaaaagacaaatcaacatagaaaaaagtaattcaaccgcttatgattttgttctcgctaaatatggagaaaatggtgcagaacaatacaaatctcgtatagacaaaatgtacaatgaaggaatgattagcaaggcaaaatataaaaatttgctaatgcatgaagccgacattccttctggtttcattgaacgtgatttacgcgattctcaatacattgcgaagaaagcgcgcgaaatgcttgaagatgttgtaaaatttgttgtcccaacaacaggtgcaatcacggatcgcctccgtgaagattggcaacttgttgatgttatgcaagaattaaactgggataagtataataaacaaggacttacagaaacctataaagataaagatggtaggactatttataaaatagttgattggacaaaacgtaatgaccaccgtcatcatgcaatggacgctttaactattgcatttactaagcgcagctatattcagtatttgaataatttaaatgctcgtgttcccaaatcagaacaggaatacatagatttggcagattatgatttaagtaatataaaccctgcggatgttaaaagaatcgaggcttctatagaacaaaaagaactttaccggaacgaaaagggcaaactttgtttttttcctcctattccgttggatgaattccgtacacaggcaaaagagcaattggaaaatacccttatctcaattaaggcacgaaataaggttgtaacacgaaatacaaatatcagcaagggtaaaaatggaaagttaaatcagcaacaatctttaacacctcgtggacagttgcacaacgagtccatttacggaagctatcaagctgaaaatgtaaaatcagaaaagattgatgcaaaatttactgcgtttaatggtgatgctaagaaagcgtttacgaggaaaaatgcacttgcaaaatcgcctatttatttggatgaaatgcacacaacaaagattccggaaattgtaacaacgaaatcatacgaaatgacctatactattcgtaaagctgtttcatcacaaaatttcaaagatgctaaatctattgaaaaagtgattgatggaaaaataaagcaaatattacttgatcgtttagctgagtacgataacgatgcaaagaaagcctttgacaatttaatggataaccctatttggctgaataaggaaaaaggaatttctattaagagtgttactattcgtgctgtaaacaatgctgttgcgctgcacaatgggcatgacttcgtaaatacaagcaataatcatcatgttgctgttttccgcgatgcaaaaggcgatttgcaagaacatgtcgtttcgttctatgaagcgacgctacgggcgacaaagggattaccaatcattgacaaagaatacaacaaggagctaggatggcaatttctgttcacaatgaaacaaaatgagtttttcgttttcccgaatcacgagaccagtttcgacccacaaaaggtagatttgctagattcaaagaacaatgcattgattagtccgaacttgtttagagtacaaaagtttacaaccaaagactatttctttaggcatcatcaagaatcgatgctaaacgacaacaaaaagcttttgggaataacgtggaaacgtggtggtttaagtttattaaacggcattgtaaaggttcgtgtaaatcatattggacaaattgtttcagtaggtgagtattgattaaacggacactgtattttgggagtcaggcttatttaagcctgaaggacaaccagcttgtcgtcaaaaagcgtgagggcgatatcgtcactgctgctattgaagacattgcatacattgtccttgattcgccccaaattacagtgactaatgcgttactcggaaccctacttgaaaataattgtgcaataatcaactgcgacaagactcatttgccgtcaggattgctgcttcctctttcgggaaatactttacaaagtgaacgttttcaagctcaaatagaagcgtcgttgcctttgaaaaaacaattgtggcagcaaacggtccaacagaaaattttaaaccaagctgcaattttaaaaagtgcaagaaatgtagaaattggcaacatgactgcttgggcgaattccgtgcgaagtggagatgcggataatcgcgaagctgttgctgctgcttattattggaaagagatttttcctgaaattccggattttgttcgtgaccgcaatggcgtaccgccgaataatatgttgaattatggttatgctatattgcgtggcgttgttgctagagctttggtttcaagtggtttattgcccacattaggtattcatcaccataatcgttacaatgcttattgtttggctgatgatattatggaaccttatcgtcctgttgtagataaattagttttagaaattttggcggaaattgacgaatgtcctacagatctttctactgaaataaaagcaaagcttttaagtattcctgtacttgattgtgttatagatggaaatcgaagcccgttgatgaatgctgtttcgacaactacggcttcgcttgctaagtgctatttaggaacgacaaggaaattgctctatccggaggtgtaggatggatcgatttagcgagtacagaattatgtggatcatgtgtttctttgatttgccgacggaaactaaaattgagcggcagcgacacagtgaatttcgtaaaaatctgttgaaagatggattctcgagattccaattgtccatatacattcgacattgtgcttctgtggaaaatgcggaggttcatattgctcgtgtaaagagctttatgccacccgatggttcggtgagtattctttgtattacggataagcaatttgggaaaattcaagttttttatggtcgtaaggagaaaccaaagcctaaatcaacgggacaattggagctttttttgtagaaaaaagtggctcaaaaaaagaaaaaatcggctcaaaagggccgattttttctttttgcaatatcttgtctaactcgtttatagctgtatagttacaacaagtcagttgttattgcactagtaaaactagaaaatctgaaagcaattcacaacttata

SEQ ID NO: 2445 - DNA, 9643 bp, synthetic construct
  source 1..9643: mol_type = other DNA
  misc_feature 1..9643: note = Synthetic
aggtagtaaattattgaagaatagcctaatacaaccgatattttctaatggcggtcattagaaaaatagacatgcctaatttctaatgaccgatttgggttaaatcacatttatatgatatttttgcagccaaaaaaacagaaatatggttactgcatcaattataatagtcacgtcgataatttctattgtggcttttccgaaaaacaatccgtttccgcgttgtatggctcgtcccgatttgttgggcatatttatgttcaatccgtattatgtaagccatttcaaagagtactatcgtatgcttgcgtcggggcttgtacacagcggatggtggcatcttctgctcaacatgataaccctttactttgtgggcaatttggttgaggaggcttttgtggggatttatggcgttttgttgggtcggattatctatcttgtcttttatcttcttgccttgattgtctcatcaatttccgacttgatgaaatatcgcgataagttgtcatatagtttttatggggcatcgggtgcagttacggcagttatgtttgcttcagtaattatttttcctaaaataagtttttatttgttctttattccaatccctgttccgggatatgtttacgctctgctttttctgctttactgctgttattgtatggcaagacagaaaatcaactgtttcggaaatgctgttcatttctggggtggactgttcggactgtttttcccgatatttgtttatccgccaatacttgtgcatttaataagtctgttcttgaaatagatttaagtcatacttagttttgccgatagcctttgtgcggcaaaaatcccagtcgtagtttacgccctgtttttcagaacgtaaactacgtttgttatatgccgattgtatcatcgcacatgtgtagtttgttgagtatgatatcaacaaactacacagcggaatcgtttgcgctcgtaaaacgtaaattttcagtgttttaacgcttttttgtaatccaaagaaacttatatttgcaacgtaatcaaaaagataatatcatgagggtacggaaattcattaacagatgtgccaagaaaacggctgttgccgtggcggcactcaccgtggcagcatcggcttcggctcagggctggccggcagcatatggcggcgtaatgcttcagggattctattgggattcgtatgtagacacgcagtggaactatctcgaaaagcaggcagatgagatttcccagtatttcagtcttgtttgggtgccaaacagcggctattgcggctcgggcaacaacatgggatacatgcctcagtattatttcaaccagaattcatcgttcggaagcgaggcagaactgctttcgatgataaatacatacaagtcgaagggcactggcttcattgccgatgtggttataaaccatcgcaacaaccttggcgcaggcggttcgtggactgattttgcggctgagacatacaatggtgttaagtatcagatgcttccttcggatatctgctctgacgatgacaacggtcagactgcagcatgggcatcaggtaacggcatttcgcttagttccaacaaagatacgggcgagggctggagcggttgccgcgacatcgaccataagagtgcgaatgtgaataaggtggtaaaggcatatctcggctatcttcagaatacattaggatatgccggtttccgctacgatatggtgaagggctacagcgcatcgtttactggcgactacaacagtacggttaatgccacatattcggtgggtgagtactgggacggcaatacagcagttgttaagaactggattgacggcacaaaagtgaacggtaccgttcagagtgcggcgttcgattttccgttccgatatacttgtcgcgatgccgtggcttcatcgggctacaactggagcaagctcactggcacttcgcttatttcagaccagaactatcgccgctattcggttactttcgtagagaatcacgacactcaggtgcgctcggctaacgaccagcaagacccaatccgccgcgacacgctcgcccttaacgcttggatgcttgcaatgcccggaacgccttgcgtctttctgaagcattggattgactgcaagcaggagataaaggcgatgattgatgctcgaaaggctgtcggaataaacaatcagagcacttacagcgagtatatttcgcaggcggcaaagtgcatcagaactgttactggcgagaacggtcagctacgcgttatcgttggcgacaagagcaatacgaacattcctaacacgatggttcaggttctcgacggataccactatcgctatctgatgagcaagagcaccgagattgcttgggcagacaaggcttcgggcgattatgaggaggctttcaaggttaagcttgtggctgtctctgctcacgacgatgcacagctcgtttacaccaccgacggcacagagccatcggcaactaacggaacagaggtggcaagcggtacggatattgaaatttcttcgaactgcacgcttaaggttgccctcgttgtagacggaacggtaaagaacgtggcaacgcgcaaatataccgtcactccgtttgtggctcacaaggcaacagtctacttcaagaatcctgactggacatctgtttatttctatgcttgggattcgtcaaacactttgcttggctcatggccgggaacaaagatgaccgacaaggttgttatcgacggcgtggagtggtattacaaggcattcgacgtaaacaagaagggctataccttcaacatcatattcaacaagggcatgggacagcagcagacagtcgatatcggtcctatcagtagtgatgtctattacgagctttcgggcacaaacggcgataagctaacggttaaggaggtaacgacgtctggagcgacatcggtgacacagcctgtcgttaatgacggtttcgagattgcatcggcaaacggccgattagtgattaagagtaacaccagcaaggtagttccagtatatacagcgcaaggcgtattggtaaagaaattgaaagttgagagagggttaaatgattttggtgatatgcagcctggtctgtatataatctctaaccagaaagttgtagtaagttattaaaaagggaaaagttttttacaatgtaattttaagtttttcggaaaaagtatttcaatagtttttatttcatattgggtaaaagagagaatggtgtctgcgtgagcaggcaccgtttttttgtagtaagtcttggatgctgtttaaacccaaatcggtcattagaaattttgccttacataatgttcagataagtatccagagcctataaaatataagccaaaagtgctaatgattgactctgaataattaaaccaacttacattttgctacttattctttctaatgaccgttttgggttaaatggtattttattatgcttaaaatagatatagttgtgatgatataaagaaagcgactcccgaaagagccgctttagatgttttcacaacggaataatccttattgtgatttgcttcaaaattagtgttgcaaatatacaaggtattttttattatccaataaaaatctcagtttttttactatgaatactgaaaatttgatgatgttgcaaaagtctatgcctgtttatttgtcttttctaaatatatttgataatttagcacattattagaatctatattacaataaaaacaaatttatgaagaaaattttaggtcttgaccttggtacaaatagtattggttgggcggtggtgaatgaagctgaaaaagctgacgaacaatcgtctatcgtaaaattgggagttagggtaaatccgctcaccgttgacgaattgacaaattttgaaaagggcaaaagcattacaactaatgccgaccgcactcttaaacgtagtatgcggcgcaatttgcaacgctacaaactacgccgcgaacacctaatagagatattgaaggccaatggctttatttcagatgataccattttgtcggaaaccggcaaccgctcaactttcgagacttatcggcttcgagccaaagcagccagcgatgaaatttcgttggaagaatttgctcgtgtgctgttgatgataaataaaaaacgcggatataagagctgtcgtaaggctaagaatacagaagaaggacaactgatagacggtatggagattgcacaacgtctgtatgatgaaaatctcactccggggcagttatcgttcgagttgcttaatagtggcaaaaaataccttccagatttttatcgctccgacttgcaggcagaatttgacaaggtttggaattttcaaagtcagttttattcatttttgaccaatgatttgaaagatgaattgaagggtaaaaatgaaaaggcgatttgggctatctgcgccccctcaaaagataagaatgctgaaggctctcgattcgtttggcattggaaagaaacagtatctaaatggaacgaagaaactgcctctaatgaaactgttgaagttgataaaactttgacaggcgcaaaacgctcaggaacaactgctgagcagaaaattgaaaactacgagtggcgtagcaaggcattgtccgaaaaactttcgccagagcaacttattgttgtattccaaaaaatcagcggtcaaatatacaatgcgagtggatatttgggcaacatcagcgaccgcagtaaggagttgtattttaaccatcagacggtaggccaataccagatggcacaattggacaagaacccaaactacagcttgaagaatcaggttttctatcgtcaggactatctgaatgagtttgaaaccatttgggaaacacaggctaagtatcacaaagagcttacacccgaactcaaaaaagaaattcgagatgtggttattttctatcaacgtccgctaaaatcgcaaaaaggattgatttcgttctgcgagtttgaaagccgacagattgaaattgaggtcgatggcaagaagaaactgaaaatcatcggctgccgtgtatgccctaagtcgtcgcctttgtttcaagaattcaaaatttggcagaggctgaatgatgtggaagtgtctggtatgattgtaccaaatcaacagcatgatttgtttggatattccaaagattatacatacgggaaacgcagattgcaacaggaagagaaagaaatgttattcgcagagttgaattacaaagaaaaactctcgaaagcagaagtcctaaaattgctcttcccaaaacagaaagatgccgatatgaatttcaaggaactggatggcaatcacacacaaaccgaattgttcaaggcatatcagacaattgctgaaaaaagcggccacgatgtgggagatttgttgaaaaagtcagcaaaagaaatgcagcaaagcatttctgagatttttgccacaatcggtatcaataccgaaatattgtcgttcaattccaatcttgaaggaaaagaatttgagcagcagccgatgtttcgtttgtggcatctgttgtattcgtttgatggcgataattcagccataggcaacgaaaaattgatagaaaagttgcgcgatacctttggctttgaaaaagaatacgctgctgttcttgccaatgtcgttttcaaggaagctggcgattatagtagcttgagcacaaaggctataagaaaaattctgcctcatttgaaagatggcaatgactatagtgtggcatgtgaatatgctggttatcgtcattccaagcaatcgctcacaaaggaggagattcgaaataaagttctgaaagacaagttggaactacttccacgcaacagtttgcgtaatcctgtggttgaaaagattctcaaccagatgatcaatgtggttaattctgttgtcgatacttacggcaaacccgatgaaatccgcattgagttggctcgcgagctaaagaaatcggcaaaggagcgcgaagaactttcaaagtcaatcaacgaaacgacacgtctgcatgaaggtttggtccagaaacttcaaaaagagttcgggctttcgcatgtgagtcgcaacgacattattcgttataaattgtataatgaattggaaagcaacggatacaagacgttgtacaccaatacgtatataccacgcgaaaaactcttcagcaaggaatttgacattgagcacatcattccacaagccaagttgttcgacgattcattctcaaacaaaacattggaagcacgtcaagccaatttggacaaatcgaatactacggctttcgactttgttgccactaagtatggtgatgagttcgccaatggcgagtataagacgcgcattgataagttgctggctgacaaggttatcagtaagactaagcacgacaagttgctgatgaaagaagctgacattccaagcggctttatcaatcgtgacttgcgcgactcgcaatacatagccaagaaagctcgcgagattttggaagaattggtacgctttgttgtaccgacaactggttctataaccgaccgtctgcgcgacgattggcaacttgttgatgttatgcaggaactcaattggaataagtacgaccagttgggcatgacagaaataattgaaggccgtgacggacagcgtatccgtcgcataaaggattggacaaaacgcaacgaccatcgccatcatgctatggacgcacttacgatagcattcaccaaacgttcgttcatccaatatctgaacaatttgaacgctcgtgtgcaaaaaggtgttgacgattggattgacctcgacatggttgagtttgccgacttgagcaaagaggataaaaccaaggcggtttgtgctattgaaaagaaagaactatatcgcgataatcacggcaagttgcgtttcaatccgccaatgccgctcaaggagttccgcgccgaagccaaacgccaacttgaaaacaccttgatttcaatcaaggcgaagaacaaggtggttacacgtaacataaatgtttcgaaaaagaaatctggggcgaataagaaagtccaacttactccacgtgggcaattgcatttggaaacaatttacggcagcagcaaacgatatgaaacaaaagaggaaaaggtaaacgcatcgtttgatgcggaaaagataaaaacggttgcaagcaaacgctaccgtgaggctttgcagtctcgactgaaccaatttgacggtgatgctaaaaaagcatttactggcaaaaatgcattggacaaaaatccgatatggctcaatgctcagcataccgacaaagtgccagaaaaggtcaaaaccgtatcttttgaaacgatatataccatccgcaaagaggtttcgtctgacttgaagttggacaaagttgtagatgtgcgtatccgtaagatattggaagatagattggctgagtatgggggtgatgcaaagaaagccttctcaaatcttgccgaaaatccaatttggctaaacaaagaaaaaggcatagccatcaagcgagtgacgataactggcatcagcaatggcgaacctttgcacgacaaacgtgataaggatggaaatctgattcttgacgaaaagggcaacaaacaaccagtcgattatgtgaatactggcaataaccaccatgtggctatatatcgtaaaccgaaattggacaaaaacggccaaccagcactcgacgcgaatggcgacatcgtatatgaacttgacgagaagatagtttcgttctacgaagctacttcgcgcgccatgcagcatctgcctgtcatcgacaagacttataagcagtcagaaggttggcagtttctgttcacaatgaagcagaacgaatattttgtatttccacgctacgatgccgatggcaatatgacgttcaacccactggaccacgacgaggcatggtttaagaatcccgaaaactatgccgagataagcccaaatctgtttagagtgcagaaaatgacaaacaaagattatttctttaggcatcacttggaaacaacggttcaagacaacgcaaaattgaaaggtattacatggaagcgatttggcttaaatggtattgaaaatatcgtcaaagtccgtgtaaatcatatcggacagattgtttcggttggcgaatactaaaaagtaaataggcaatatttcggttgtgcggattatcgtacaaccgaaattaagtctattaaatatcttttgctaaaagaactaaaaacttgaaatctgctaataccatgataaaaagaactttatattttggcaacccggcatatcttagtctgaaaaacagccaacttgtaatcaagattccagggctcgaaaagagcaatatgcaccagaatttcaaggacgaatttacgaccaccgttcctattgaggacataggagtcgttgtgctcgacagcatgtatctaacaataacatcgggtgttatttctgccttgctcgataacaattgtgccattgttacttgcgattctaagtgtatgcctgttggcttgctgctgccgttggctggcaatacaatacagagcgaacgcttcagaaaacagcttgatgcttctctgcctctgaaaaaacagttgtggcagcagaccatcagggctaaaatctataatcaggcaatgattctcggcaagtacacaaaagccgagactggcaacatgatggcatggaccgaaacggtaagaagtggcgactccgataatctggagggtagggcggcggcttactattggcgcaatgtctttcctgcaattcctaagttcgtaagaggacgcgatgaggcagctccaaataatctgctcaactacggatatgccattcttagggctgtcgtggcaagggctttggtcgagagcggactgcttccgactttcggaatccatcatcacaaccgttacaacgcctattgtctggctgatgatatcatggaaccgtatcgcccttatgtcgatgaaatcgtaatcgggataataaacgaaggcattgattattcaactctgacaagagatttgaaggctcgttttcttgttctgccaacaaccgaggtggtgattggcggaaaacgcagtccgctgatggttgccgtgtcgcagactacatcgtcgctttacaagtgtttcaacggagaagtccgactgatttcttatcccgaaatagttgattgatggatcgtttcagcgaatatcgaattatgtgggtgttggtgtttttcgatttgcctaccgagacgaagaaagaccgcaaggatgcagctctgttccgtaagaatctgatgcaagatggcttcaccatgtttcagttctcgatatatgtgcgtcattgtgctagtgcagaaaatgcagatgttcatgtaaaacgagtcaaatcttttattccaaagtatggtcaggttgggataatgcggataacggacaagcaattttctgccatagagatattttatggccgtaagcctcagaaacctaacagccccggtcagcagttggaactgttttagtgtagaaagagggtgtgtcaaaataggcacatccttttttttatatcaaagccccgactttctcaagccagggcttcgttatgtcgtaaagttttcgtatcttt

SEQ ID NO: 2446 - DNA, 9370 bp, synthetic construct
  misc_feature 1..9370: note = Synthetic
  source 1..9370: mol_type = other DNA
cttcctttttaggattgctaaactatatgcttatccacactaaatatctactgtcccctaaaaaccaatcttattattctattagttttaaaaaaagatgccccgtatcgaaggacgaggcaacctaatgttttcacaacggaataatccttattgtgaattgctttaaattagttgttgcaaagataagtatttataatataataaacaagatttcttgtatgatattttgatattattgttgttttttttacctttacggaataatataaaacaattaatttatttattatatcatgaagaagatattaggattagatttagggtctacaagcataggctgggccttagtaaatgagtgtgaaaatgaagatgaaaaatcctctataataagattaggtgtaagagtaaatcctttgactacagatgaaaaaggaaattttgaaagggggaaggcgattacaaccaattctgatagacaacaaactcatggtgccagaataaaccttcaaagatataagctgcgcagaaagtatctttatgattgtttaaacaaacatggttggataggttctgaaccaatgtatgaagatggacaatcttctacttttgagacctataagttgcgtgcaaaagctgcggaggaggaagtgtcactgcatgagtttgcccgaattctatttatgatgaataagaaacgaggctataaaagtaatcgaaaggctaatgataaagaagatgggaagctttttgatggtatgagcgttgcaaagaaactttatgaagagcatttgacacctgccgaatactcccttcagttgctcaataaaggtaagaggtttacgcctgaatattatcgttctgatcctatagaagaatttgagaagatatggaacgaacagaagaagtattagccagaaatacttacagacgagtttaaacggcagttggaagctaaaacaaagaccagtacgagcaagatattccttggaaaatatggtatttattcagcagatttaaaaggtttggataggaagttgcaacccattaaatggagagttgaagcattgcgacaacaggttgataaagatgtgttagcttttgttattagtgatttgaaaggccagatagctaatacaagtggattgcttggtgctattagtgataggagtaaagaactctatttcaataagcagacaattgggcaatatctatgggcttcattaaaggaaaatccacatgtcagtgtaaagaatcaacctttctatcgtcaagattatatagatgagtttgaaaagatctgggtgacgcaagcaagctttcataaggaactaactccagaattgaagcaagaaatcagagatatcatcattttttatcagcgaccattgaagagtaagaaggggctgatttcagtgtgtgagcttgaacaacgtaaggtaaaagtaactattgatggaaaagaaaaggaaataacgattggcccgaaggttgctcccaaagtcctctcctatgttccaggagtttagaatttggcataatctaaataatatacaacttatagacaatgaaagaaatagtaagcgttctttatatgaagaagagagaaatctattatatgaagagttaagcattagagataggctcagtaaggccgaggctttgagagtgttaggtaagaagaatagacaatgggatcttaattataaggaattagaaggcaatcgaacgcaggctactctcttcagctattataacaaaatcatcatgatgacgggacatgaagaatgtaacatcaaacagctaaaagctccagaaatccgtcattatattaagacgatatttaaaaacttagggtttaacacaggtatattagaattcgattcatcccttaacgggcatgagttggaacaacaacctatgtatcaactttggcatttgttatattcttatgaaagtgataaatctcggacaggtaacgaagcattattgaagaagttggaaactatttttgggttccccagagaatatgccagcgtacttgctgaggtcgcttttgaagatagctacgggaatcttagtgtgaaagcaatacgcgaaatcttaacacatttgcaggctgggttagattatagtcaagcatgtgaggaagccggatataaacattcgcgtcggtcgcttacaaaagaagaattagatgaaaaggaatataaagaaaagttagaactattatcaaagaatagtttacataaccccgttgttgagaagattctcaatcagatgattaatgtaatcaatgcagttattgatgaatatggaaagcccgatgaaataaggatcgaattagctcgtgaacttaagattggagcagcagagcgagagaatatgacacgaagtataagtcaaggtaatgccgagaacaagtgtattcgtgagattcttgaaaaagaatttgctctctcatatattagtcggaatgatatcataaaatataaattgtacgaagaacttaaaccgaatggctataagacactatattctgatacatacatacccaaagataaactcttttcaaaagattttgatatagagcatatcattccgaaagctcgtttgtttgatgattcactttcaaataaaactatcgaagcacgtgatgtaaatatagcaaagagtaataagactgcttttgattttatttctggaaagtatgggcagcaagggatagaggcttataagaagaaactctatattctgttgcagggtggttccattaataaggctaagtacaatagattattaatgaaagaagcagatataccatctgattttattaatcgcgatcttcaaaatactcgatatattacaagaaaggcttatgagttattaagcgatttggttagagttgttaccccgacttcaggagcagtgaccagtcgcctgcgtgaagactggcagttagtcgatattatgaaagaattgaactttgaaaagtatcagaagttaggtttaactgaagttattgaagataaagatggtaggaaaattaagcgaataaaggattggactaaacgcaatgatcatagacatcatgcgatggatgcactgactatcgcctttactaaaccatcattcattcagtatttaaacaatctaaatgcgcgaagcaataaaggggatagtatttatgccatagaaaataaagaacttcatcgtgaagatggaaaactttgtttcaatgctcccttgcctatcaatgagtttcgtgcagaagcgaaaaaacatcttaaagctgtattggtgtctattaaggcaaagaataaagtgatgacgcagaatgtaaataagataaagacaaagcatggagttataaagaaagtacaacttacaccacgtggagaactacataatgctacattctatggaacaaagaaacgccctataataaagatggtcaaagttggggctgcattagatgaagtaacaattaagaaagtaagtagttcttttattcgtaaggcgttgcaggatagactctatgagtataatggtgatgcaaaaaaggcttttacaggaagatattcaatagataagaatcctatttatatagatgaagagcgtaaaaggattgttcctgcattggttaaaacgatagagtgggagatgtatcaccctactcgaaagctgatatcaccagatcttaaaatcgacaaagtaatagataaaggtatacgagatatcttaaaaactcggttggcaaaatttaatggggatgcccagaaagcctttagcaatttagatgaggagcctatttataaggatgaagcaaagaagataattttgaaacgagttagccttgaaggagtttcaagtgtaattccgctacatacactaaaggataggtcaggcatgcctattacgggaaaggatagcgaacctgtattgggtgattatgttcaaacaagtaacaatcaccacgttgctttttatatagatgagaatggtaatctgcaagataatatagtctccttttttgaagctgccgaacgcaaatcacaaggtattcctgttatagataaaaactataatagagataaaggttggcattttctatttacaattaagcaaaacgaatacttcgtttttccaaatgaagttactggatttaatccttcagaagtggatttaatggatgaaactaattatgatattatcagtccaaatctatacagagttcagaaaatgtcgagagttgtatatggaaagagtataattcgagattatgtttttagacatcatttagaaacgactgtagaagcaaatgcaaatcttaaaggacttgcatataaacaattaaagtctttgtcatatttagaaggaatagtcaaagtacgtattaattgcatagggaaaatagttgcagtaggagaatatgattaatacaaatgatttatgataaagaaaacattatgttttagcaatcctgcctatttaagtttaagaaattcacaattggtgattcgtttgcctgaggtagaatgttgtaatgaacttcctgatagtttcaagcagcaaagtgagcgtacaattccaatagaagatattggagttgtactccttaataataagcgaataacaataacattgtccgcattagaagccttgatagaaaataatgctgccgtggttacatgtgatagtaaaaatatgcctaatggacttttgttgtctttatgtgggaatacaacacagaacgaacggttccgtacacaaatagaagcatcactgccacttaagaaacaactctggcaacaaactataaggcaaaaaattaacaatcaagcgaagcttctaaatacatatactaatgcaaaggtgggatgcatgtatgcttgggcagataaggttaggagtggtgatcctgataatatagaagctcgagctgctgcttactattggaaaaatctcttttctgacatccccaattttgtaagaggacgggatggggcacctcctaataatctgcttaactatgggtatgcaatattaagagctgtcgtggcacgctcgttagtggcaagcggcttacttccaactttggggcttcatcatcacaataaatataatgcctattgtcttgcagacgatataatggaaccatatcgtccttatgttgatggattagtgttggatataatgtcatcaaccaatgattatactgagcttacaaaagatattaaaatgaaactcttagagattcctgtacttgatacaatgattggagataaaaagagccctttaatgatagctacacaacagacaacagcttcactttacaagtgttttagtggggaacaaaggaaaatgctttatcctgaattataaaaatcgattagtggatacttatagatttagtcaatataggagtatgtggttgatggtattcttcgatttacctacagatacaaagaaggagcagaaagcagctatgctctttcgtcaaaatctattgaaagatggatttacaatgtttcagttttcgatttatatacgtcattgtggtagtaaagaaaatatggaagtacatattaaaagagtttctacatttattcccacatatggaaaagttggaattatgagtataacagataagcaattcgaagggattaaacttttttatggaagaaaaccgcataagccaaatgctcctggagttcagttagaacttttctaaaaatgaaaaagttccacttctaaaagtggaactttaattctttatacttttttgttttcctaaagtaactcgtattcttctattagtcaatactttatgctacttgagttgtgtttgatagtacaaagatactaattttaaagcaattcacaaccgttttgtctgatggtcatcgtgctaatctgttgtgtttgatagtacaaagatactaattttaaagcaattcacaactatcaccgctatagattgataggaaatgcggttgtgtttgatagtacaaagatactaattttaaagcaattcacaaccttgccgactttcgaaaatagtccttaggggttgtgtttgatagtacaaagatactaattttaaagcaattcacaacaggtcaactcggtgttcttcataatcagcagttgtatctgatagtacaaagatactaatttaaaggtaatccacaatcagaaggggctaataagtttattggtacttatagtgttttcaaatataaagggggttctttttgagtatttcacccataatcttcactcaacaaaacggctgaaagatttgtttttaaagggaaaaattgctggtgattgcttggttgtgtgtttcattcttttatatattttaatatttcatgtgagcttttgtttgcctgttaacctaaaatattgtatctttgcaggcgtagaataaaaaggatagtacatcttttatggtactatacttagtatttaacgggactgagattattggctttttgtttcttatatgtcaaaatcgcgagtatatcatatttattttactcaggttccataaaaaaacaaatatggataaaagaaaaaagatcgtattgttgatttttagtgtttttatgtttttcccaatgtactgctgtgcagcagaacaaacggagaatgcgaatgaagtagattggaatcctgttatcaacgcaatcattcatgttgagagcaaaggaaatagtcgggcaaagagtggttcttctgtaggtgtattgcagataactcccgttttggttgctgagtgtaaccaaatcctgaaaaaacgtaagagcaaaaagcgctttaagttatccgatcgttttagtattgcgaagtcgaaagagatgtttctgttgattcaatcatatcataatccgctgaatgatattgaaaccgcgattagagcatggaatggtggcattcattttagcattaaaaagacgcaacgatactttgaaaaggtaatgagtttactccattaatatggaatataaaaacgactgattgaggataaacaatcagtcgtttttatttttcttgaatttgaatttagtccttttactttccttttgttttctgaacttcctcaactgcttttctaactgagccgtacatcagtagcaatcgcttagcatggtcatagtcaaggcctaattcttcaataatcattcgagtacctctgtcgatgagtttcttatttgtgagttgcatgtttaccatgcggtttcctttcacacggcctaactttatcatgatacttgttgaaatcatgttcagaatcatcttttgtcctgtgcctgatttcattcttgaacttcccgtaacaaactctggtcctacaaccatttctatggggatgtcacacgcttcggccatgggcgaatctggattacttgtgatacagcctgtaagaatacctttttcacgagcttgtttcaatgcccctacaacataaggagtagtccctgatgctgcaattcctaccactgtgtcgagtttattgatatgataagcttccagttcttcccatcctcggtattcatcatcctctgcattttcaactgcattgcgtagtgcggtgtcaccacccgcaattaatccaatgatatgcgtaggcgaaacaccgaatgtgggtggtatttctgaagcatcaagcacacctaaccgaccgcttgttccggcacccatatagaataaccgacctcccttctgcatccgtgggactacggcttcaaccagtttctcaatctgtgggattgctgcttcaacagcaagtgccacctttttgtcctcttggttgatgtcaactaataattcgtggacactctttttctctaaattgtcatagagagacggctgttctgaaatctttatgaatgccataagctttatactttagtagtgtgataggcaataagtccttccattggcgcctgaattgtcttgccaatggtcatgtgttctgcttctaaggcctctttcaaaggttgctgaaaataatatgcaatagagccaacaaagcctatgggcaggtgttcccatccctgatattgcttcacattgcgaactaaaaagcgacggaagttctcctttaccaaatcaaaaatggctttgttttcaatgtgtttagccaggaaaggaacgaaacttgccaagaaacgattagggaatttctgccgatacacatggtcaatgatatcggcattgctaagtccatattctgcatgaaaggcttcgacaatgtctttcggcaattgattcttcagtacatcgcccactaatgtccttcccaatacagccccactgccttcatcccctaagataaagcctaatggagaaacgttctttgtgatgtcttttccatcataagcgcatgaattactccctgtacccatgatgcaggcaatgcctggttgatgaccacataggcctcgtgctgctgccaacatgtctgtagccacctcacaagctcccgtgatttcaaattgcttttttaatgcttcagccactattgggcttttctctttcgtgcaaccagcaccatagaaatagacagagtcaagacgtgttgttggcaaatggggcactaagtgtgttgccaattcatttgctatctcttctgaactctggaagaacggattgattcctgccgttcttacctttgtcacactattcttttggtccaccaaacaccaatcggtcttggttgaaccgctatcagctaaaagtatcataatttgataaatatttgttttttgtatagataatagccgctactccatgtgaggaatacgaacaataacgcccaagtcagtgcagcattttgtgttcctatgcatggctgtagcatgtcggtgaatacccacgcctgtatcggtttaccacaaataggtacgattgataatggaatcagcaacaagtctgcccatacataaagtgctaatggatttacaccaaagactctaaagaaggtaatagcactgcttttgtggccttctttgtcgatgacccagcttagcatggctaatgttgttgaagccaagccgcaagtaaccagtgcgaaagttggggtccaaagtttcttgctgattgggcaaccatagcttaaaaggaagcctgcaaatgtcagtaatgcaccaaaaaggaagagcttttcaatcttttcattgattgatgtagcagacattaaactccgtccaacgtagaatcctatcaacacatgacctaaagcaggaaggttactcagtaatccttcggggtcgggaatatcccattgatacaaatgttgacgtccgaaaacagcctcatctataacattgcagatgttcgatgcatcgtgggcaaatcc

SEQ ID NO: 2447 - DNA, 9353 bp, synthetic construct
  source 1..9353: mol_type = other DNA
  misc_feature 1..9353: note = Synthetic
gcctgtacccgtccctgaggccgggcggaagcactgtccagaaagccgtccacgacagccttcaacgtatccgcatcagacggataaaactgtccggccaccgccggagaatgaaccttagtcataatcccaaaaccgattaagcaaaacaataacttcaacatcgctcacaaatgtacacagaagcagagagcaatgcaaatgaacttgctcaatatgcaccgccatgacactacaacattatgcgacgcaaccagtatacgaaaagtaagaccaaaacataagcacacacactaaagtctgtgaatgccataccggaaatgacacgctcaagttaactcaacgacattttatcgagcaggaaacacttcagttaaccagattattgtcaaggatatacatttcggtttctaccaattacacaaaaggcgaaccgcaaggcccgccttaaatgttttcacaacggaataatccttattgtgaattgcttcaaacttgtaggcaaatatactctatttttcataaaatgacaattttttcttaaatttgaagcaataatcaataatttgcatacactatgaaaaagattctcggcctggacctcggcgtttccagcatcggatgggcattagtcaatgaagcagagaataaagacgagaaatcgtctatcatacgacttggagtccgagtcaatcccctgaccgtggatgaaaaggggaatttcgaaaccggcaagtcaattacaactaatgccgaccgcacactgaaacgcagtatgcgccgcaatctgcaaagatacaaactgcgcagagccgcactcatcgacagccttaagtcatatggatggatcaaagaggacagcattcttgttgaatccggaaaggacactacattccagaccctgagactgcgggccaaagccgctgaggaagagatttcactggaggaactggccagagtattccttattatcaacaagaagcgcggttataaaagctcacgcaaattgaataaggacgagaatcctgatgagggcagtgcaatagacgatatggagaccgcacggattctcaatcaggagggcatcactccgggagaatattcctaccggctcttgtgtaatggtaaggaggacaagaatctaccaaagttctacaaatctgacttggaaaacgagttcgagcatatatgggagttccagaaacgcttctacccggacataatgactgacaccttgaaagaaaaccttagaggcaagaacgagaaacagacatgggccatttgtgaaaagcctttcagcattgccggtataaaacgcacgacaaaaggcaaagagctgataaaagagaattatctatggagaagccaggctgttaaagagcaattgaatctggagcagctcgcagtagtcctgcagaaggtaaatgcacagctcaaaaactccgacagttatctgggaaaaatcagtgaccgaagcaaggaactttatttcagacaccggacagtcggacaatatcaattggagcaattgcttgaaaatccgcactgcagcctgaaaaaccaagttttctacaggcaggactatatggaggaatttgacaggatatgggagacccaatccagattccacccggaaatgactcctgataaaaaaaagatcggaattatccactttagtcttgcataattgagatgttcttcgtatctttgtagcataaaagataagagatatgaactacttcgagtttacaaagaaatttccagacgagaatagcgctatagatttcatcgttgccactaagtacaaagatggatatgtatgtcccaaatgtggctgcatccacaaaggcatatatcatcaaaagtacaatcaccgtttcctgtattgtaataactgcaaatcggagttttcagcattgaaaggaacgatattcgagaacacacatcttgacttgcgtatgtggttatatgcgatgaatcttgttatcatagctcgcaaaggaatatcagctttgcaattaaaaagggagttgggaatggggtcttaccagtctgcatggcgtatgctgcatcaaatccgtaaagctatggagaaagaggaatacaaagagacatttgaagccatagtggaaatagacgagacttatgtaggtggtaaacctcgtaaggacaacaatcattctgacgataataaagacaatgaaaacgagaataggcctaaaagaggacgtggcacttccaagacgcccgtaattggcgtgaaagaacgcaatacaggtaaggtacatgccgttgttgctaattataatgaggacgggaaacaattaagcggtaagcaacttttcagcgtgcttaaaaaggtatgtaagaaaaataccaccgtgatgaccgaccaattcgcaggatataatatactcgacaaagaaaatgattgtaactttgtacggttgaagatagaccacaacgtagcgttctcactcggagacggaatacataccaatggtatagaaagtttctgggctgtgttgaaacgtggcgtttatggtgtattccacaacgtatcggttaagtatatgcagaagtacgtaaatgagttctgttatcgtcttaaccatagagataataatgaggcatttgcctcacttgtaaaattcgcagttgcataaactcatgagcaaaattaacaataatttacaaactgggggggggtaaaagtgagactgttactgaaaacatattcagagagttttacggtaatgacgcattcattgaaaaatctgctataccttctcattatggatttaagtctaagaacaaaacacaatataaaggttatccagatttctttagagataacgaagatgaggattttgtaattgtagtagaagcaaaatctgatgattatgaatctgcttgtgaagaagttgaattttatgcaaaggtcaataagatagataaagatattcttgcaatcgcaatatctgggcagacaatagatacgtataggtcctcattgtttataaaatttaatggtgggaaatacaaggagatagacactaatggaaaattgctcccacttgaatctttaagaaagatatataagaaagaaaaaataggagattgcatatccgatgagaaattgcataccattctttcagaattaaataacacgtttcatgagccaatgaaaataaaagatacagaacgtagtctattttttgctggtcttatgatagcacttaaagatactaactttaggataacatacagaaatatacaagcacctacaaaagaacagcaagatacttcaaaatacaaacttatagaatctcacaatttgaataaagctataatagaagctattgttaatcaaataaacaatagagtgaatagctattcaaaggaaataaattggaaggggcaatttgcttttattttagacatagattatggattgaaatcatacaaagaactcatattaaaaattgagaaaaacatatttatcccttttgaatttgatgaaaaacaagacatattagggaaagcgtataaaattttcctttcaagagcagggaaaatagacaataaaaacataattttaactccagaccatataaaacatctaatggtaaggcttgcaagattaagtgtagatgatgttgtccttgatacttgcacaggaacaggaggctttttgatggaagcaatggaagttatgtctaaacttgccaagggaaacgataaactaatagaacgcatacacagacatcaattatacggttttgagatagacaggacgctatttgcccttgcttgttccaatatgttcttgcacggagatgggcgaagtaatatgatattcggtaatagcttgattgaagttggttctgaaatatatagtgaatttaagcgaacatacaaaccgagaaaatgtattataaatccgccgtatgaaaaaaatttgcctatacagtttgtatataaagcattagagctgttagagccaaatggaaaactaataatcgttatgccaagtataacattaaataaaaatgttggaaatggtactgaagatgtattaaagattgcacgtttggactttgtaataaaactacctctatctacattcagagaacaaggtagaacagtatatacatctatatttgggttcactaaagatagcggcggccatcgaaaagatgaccgagtgcttttttatgatttggcagatgatggtcttgttagtgtacagcataaaggtcgtgtagataaatacagtagatggaacgcaatagaagatacaatatatgacgctattaattcatcaaaagaaatatctgatgtttgcgaaaaaagacttatatataatggtgatactttaataccttatggatttgttgagcataaaggacaaaaaaattattatcctatttcaacgctcttcactatacaaacaggtgaattacaatcagaggatggcgatgaagatggtgaatatgattttattacagcttctgaaaaatggaagaagcacaatatgtatcaaatggaaggagaagctataatatacgcaaataattctgaaggttcacttggaagatgccattatgtgaatgggaaatttatggcaagtacgttatgtctaatccttcaagaaaaaaatcatctacaatttccgttagatatggaatattattccttttattttatgtcaataagaaagcagataacaagtcgcttaaaagacgggacatcaaaactttcaattagtcaagaaaaattcaagaattatctaattgaatacatcccaatacaagaacagcggaagagaaaggaaattataaagcaaaggaaaatggaattagaagaattaaagagaaaagaaaaatcattagaagaaaacttgtactatttgtgaaaaaagtagggcgaaatgccctactttccatatattttcatatctttgtgatatacagtataaacaagactaaagtggataattccgaaaaagattatcagagatatcatcatattttaccaaagaccgttaaagagtcagaagagccttatttcttactgtgagtttgagaaaggaaggaaagtgtgtccaaaatcctctcccgtatttcaggaattcaaaatatggcagatgctcaataacctcaaagttgacggggaatatcttgatttagaatataaacagttgttattcagggaactgagcatacggaaagagctgagtaaggccgacacattgaaactgctcttcggtaagcccaaaggccatgagatgaatttccgaaaactggaaggcaacaggacccaagcgaccctgttccaggcatattccaagattctcttactttcgggacatgatgagattgatttttccaagagcgctgacgaaatcatagacaagaccgcagctgtattctctgcccttgacatcagtacagacatcctggcctttgattcatccaagtccggaaaaggaatggaaaacgagccattgtacagactatggcatctcatgtattcctacaccgaggacaactctaaaacaggttatgattccttagtcagcaaacttcatgaagaattcggtttcactcctgaatatggaaagattctcgcatccgttacttttgaggatgactatggcagtctcagcactaaagcaatatgcaggattctgccatttatgaaaaacggcatggaatacagcgcggcatgtactgaggccggctacagacattcgcaaagatcactgacaaaagatgaaatagaaaacaaggaatacaaggacaggctggatattctgcctaaaaattcattgagaaatcccgttgtagagaaaatcctcaaccagatgatcaacgtcataaacggggtcatcgatacttacggaaagcctgatgaaatccgcatagagctggccagagaactgaaaaagaatgcagcagagcgtcagaaagcgattgatgccatcaacaaatccacaaaagagaacaaagagatagaggaaatacttaaacgggatttcggcatggcccacgtatcccgcaacagtattatacggtacaaactttacatggaactgaaagataatggcttcaagactctttacagcaacacttatattccacgtgaggatttgttcagcaaacgttttgacatcgagcacataatcccccagtcaaggctgttcgatgactcattcgccaacaagactctggaaagcaaggacatcaatatcacaaaaggcgatatgacagctatagacttcgtagctgacaaatacggacaggaaggagttgaaagatataaatccactgtcgatatgctctttggcaaaggggcaatcagcaagacaaaataccacaatctgcttagaacccagaacgacatcccggagaatttcatccaaagagacctgcgggacactcaatatatctccaggaaagccctggagatattaggcgacatcgttaaatccgtcgttgctacttcaggagagataacagcaagattacgcgaggactgggggctggttgacgtcatgaaggagctgaattgggacaaatacgacaaatcgggaatgaccgagtattacaacgactctgacggccgcataatcagccggatcaaggactggacaaaacggaacgaccaccgccaccacgctatggatgccctgaccgttgcttttacgaaaaggagtattatccagtacctcaataccctgaatgccaaagacaaagagcaacagcaggaaatcacctcaaaaggcaggttgctgcctcctatgccttttgacgagctcaggtacgaaaccaaaaagcatttggacgatatccttgtatcaatcaaggccaagaacaaggtagtaacccgcaataccaataagacaaaaagtaaaggcggatataaagaaaaaatccaactgacccccaggggccagcttcacaacgaaaccgtttacggagagatactgcaatatgactgcaaagatgaaaaggttgggagcaactttgatgcggacaaaatagccacagtagcatgcgaacgattccgcaacgcactctatcaacgactcgcacaatatggaggaaatccgaaaaaggctttctccggctctaacagcctggagaaaaatcctcttttcacagacatactgcacagtgaggaagttcctcaaaaagtaaaaacagtcaggctcattccagtctacacaatacgtaaacaaattgatccctctctcaaaatcgaaaaagtcatagactgtcatatcaggcagattctatacaacaggctggaagaatatggaaatgaccctaagaaagcattttccaacctggatgagaatccaatatggctgaacaaagaaaaagggatacaaatcaaacgggtcactatcagcggccccgcaaatgtatacgcattacacgacaaacacgatatgtccggaatcccgatactgagcagtcggggagaacccataccgtccgacttcgtcagcctgagcaacaatcatcacatcgcaatatacatggactccgacggcaatctgcaggagcagccggtaccgttcatggaggcagttgcaagggtcagcttaggagacccgatcatcgacaagacctacagggtcaaggatggctggaagttcctgttctccatgaagcagaacgagtatttcgtatttccgaataatgagaccggcttcgaccccaacaccatagatctgcttaatcctactaattaccatacaatcagtcagaacctttacagagtacaagcattatctactaaagactactggtttagacatcatctggagaccagtattgttgacaacaatgacctaaaggacattacatggaaaagaattagaaacacaaataaccttaaaggtatagtcaaagtacgcatagaccacttgggcaacatcgtccagacaggagaatactgatatgataaagcgcacactgtatttcggcaatccagcatatctgtccctcaaactggagcagctggtagtgagaatgcccgacagtcaggacaacatggagactgtcaggaccattcccattgaggatatcggcattctcatcctcgaccataagcagattaccataacgcaaggtctcatagagaaactgctggactgcaactgcgccttaatcacctgttcatccaaccatctgccggtaggtctgatgctgccgctatacggcaataccatacagaatgagcgtttccgataccaactggatgcatccctacccctccgcaaacaactatggcagcagactgttcaggcgaaaatagccaatcaggccgcagtcctcaaatatgccaccagctccattcacaacaacatgcaggtctgggccacagatgtccgcagcggagactcggccaacatggaagcaagggctgccgcatactattggaaaacactgttccaggacatcgatggatttgtcaggggcagggacgaggacgagcccaacaacctgctcaactacggatacgccatagtccgtgctgtcattgcccgcgcattggtttccagcggcctgctgccgacactcggaatccatcaccacaaccgctacaacgcctactgccttgcagacgacatcatggagccataccgtccttacgttgacagaactgtgtttgacatctgccgcaaaggcaagcctctgaaactcacgactgagctcaagcgggaactactttccattccaacaattgatgtcatcatcaacgacaaacgcagcccgctgatggtggctgccactacgacaacggcttccttggtaaagtgttttacaggggaaatgagaaaaatctcatatcctatcatgacttaagccaatatgaatgaacggataagcgaatatagagtcatgtgggtactggtctttttcgatttgccgactgacacgaagaaagaacgtaaagcggcggctgaattcaggaaacaactgattaaggacggcttcatcatgttccagttctcaatctatatgcgccattgtccaagtgcagaaaacgcaaaagtccatgtccgtagagtgaaatcaattcttccgccgttgggtcaggttggaattctatccataaccgacaaacaattcggggcaatggagcttttctcagaaaagaaggagcggcaaccacccattgactatcttcaactggaactcttttaatgccgaaagtgcaaacaaaaaatccggcatcactgccggatttttaattctgcaaacacctcgtaaatacctattgttgtgttcattactgacattctgctgtttgcagtccgtcaaagatactaagtt

SEQ ID NO: 2448 - DNA, 8991 bp, synthetic construct
  source 1..8991: mol_type = other DNA
  misc_feature 1..8991: note = Synthetic
ttgggatcgctcgtgttgggatcgctcgtgttgggatcgctcgtgttgggatcgctcgtgttgggatcgcgctaaatcatgccgataaggggcgtttttcgcgttggtgtcggcggtggcgattgtttctgtgctgtttgtgtggcctatgtggcttgtttggcggatggggaatggttcagcccttgtatgccgcgcaactgctcgtgccgatggatcaggcgcagaccaaccacctcaaggcttacggcgtggcctactgggtgttgcagtatggcggcgaaatcagttggctgctcaattatcggggcggcagtttccttttaccttacagtgcggaaatagagcgggaatgccgcctgcgggatgtgagcgcggcggtgctttcggacgcgcaggtgcaggccttgcgtggcgagattgcgggggcggacgtgaatatggacgaggtgcctttacagaaggcgccgcgcatcgccgtctattctcccaagaacaaacggccgtgggacgacgccgtgacgatggtgctgacctatgccgaaatcccttatgacgtggtctatgacgatgaggtgatgtcgggcattttgccgatgtacgactggctgcacctgcaccacgaggactttacggggcagttcggcaagttttgggcgcgttaccgccacgaggcctggtatcggcaggacgtggccgagaccttggcgcgggcgcgcaactacggcttcaccaaagcctccgaactcaaactggccgtggcgcacaagatacgcgatttcgtcatgggcggcggcttcctgttcgcgatgtgttccgcgccggacagttacgacgtggccttggcggccgagggcatcgacatctgcgccgagcccttcgacggcgacccgatgacgcccggtgcgcagcaacggttggattacagcaaaaccttcgcctttaccggctttcaactcgtgaccgacccttaccgttatgaagtgtcggacatagacgtgaccgagacgcggccgccccatctcaaggaggagaacgatttcttcacgctcttcgatttttcggccaaatgggactggatgccgacgatgctgtgtcagaaccacgagcggctgatacacggcttcatggggcagagtacggccttccgcaagtcgctcttgaagccgaacgtgctggtgctgggcgagaacgccggcctgaacgaagtgcgctacctgcacggcacctacggcaaaggcacgtggacattcttaggcggccacgaccccgaagactaccagcatttcgtgggcgacccgcccaccgacctgaacctctatcccaactcgccgggctaccggctcatcctgaacaacatcctgttccccgccgccaaaaaagaaaagcagaagacgtaagggggtatttgatagatattcgttgtgagcctgagacggcaaaaaaaagccccccgttaaaggacgaggggcaaacctgatgttttcacaacggaataatccttattgtgattcgcttcattttagtgcggcaaagatacgaaaagtcgagcacaatgaaaagcgcaaaccgcaggtttgagttttttttattgtcgagacgcccctatcttcacgcggagcgtaaaagatacgaaaaaaatctgaaatcaaaaggattcaaactttttacgtacatttgaaatctaaaaatgtatgccatgaaaaagattttgggtttagacttaggcacgaacagcatcggctgggcggtagtgaacgaagcggaaaatccgtccgaaaagtccagtatcgttaaattgggtgttagagttaacccattgacggtggatgaactgtctaatttcgagaaagggaaaagtattacgaccaatgcggataggacgttgaaacggagcatgcgtcgtaatttgcaacgatacaaacttcgccgggaagccttggtgaatatcctcaaagaacatgggttcattacggatggaacgttattgtcggaaaacggtaataaaacgacatttgaaacctatcggttaagggcaaaggccgcgacggaacaaatctcattggaggaatttgcccgtgttttgttgatgattaataaaaagcgggggtataaaagcagtcgaaaagccaaagatggcgaagaaggcagtctgatagacggtatggaagttgccaagcgattgtatgatgaaaatcttacacccagccaattgtgtttgcagattctggagtctggaaagaattatcttccggatttttatcgttccgatttgcaggaagaatttgatagaatatggcagtttcagcaaaaattttattcggaaatactaacggacgcagccaaagaagaggtgcgcggtaaaaataagtcacaaacctgggccattttaaataaatattctaaatattcagaagataaaacacttcatttggaaggtttcggttttaagcgtacagccaaaggacgggacttaaaaatagagaatttcaaatggcgggtcaaggccttgtctgaaaagatgacagttgaagagttggttatagttttacaggagataaacgggcaaatcagtgcttcaagcgggtatcttggggcaatcagcgaccgtagcaagcttttgtattttcatcatcagacagtcgggcaatatttgatggaatctttgcgtaaagatcccaataaaagcctacgcaataccgtattttaccgtcaggactatctggatgagttcgaaaccatttgggaaaagcaagcggaatttcatcaggaactgactccggaattgaaaaaggaaattcgcgatacggttatcttttatcagcgacggttaaaaagccaaaaggggctgatttccatatgtgaatttgagaataaggaaatagaaattatcaaagatggtaaggcccgcaagaaagtaatcggttgtaaggttattccgcgttcatccccgttgtttcaggaatttaagatttggcagacactgaatgatatggaagtgctcgtttcgggcgtgaagaggaaacgtccggtaaaaggtgcggagacggtggatgcggatggaatggatttgttggaaacgcaagggcgcagacggcttgaccaggatgaaaaaatgttgttggcggcagaattgtttatacggccggagttgagcaagtctcaagctctgaaacttctatttgataaaccacagggtctggatttgaatttcaaagaaaaaatagatggcaataagacaggggcggttttgtacgaggcttatagtgatatgttggaactgtccggtcatgaaccgcttgattttaagaagccggcggccgacatattcaagcaggcccatgatgtttttacggcattgggttggaatgcggctgttttgaaattcgattatgaacctgcggctacgaataaatcgttggaacaatcgccctatttcaagttgtggcatttgttatattctttcgagggtgacgatacgccgacaggaaacggtaaattggtggagaaaatcatggatttatgccacgtggagaaagagtatgccgctgttttggcgaatgtgtcgtttcaagacgattatggcagtttgagcgctaaggcgatagggaaaatactaccctttcttaaagagggtaatgaatatagtttggcctgtgaatatgccggttatcgtcactctaaatcctctttgacgaaagaagagatggcaagtaaggtattgaaagataaattggacatattacccaagggcagtttgcgtaatccggtcgttgaaaagattctcaatcagatggtcaatgtggtcaatggggttgtggagacctatggccgtccggatgaaatacgggtggaattggcgcgggaattgaaaaagaacgcggccgaacgtgagcagatgaccaaggatatagccagcaatacgaaagcccatgaggccatccggaaattgttgcagacggaatacaatatggcctatgtgagccggaacgacatcattcggtataaactttacgaagagttaaaggataatgggtataagacgctgtattcgaataaatacattccccgagagaaattgttcagcaaggaaatcgatatagagcatatcattccgcaggcccgtttgtttgacgactctttttctaataaaaccttggaatatcgggatgtcaatatcgaaaaagggaataaaacggcacatgattatgtgcaagaaaaatatggggaagagggattggaagcgtataaaaatcgttgtgaaacggtgtttaaagacaagtctgccaaacttaaaaaattgatgatgccggaggatgaaatcccggaaggttttattaacagggatttgcgaaatacacaatatattgcgaaaaaggcattggccatgttgggggagatttcccgtcgggttgtggccacctccggctccgtgacggatgctttgcgtaaggattgggaactgatagatgtgatgaaggaattgaattgggataagtacaaggctttggatttggtagaatatgttacggataaagacggccgtaagattggccatatcaaagactggacaaagcgcaatgatcatcggcatcatgcgatggatgccttgaccgtagcctttacgagagatgtatttattcagtatttcaataataagaatgctagttttgacgaaacgaccaatgcttattcgataaagaaaaagtattttgaaaaggggagggctatcgcaccggtacaaccaatagaggcattcagggctgaagcgaaagaggcattgaacgaaatattgatttccatcaaggccaagaataaagtggttacattgaataccaatcatattaaacagaaaaaaggagagcgtaaagtcattcagcagacaccgcgaggacaattgcacaaggaaacggtgtatggaacctgtcagcaatatgttacgaaagaagaaaaggtcaatgcttcgtttgatgcggaaaagatagcgaccgtcactaaaaaggcttaccgagatgctttgttacgtcggttgcaggaaaatggccaagacccgaaaaaagcgtttacaggcaaaaacgctttggataaaaagccattgtggctggatgaggccaaacaaacggggagagtaccggaaaaggtcaaaaccgtaatattggaaacggtttatacgatacggaaaccggtagatgaaaatttaagtatagataaagtcatagatgtcaagattcggaaaattctgcaaaatcggttggcggagtatgacaatgacgctaaaaaggcttttacgaatttagatgaaaatccgatttggctgaataaggaaaagggaattaagataaatcgggttacgatacgtggagtcagcaatgctcaggctttacatgagaagaaagataaagagggacgtttgattttggatgatgagggtgcgaaaatggcggtagattttgtgaataccggtaacaatcaccatgtggcgatatatcgtcggccgatgttggataaaatcggacaaccggtattggatgaaaacgggcagcctaaatatgagttggaagatcgagtcgtttcgttttatgatgcagtcgcacgggtaaatcaaggtttgccgataatagacaagacctataaacaggatgagggttggcgattcctgttcagcatgaagcagaatgaatattttgtttttcccaatgaaaccacaggttttaatcctaaagaaattgatttgatggatccgaaaaattatgcggctatcagtccgaatttgtttagggtgcagaaatttacatcaggggattatttctttcgccatcatttggaaacgacggttattgataataaagaattgcaaggaatcacatggaaaagaataacatctttggctatcttggataaaattgtaaaagttcgagttaatcatgttggtcaaatcgtttcgataggcgaatattaagcactgaagccatgattaagaaaaccctctatttcggcaatccggtctatctgtcgttgaaaaacgggcagttggtcattaaattgcctgcggtggaagtgaatgatacggtgccggaaacctttaagcggcagtcggaggtgacgaagccgatagaagatttgggggtggtggttcttgataaccgtcagattacgataaccaccggattgatggaggccttgttggccaataattgcgctgttgtcacgtgcgacagccgtagcatgccaacggggctgatgttgccgctcagcggtaatacgacgcaaaacgaacgtttccgttttcagttggatgcatcggttccgcttaccaaacaactttggcaacagaccattaaaatgaagatagaaaatcaggcggcggtcttgaagcattgcgccggggcagaggtgcgttgtctgaaagtctgggcttcggaagtgaaaagcggggattcggataatttggaagggcgggcggccgcttactattggaaaaatctgtttccgggctttacacgcggccgggaaggcgagtcaccgaacaatctgttgaattacggctacgccattttgcgggcggttgtggcccgtagtttggtggccagcggtctgttgcccacattgggaattcatcaccataatcgctataacgcttattgcttggccgatgacattatggaaccctatcggccttatgtggatgaactggtctatgaaattgtgatgagcggtgtggattgcgagaccttgaccaaagacttgaaagcccgtttgctttccattccgactttggatgtggttataggtggcaaacgcagtccgctcatggtcgcggtcggtcagacgaccgcctctctgtacaagtgttttagcggagagttacggcgtatagtttatccggaacgatgatagaacgcatcagcgaataccgcgttatgtggatactggtattgttcgacctgccgacagaaacgaagaaagacaagcgggcttatgtggatttcagaaagaatctgcaaaaggatgggtttacgatgtttcaattctccatttatgtgcgtcattgcgccagcagcgagaatgcagcggtgcatatcaagcgcgtgaagtcgtttttaccggaattcggacatatcggcattatctgtttaacggataaacaattcggtaacatagaactcttctatggcaagaaagcggtgccttcgtcggcccccggtcagcagttggagttgttttgaaaagaagaatcccgccgattggcgggatcttctcctagaaaacagcctggattttcaatcctaatccatgttgtaatttgcagtacatcatatatttgcttatgatgtgctgttttcgcttgcgcaaaattactaaaatgaaagcgaatcacaacagattcagcgcatcaagcgaaagtttatcgctgttttcgcttgcgcaaaattactaaaatgaaagcgaatcacaaccgtctgcgttggctttgttagcctcggcttgctgttttcgcttgcgcaaaattactaaaatgaaagcgaatcacaacttccgcgtatgttgatatgttttcgggatagctgttttcgcttgcgcaaaattactaaaatgaaagcgaatcacaacaccttcggaatttatctctttgatttcggagctgttttcgcttgcgcaaaattactaaaatgaaagcgaatcacaaccttgctgctaaaattgcattccagaattcagctgttttcgcttgcgcaaaattactaaaatgaaagcgaatcacaacagcctgccttatgtaggtcatccggtgtttgctgttttcgcttgcgcaaaattactaaaatgaaagcgaatcacaacattggcttcggatttcatcaactgaacttcgctgttttcgcttgcgcaaaattactaaaatgaaagcgaatcacaactactttctgcaaaacctttcgatgttttcgctgttttcgcttgcgcaaaattactaaaatgaaagcgaatcacaacagattttcataaatccaaaacctgcgacagctgttttcgcttgcgcaaaattactaaaatgaaagcgaatcacaactgtctacaattgtgtacatgggtaatcgtagctgttttcgcttgcgcaaaattactaaaatgaaagcgaatcacaacacttgtccgaaaatgcctttaacgcatcctgctgttttcgcttgcgcaaaattactaaaatgaaagcgaatcacaactcttagcaattcgtaccttttccatccagcgctgttttcgcttgcgcaaaattactaaaatgaaagcgaatcacaacgcccttgaacgagccaaatagcggcccattgctgttttcgcttgcgcaaaattactaaaatgaaagcgaatcacaacaccgtaaccgaagtctccaaacgtctcgttgctgttttcgcttgcgcaaaattactaaaatgaaagcgaatcacaacaccgtaaccgaagtctccaaacgtctcgttgctgttttcgcttgcgcaaaattactaaaatgaaagcgaatcacaaccgtaacccttacatcgaagccctttttgtgctgttttcgcttgcgcaaaattactaaaatgaaagcgaatcacaactagttccgtttgtatccggcggcccgacccgctgttttcgcttgcgcaaaattactaaaatgaaagcgaatcacaaccgtcgccctcgacatttccagcctatttttgctgttttcgcttgcgcaaaattactaaaatgaaagcgaatcacaactattctcacattcagatttttgttgttgagctgttttcgcttgcgcaaaattactaaaatgaaagcgaatcacaactttacgatatagtttttgataatatcccagctgttttcgcttgcgcaaaattactaaaatgaaagcgaatcacaacgctagaacgaatattttgcttttaatcatgctgttttcgcttgcgcaaaattactaaaatgaaagcgaatcacaac

SEQ ID NO: 2449 - DNA, 8858 bp, synthetic construct
  misc_feature 1..8858: note = Synthetic
  variation 5925..6112: note = n is a, c, g, or t
  variation 379..564: note = n is a, c, g, or t
  source 1..8858: mol_type = other DNA
agccactcacccacacttccttaatggttattttgctgaaatcggatgcaaatatacatgaatgttttcaacttttcaaagaaaaaaggctttttcaaaccgaatatttatacttttgtcagtttaggtcggtttattataattacaaacttgatggaacagccaaaaggaaagaaaaaaagaactaacatagtcctgtttatcattggcatcttgttgctaatcactatatctgcaggcatatatatctacaatacaatcttcgaaccattcgatctcaccgaaacagtttacatttacatcgatgaggaaaaggaatatgactatgtggtgagtcagctgaaggaaaaagcagaactgccaaacgaaaaaatctttnnnnnnnnnnnnnnnnnnnnnnnnnnnnnnnnnnnnnnnnnnnnnnnnnnnnnnnnnnnnnnnnnnnnnnnnnnnnnnnnnnnnnnnnnnnnnnnnnnnnnnnnnnnnnnnnnnnnnnnnnnnnnnnnnnnnnnnnnnnnnnnnnnnnnnnnnnnnnnnnnnnnnnnnnnnnnnnnnnnnnnnnnnctatgcctgatgtaatacgactgctgcgctcaggtgtgcaggcgcctgtaaatctaaccttcaacaatatacgcaccaaagaaaaccttgcaggccgcttttccgaccagctgatggccgacagtctctctataataaatgtcctaaacgacactgccgtagcagcaagctatggcttcaacaaccaaacctttggtgccatgtttatccccaacacctacgaagtgtactgggatatgagcatcgggaacctgacagacaggatgaaaagagagtatgatgcattctggaatgaacagcgaaaaagcaaagcagagaagcttggctttacacccgtagaagtatctgtactggcgtccatagtagaagaagaggcaacctataccgacgaatacccaattgtggcaggactctacctgaaccgtttaaagaaaggcatgcgcctcgaagcagaccctacggttaagtatgccgttggcgatcccacacttcgcaggatcctgttcaaacaccttgaggtggagtctccatacaacacatacaagaacgacggcctgccacccggaccaatcaggataccatctataaaagggattgatgccgttttgaatcccgcagatcacaaatacctgtttatgtgtgcaaaagatgacctctcgggccgacacaattttgctgtcactcatgccgagcatgccagaaatgcaagagcttaccagagggcgctgaatcagagggggatatattaaaagatctcctgcctccataatttatccagaaaactcaataccggataaacctcaattttattcaataagcgaggttttttatccatggacacaattataagttttgcatcaggaaactcctccgaaaaagctttaagaccttttgtatgatgagactgcacttcctcagtcgatttaatctctatcgctacttccgcattacctaaaattgcatcaacctcataacctgaagaagtgcgccaataagtaacaccttcaagtggtttgtaataacccaagtaggcaataatctcctgtattatgaaatgctcaaaagcatgtccaaattcaggtgaaccgggatgcatattagttctctttagtagaaaattagcaactccaacatcaaaatagtaaaactttggtgattttataaccctccgctttacttttctagtaaatgctggaattgtataacctataagtgtttcttccaaaatagaaaaatactctttcacggtaggcgaacttacgccacattcagatgcaatattgttatagtttacaatttcaccattgcttaaagctgcaatctccataaatcttgaaaatgtacttaaattacgggtgagcgcttcagcctttatctcttcctgcaagtaatcgccaacataagcatgcagtctatttgtagcatcagccacaagataatgacgaggcaacataccattattacacgccctaactatatcgaaatccggtatttcactactcacaaaaggataaagatatttccttactgccctgccacccaataaatttgctccacttcgacgcattttacgagcgcttgaaccactcaaaacaaaacggagattacgattagttatcagccaatgaacttcatcaagtaatgaaggtattttctgaatttcatcaataatcaccagttcgttttccggaagcaagtttagctcttcacgcagaagagacgggcgacgattatatctctcaaactcatccgactttagtaaatccacatagaaggtatcgggaaaaatcattttaagtaaagtacttttccctgtctgtctggctccccacaggaaaactgaatcattttctacatcactgagattaatttttcttgataacattgtgacaactgatattagcacacattatttacacacaaatatataacaattatatgtaaatataaagtatcactttattttcacatgtatttctaaagcacgactttacttttgcatgaatcaactgataggttcacaataaaaaagcgacccaaagggccgctttaaatgttttcacaacggaataatccttattgtgaattgctttcaaatgcaaatataatgaatagtttcacataaactattattttagttaaatttttatatctttgggcttcaacatactttaaatgtaaaacacgattaaaatgagtaaaacaattttaggtctagaccttggtactaattcgataggatgggcattggtagaagaagctgaaaacattgatgaatcttcaaaaataataaaattgggagtaagagtaaatcctctaacagttgatgaacaaactaactttgaaagaggaaaacctatttcaactaacgctgatagaacattaaaaagaggagctcgtcggaatttacaacgatataaatcaagacgtgaaaacttgattgaaatattagttaaaaatggaataatcacaaaaaatacgccattaactgaaataggcaaaaacactactcatcagacattaatgctgagagctaaagcagcacataataaagttgatttagtagattttgcaaaggtcctcttaactataaataaaaaaagaggctataaaagcagcaggaaatcaaaaagtagcgatgaaggagtggctattgatggaatgacagtagcaaaaattctctatgagaagaaccttacaccaggacaatacgtatatgaaactttaaatggagggaataaatttatacctgacttttatagatccgatctacgcatagagataagcaagatttgggataaacaaacagaattctatccaactcagcttacaaatgaccttttccatgctatagaagataggaacaaaggacaaacttataaaatattagaagtaccctggaacttaaaaggactaaaacaatccggtaaaagagatgaacaaagacttgaaaggtataaatggagacaacaggcattatcagaaaaaatagaacttgaaaaacttgtaattgttttacaggaaatcaatggcgaactcaataattcaagtggatatcttggtgctatatccgatagaagtaagcgtttatactttaacaaaataactgttggagaacacctttataaccaaatagaaaggaaccctcacacatcactaaaaaaccaagtgttctaccgtcaagattacttagatgaatttgaacaggtatgggaaacacaagctaaacactatcctgaaatcttaaccattgaactaaaagaagaaattagagatgtagtaatattctaccaacgtaaactaaaatctcaaaagggacttatcagcttctgccagttcgaaagtaaacaagaggagtacattgacaaaacaaccggaaaaacaaaattcaggacgactggtcaaagggtagcacctaaatcctcccctgtatttcaggagtttaaaatttggcaaaacttaaataatctcacctttgaaaacgaaaaagataatcaaataatagaagtacgcaatctggaagataatatccgtgaagaaatctttaacgagttaaattttaaaggtagcttagcacctaaagatgttctaaaagtaatttctaaacatatcttcataaataaagcatctgattggacttgtaattttgaaaaaattgaaggtaatactacaaataaagcccttctggaagtatatcaaaaaattgcagaagccgaaggatatggatttgactgggacaaaaaatctgcaaaagatattaatgaagaaatagaagcaatattcggagagataggagttaataaagagatcttaaaatttgactcaaacagggatgattttgataagcaaccctcgtaccaattatggcacttattatactcagcagaagatggaggtaaagtaaacgaagaagaccgcttattatatggaaacaatgacacaaagctacgtaaaacactgcataccaaatatggatttaagcctgaatatgcaacaatgctttcaaacattacaatgcaaccagactatggcaatctatcaagtagagcaatgcgcaaaatcaccccatatttgcaagcaggacatccttatgccaaaagcagtgacaacaaagacgaagcaggtgcatgcgatttagcaggctataaccactccaaaagtgaaactgtcgaagatttgaagaataagatattaaaagataagcttgaaatattgccaaaaaacagtctcaggaatccggtggttgagaaaattctcaatcaaatggtaaacttagtaaatcaagtcatcgatgaattcggaaaaccagacgaagtaagaattgagcttgctcgagaactaaaaaaaaccgcagacgaacgcgagagaatgagtaaagacattgctgaagctactaagcgcaatgaagagatcaaaaacctaataattaaagaatttggaatccccaaccctacaaaaggcgatatagtcagatttagattatgggatgagttaagttcaagaggtcataaaaccatcttcactgaattatatattcctaaagaaaaactattttcaaaagacattgaaatagaacatatcattccgcaagcacttctgtttgatgactcctattcaaataaaactttggcatatcactctgaaaatttacaaaaacgaaatcgaactgcttacgactttattaaccaggactataaccaatacacgacagaattcgaaaatagagttgatgtatggtataataataaatccatctcaaaagccaaaagaaataagctactaatgacctatgcagatattcctgatggctttatagagcgcgacctgaggaatacgcaatacattgcaaaaaaagcaagagaaatgctattggaagcattcaaaacagttatcccgacaacaggaagcataacagaaaaattgcgtgaagactgggggttaataaacctaatgaaagaattaaatctgccaaaatacaaagcattaggactaactgaaacagaagaacgattcgatattggttctgagaaaataaaaaaagtggaagttataaaagactggaccaaacgaaacgatcaccggcatcatgctgtagatgcactgactgttgcttttaccactcacaaccacattcagtatattaataacttaaatgccagaagaaacactaatcacaagaaacataacataatacatgccatagaaaatgttataacagaaaggattaatggcaaacctatatttaaggagccaattcctaacatgagagatgttgccagaaaagagattgagtcaatccttgtttcatttaaggctaaaaacaaagtaacaacaaataatatcaacgaaacaaaacttgcnnnnnnnnnnnnnnnnnnnnnnnnnnnnnnnnnnnnnnnnnnnnnnnnnnnnnnnnnnnnnnnnnnnnnnnnnnnnnnnnnnnnnnnnnnnnnnnnnnnnnnnnnnnnnnnnnnnnnnnnnnnnnnnnnnnnnnnnnnnnnnnnnnnnnnnnnnnnnnnnnnnnnnnnnnnnnnnnnnnnnnnnnnnnaaactcaataacaagtttaatatggatgtagctaattttataattaataaaaaagaacgtgacgcagttatcttgcatctttcaaaatatggaaataattgtgaagtcgcttttgcatcaaaaacgttgaagaacaatcctattttattaaacggagaaactcttaaagaagtgagatgctttgaggaaatatttactattcgcaaacccatagcacctgatttaaaacttgataaagttatcgatgaaggcgtcaggaatgtattagaggaaagactaaatgaatttaatagtaatcctaaagaagctttctctaatttagaagagaatcctatttggttgaacaaggaaaaagggatatcgataaaaaatgtcacaataacaggtgtgaacaatgctacacctctccattacaaaaaggaccatcatggaaaagaggtcgtgaattgcaaaggtgagaagtctcattgtgactttgtgcaaacaagaaataatcatcatgtagcaatatataaagacaatgatggaaattttcaagaatcagtaatctctttttatgaagcggttgaacgagctaaccaaggactgccgataattgataaattatttaataatcatctaggctgggaattcctgtttaccatgaagcagaatgaaatgtttatttttccagcagatgattttgaaccaagtgaaatagaccttttaaatcctgaaaatgcgggtgtaattagtaaaaacctatttagagtccaaaaaatcagtacaaattattacaccttcagacatcatcttgaaacaacagtaactaatgatctgaattttacattcaaaagaatacgaacaccaaatagtcttaaaggaattattaaagttcgaattaatcatataggaaaaattgtacatattggtgaattttaatcttaaaacctatgatcaaaaaaactctatactttggtaatcccacctatttaagtttaagcaacaaacaattggtagtaaaaatacccgaagtagagaaaaatgagaatcttactcataagttaaaagaacaatcaaaaagaacaattccaattgaggatattggcgtcataattcttgacaataatcgcattactataactcaaggtgttgttgaagcattattagaaaataattctgcgctaattacctgtgatagttctagaatgccaattgggctcatgcttccactctcaggaaataaaacacaaaccgaacgatttcgtgatcagataaatgcttcacaacctttaaaaaaacagctttggcaacaaacagttcaggctaaaatcaaaaaccaggcctatgttttatcaaataaaaacaacacaattattgataatatgctggtatgggcttcagatgtgaaaagtggcgactcagacaattttgaggcacgtgctgcagtctattattgggcaaatttatttaatgaaattgaaggattttccaggaatcgtgaaggtgttccaccaaacaatttacttaattacggatacgcaatattaagagctgtggttgcaagatcattagtggcaagtggattattaccaacacttggaattcatcatcgcaacaaatacaatgcatactgtttagccgatgacattatggagccttatcgtccatttgtggataagttagtttgtaatttagtcacttctgaaactaacattgatgaactttctcaagaaataaaattcaagatcttaaatattccagtacttgatgtgataatggacggacagagaagtccattaatggttgctgtaggtcaaactacagcgtcactttataaatgttttgcgggtaaaataagaaaaataaaatacccatcttttgaatagttattaatgaatcgttttagtgaatatagagttatgtgggtcatggtattttttgatttgcctaccgaaactaaaaaggatataaaaaactattctatattccgcaagaaacttattcaagatggatttactatgtttcagttttcaatctatcttcgccattgtgctagtagagaaaatgcagaggtacatatcaaacgagtaaaaagttttttaccacctactggacaagttggtatactatgtgtaactgacaaacaattcggcatgatggagctgttcattggaaaaaaagaaacagaagttcaaacaccttatcaacaactggaattattctgattaaaatattatcaatttatagatagaaataaaatcctgtcagttgacaggattttattcttttaaaacaacaacaaattttatttgtaaatttaaccccaactaactgataatctagggcattacacacatccagttgttgttggtatcaaagatactgaattctgaaagcaattcacaacctcaatacatgtgtatgatagaaaaggcaagttgttgttggtatcaaagatactgaattctgaaagcaattcacaactaacctaaaacggtctttttcgaggactgggttgttgttggtatcaaagatactgaattctgaaagcaattcacaaccaaagcatgagcgataatctcgaagattatgttgttgttggtatcaaagatactgaattctgaaagcaattcacaacacatacttgtttctgggggtggttatcaggttgttgttggtatcaaagatacagaattctgaaagcaattcacaactgtggctgtagagttacagtgttattgatgttgttgttggtatcaaagat

SEQ ID NO: 2450 - DNA, 8763 bp, synthetic construct
  source 1..8763: mol_type = other DNA
  misc_feature 1..8763: note = Synthetic
cccttgcttagcatctttactctttttatgcggcaaaggtaattggtttttacgatttatgatttatgatttgtgatttatgtgtcgttgataaatcataaatcataaatcataaaccacattttatttttacatttgcgtgcgtaaaaacttgaatgatgaagggaatccaaacactatatttcatttgtttcctattgttgttaatctcctgtagctcgacaaaatatgtaggcgaaggagaatacctgttggacaaagtggagattgtgtcggatggcaagacttataaaaacagcgatttgaagccttatttgcgccagcaacccaactttaaagcattcgggctgatgaaatggcagttgttcgtgtacgattggtcgggccggaacgagaagaaatggatcaataaacagttacgtaggattggtgagcctcccgtggtgctggatacgatgttggtggaacagtccgccatggaactagagcgtttttacattaataaagggtatgtccatgcggatgtatcaacgacgatcgatacggcacgccataagaaagcggttgtaacttaccatataaaggcgaacgatccgtataggatacgcaattacacgatgaagttccccgatccgaaaattgatagtttggcacatctgaaagcgcctcgccgctctcccttagcttctgcgttccggtcctcacaggaagagtataaccaattagttaaggaaggaactttatttgaccgggatatattggacaaggagcgggagcgtattacgaccttacttcgttggaacgggtattatggttttaatcgggattatttaggatatatcgctgatagttcttttaaccaaaatgtcgtggatcttgatatgtccatgaaaccttatcggaaggtgttgcccaatgggtcggtagaggatcagccgcatcgtcagtattatattaaggatgtaacggtcttaaccgattataatccgatgggggtaggagaggacgctagtttcatggctacagatacgatgctcagcgcaggggtgaatatcgtatatggccggaacgggaagagtatccgtccgagcgtgctccggaggagtacttatattcggccggggcaattatttagtgagaagaatatagagcagacctattcggcgttcgcttctctaagggctttgaggaatgtaaatatacgttttacggaagtagaggagcgggatacgatgaagttggattgttacattctcacttctcccgcgaagataaatacggtgggagtggatttggaaggtactaactcggcgggtgattatgggtttgcctccagcttgaattatcagcataggaatatcttccgaggatcggagctgttctcggcgagggtgagaggggcttacgaggcgttatccggaaataaggcgaatggctttggtaattactgggagttaggtgcggaaggatccttgctgtttcctcgtttcttgttcccgttcttgagttcggattttcgtaggcggctacgtgcgtcaactgaagcgaaaataagttacaacctgcaaaaacgtccggagtatacgagggcgattctatctggtggttggagttatatttggcaagatcggggtaatacacaggcacgccatacctttaagcttgtagacttgaattatgtgtatttgccggataagaatatggactttatcaatagcttgccggattatatggtgttgtataactatacgaaccattttatcatgagttcgggatatacttattccttcagtaattattctccccagaatcgtttgagaaacacgcattccctacgtgcgtcggtcgaggtcgcagggaatttgttgagtgccttttcgcatcttacgggggcgaagaaaaatgatgacggttattatgagttgtttggtacggaatatgcgcaatatgtgaaattggatttcgattttagtaaaggaatcgtgcttgacagtcgtaacaagttagctttccatataggagtgggagtggggatggcttatggtaactcaaactatttaccttttgagcgtgcttatttctcggggggagcgaatagtgtccggggatggtctgtacgagagttaggtccgggtagtatggaagttgacagcacgacttctttcgctcttcaatcgggggatatccgcttggatttgaacttggaatatcgaacgaaacttttttggaagtttgaattggcggcttacatagatgccggaaacatatggacccggaatgtatcagatgaacgctataaggctggaaactttgatttctctcgtttttacaaggagatcgctgtttcctatggtttgggacttcgtttggactttgatttctttctactacgtttagatacaggcttcaaggcttataatcctcaggagaaaaagtctaggcgttgggcgataacccgtcctaatttcaaggataatttcgccttgcattttgccgttggttatccattctaaattcaatatgtaaaaaagtgtactaaaagtttgcaaggaaaagaaaaatccttacctttgcaccacgaaaataaggatggtcaggtagctcagctggatagagcaacagccttctaagctgtgggtcctgggttcgaatcccagcccgatcacgagggagattctaaaagagtctccctttttttgtgtcataacttcgttggcaaagtatcttagatgtataggcaaagtatcttaggtgcgtgagccgatgcacttaagatactttttggggggagggatcgacaagaggttctttctttttccgactggaaaaactatatgcctatcctctatattagctactgagctggaatttgtcttatatggattgaggaatattccgtaaaagtaagtactacttactttgctatttaatatatacttactttgtcatttaatatatacagcaagtggcatagaagatgtactgtcttctcacgggtttctaccaagctggcatttaggctgattttagaacttcgtagcataaaaatcccccgcagaagggcgagggaacctaatgttttcacaacggaataatccttattgtgatttgcttcattttagtatggcaaatatatgaaatggaatgtttgcgtgcaagtgtttctgaaataaaatttttatatttgggaaaatgtaaagataacataccatgaaaaggattttaggcttggatttagggacaaatagtatagggtgggcgttggtgaacgaagcggagacagatgaggaagtctcgtcaatcatccgattaggtgtgagagtaaatcccttgacagtagatgaaacgcagaactttgaaaaagggaaaagtatcactacaaatgcggaaagaacccttaaaagaagtatgcgccgtaatttgcagcgatataaattacgtcgtgatgcgttggttgaatttttgaaagagctgggttttattaccgacgaaactatcctttcggaacaaggaaacagaactacgtttgaaacctgtcgtttacgggctaaagctgctgaagaagagatttctttagaggaactatcccgtgtcttattgatgattaataaaaaacgtggatacaaaagtagtcgaaaggcaaaaagggaagaagatggagttttgattgatggaatggagattgctaaaaagctgtatgaggaggatttgactccggggcaactttgttcgcagttacttgagtcgggcaagaaagttttgccagacttttaccgttctgatttgcaagaagagttggatagaatatggaatgttcaaaagcaatttcatcctgatgttttctgtgatgccgccaaagaagaaatcaaaggaaaaaacagaagccagacatgggctattttggctaactattttgtttggaaagaggaagtgattagctggaatgacagagaagcaaagaatgaaacgatagaaaaagaatgtaaacttgtcggtcttaaacggacgactaaggggtatgaactgaaaaaggaaaattatcgttggcgtgcgcaagctcttactgaacaattaggtttggaagagatagctgtagtattgcaagaaatcaatggtcagataaatgcgtctagtggttatttgggagccattagtgataggagcaaagtgttatactttaatcatcaaacggtcggacagtatcagatggctgagttagacaagaatccccatgcaagtttgcgcaatatggtattctatcggcaggattatttggatgaatttgatagaatttgggaaaagcagacagaatttcataaggaattgacggctgaattgaaaaaagagattcgcgatatgatcatcttttaccaacgacgtctgaaaagtcagaaaggcttgattagtttctgtgagtttgaaaggttggagattgtagtagaaaaggatggaaagaaacagaccaaagtcataggatgcaaggtgatacctcgttcgcatccattgtttcaggaatttaagatatggcagacattgaatgacataaaggtattgggaagagaaaagaaaagaaatgctttgtcggcaagcgaaagtagggctttgtatccagaagaaaaagaaatactggcaagagaacttgcgataaaagaaaatatgaggaaagcagatgtgttgaagctcttattgaaaatccacaggaattggatttgaacttcaaacaaatagatggaaatcgtactgggttttctctcttttctgcctatagcaaaatgatagaaaagtatggctacgaaccgttggattttaagaaaccagcagatgagataatgggacagctaagaactatctttaccgatttgggttggaatacgaatctgtttaccattgacttaaccaaagaggggaaagagctcgagatgcaaccttatttcagactttggcatctgttgtattcttttgaaggagataatacgccgaccggtaacggcaaactgattgaaaagatcatgcaactttgcggagttgagaaagaatatgctgtagagctagccagtctttcgtttcaagatgattacggaagtttgagcgcgaaagccattaaaaggattttaccctatttgaaagatggtaatcagtatgatgtggcttgtgaatatgccggttatcgtcattccaaatcttcactgaccaaggaggagatagaaaataaggttttaaaggacaaactggatgttcttcctaaaaacagtctccgaaatccggtggttgaaaagattttgaatcagatggtgaatgtaatcaatacaatcattgatacatatggaaaacctgatgaaattcgagtggaattggctcgcgaattaaagaagagtgccaaagaacgtgaggaactgacgaaagctatcgcaaagagtacccgtgagcatgaggagattcgtaaattgttgcaagctgaatttggtatgatgaacgtgagccgcaatgatattatccgttacaaactttatgaagagttgaaagataatggatataaaacattgtattcctatcaatatatacctaaagaaaagattttcagtaaagagatagatatagaacatattattccacaatcccgtctttttgatgattctttgtctaacaagacattggagtataaggccattaatatagaaaagggaaataagaccgcttatgattttgtaaaagaaaaatatggagaagaaggcttgcaacaatatataaatcgttgcgaaagcttgttcaatgacaaaaaggcgaaacttcggaaattgaaaatgggacagaaggatataccagatggtttcattgatagggatttgagaaatacacaatatatagcgaaaaaagcactcgctatgttgaacgaaatctgccgtagagtagtggcaactaccggttccattactgaccaattgcgtgaagactggcaattggtggatgtaatgaaagaactgaacctgcccaaatatgaagccttgggttttgtggaaacatacgaagataaggacggaagaaaaatcaaaagaataaaggattggacaaaaaggaatgaccatcggcatcatgcgatggatgcgctaacggtagcttttacaaaagatgcgtttattcagtatttcaataataaaaatgcggcacaagattcagacaatagaaaccatacgaatataataggtatcaagacccgttattttgacaaaggaagagctttgcctcctattccattggagcaattccgggtagaagccaaacggcatttggaaaacctgttggtatctattaaggctaagaacaaggttgtgactgtcaatgtaaatcgaacaaaaaagaaaaagggtgaaaatacgaagatacagcaaactccgcgaggtcagttgcatttggaaacggtttatggtagtctcaaataatatgttacaaaaatagaaaagatgaatgcttcttttgatgtggctaaaatagcgactgtgagtaaacaggcttatcgaaatgccttacttaaacggttggaaacattcagtaatgatccaaagaaagcatttacaggaaaaaatacattggaaaagaatccgctttatgttgataagtatcagaccatacgagttccggagaaggtacaaaccgttgaatttgaaactatttatactatccgaaaaccagtcgatcctgctttgaatgtggataaagtagttgatgtaaaggtacgtgctattttagaacagcgtttgaaagaatacgatggagaccccaaaaaggcatttgtcaatttggatgaaaatccgatatggttgaataaggaaaagggaataagcatcaagcgggttagcatccgaggaatcaataatgcccaatcgatacacgtgaagaaagataagaatgggaatccgatatgggatgaaaatggaaaacaaatccctgtggattttgtaaataccggaaacaaccatcatgtggctatttatcgtaaacctgttttagacaagaaaggacaggtgacgtttgatgaggatggtaatctgatgtatgaactggacgaggtggttgtctccttctttgaggctgtaacacgggctaatttaggacttcctattattgataaggattacagaaaaagtgaaggttggcaatttttgtttagcatgaagcagaatgaatatttcgtgttcccgaatgaaaagacgggcttcaatccaaaggaggtgaatttgttggatccggataattatgtggtgattagtccgaatttgtttagggtgcagaagataggttcaaatgattatacttttaggcaccatttagagacaaccatacagaatagtaataatgaattaaaattcataacttggattagatgtggaaaaagtggtattagtgatattgtcaaagtcagaattaatcacattggacaaatcgtatcagtgggagaatattaatagtacctgttagagtttgaaataaatagggtgtatgctattctcaaaaaggttgtacccttttttagaaacagacttttaatgctgattaataataatttaaaatctaactgcttatgatcaagaaaaccctttattttggaaaccccgtttatctatctctgaaaaatgctcagttgatgataaaattaccggaggtagtcaggaatgatacgttacctgaaaatttcaaacgaacttcagaagtgactaaacccattgaggatattggagttgtggtactggatcacaagcagatcactatctcttcgggcgtgttggaagctttgcttgaaaataattgtgctgtcattacatgtaacagtaaaagtatgccggttggtttgatgcttcctctgtatgggaacacgacgcaaaacgaaagattccggcaacagttagatgcctctctaccgttaaagaaacagctttggcagcagaccataaagacgaagattgaaaatcaggcagtcgtgttgaaagaatgttctggcgcagaagtaaaatgtatgtacgcatgggcttcggatgtgaaaagcggagatacgagtaacctagaagcccgtgcggctgcttattattggaagaatttgtttcggatagaaggtttcacaagagatagggagggcattccgcctaacaatttgttgaattatggatatgctattctgcgggcggttgttgctcgtagcttggtggcaagtgggcttttgcctactttaggaatccatcatcataatcgttataatgcttattgcttggcagatgacattatggagccttatcgtccgtatgtggatcgattggtctgtggtatcataaagcagggagtggattatgcggaactaacgagagagttgaaagcgcagttgcttactattccagtgttagaaacttttatattaggaaaacgtagtccgttgatggtggctgtcgggcaaactacggcttctctgtataagtgctttagtggcgaattgcgtagaatctcctatccggaaatgtaatatggatcggtttagcgaatatcgtgttatgtgggtacttgtgttgtttgatttgcctaccgagacgaagaaggagaaaaaggcgtatgtggatttcaggaaaaatctacaaagagatggatttacgatgtttcagttttctatctatgtccgtcattgtgccagtagcgagaatgcggccgtacatataaaaagagttaaatctttcctcccggagcatgggaatgtcggaatcatgtgtattacggataagcatg

SEQ ID NO: 2451 - DNA, 8608 bp, synthetic construct
  source 1..8608: mol_type = other DNA
  misc_feature 1..8608: note = Synthetic
acaactgatatttgcaacaactatatccattgctttacttctttaggtttagttgtgatttgctttcattctttgaacaactgatatttgcaacaacttctgccagtatgtagcatcagatacagcagttgtgatttgctttcattctttgaacaactgatatttgcaacaacgcgaaacatgttcatagtgtcgtttttatcgttgtgatttgctttcattctttgaacaactgatatttgcaacaactttaccaattatagcaccgtattccattatgttgtgatttgctttcattctttgaacaactgatatttgcaacaacgacctcagaagcgtaacaagtttacctgctgttgtgatttgctttcattctttgaacaactgatatttgcaacaacatactatagttcaaattgctaatattcagttgtttatgttcaaatttagaattaaaaaatccgtctcggttatgtcgggacggatttattctaaaacaattctaattgctgtggagtgtttggtaggtctttttcctctttgccataaaacaattccatcattccaaattgcttatcggttattgtcattatgcccacatgccccttaggcggcagtattttctttacacgtttaatatgcacatcggcattttctctactactgcaatggcgtaggtaaatggaaaactgaaacatgctaaaaccatctttcataagatccttacgaaacctgctgtatatctgcctgtctttcttagtttctgtcggcaggtcaaaaaatactaatacccacaaaattcggtattcatttaatcgcattcattaacaggtaggtctttgtcatcgctaatagttttattataatcaatgtcactttcggcagcaagtgataaaaaatctgtagccatgcttttgtattttatgctgcgtttggaatcaaagtccttcatcaacggatatattattttccgggcgcttaattcgtaacatttagcaagggacgaggttgtggtttgtaaaccaaccattaacgggcttttgcccctttcaaattgcacatcaacagttgcaatatttaacaactgcattttaatagaactacccagttccaaaaaattctcgccattatcaattattcttaaaacaatttgatcaacataggggcgataaggctccataatatcatcagcaaggcagtaagcattgtatttatttcgatgatgaatgccaagagtgggtaataagccagaacaaaccagtccgcgtgcaacgatagctcttaaaatagcatagccgtaattgagtaaattatttggtggatcgccttcccggcaacggaaaaaatccacttttttaggaaatacatttttccagtaatatgccgccgcccggccctcgtaattatcaggatcaccggaacgtaccgattttgcccaatacaacatgttttcatactcaatcccacgatctgcaagcacagccgcctggtttagtattttagcttgtatagtttgttgccaaagttgtttttttaaaggctgggacgcatcaatctgatgtctaaaacgttcactttgtatatcatgaccgtctataggaagcatcatgccggtgggatgatgggaattatcacaagtgataattgctgcattgttatataataaggcggcaatgcagccatgagtaatagttatctgctggtgatcgagcaggataattccaatatcttctattggtacagacttttttgattccttttcgcctaacacttttaggtgaggaaggtcaatcatgagctggctatcttttaagctaagatatgccgggttgctaaagtgaagcgttcgttttatcatattgcttcattatgttgtgatagagggttagatgctaaaatgttgatatttatttgatcgtcaacatttttaatatcaaatataacgaagggattcgctaatacaatatttaaatgtaaatagaagtctataatttgacgcggaatctcttgtcacctccgccggaatcaggtggtcaatatcagcggtatatcaagtctatagatgcgttttgagaattactgcgttttagaaataaaaaagccccgtattgtaagacgaggcacttatgtttacacaacggaataatccttattgcgatttgctttcaatatcaaagtaaaaggtttaatattatatttccaaatctaaatgtaatcattactatgaaaacaattcttggcctcgatctcggtactacttctatcggatgggctttcgttaaggaagccgaaaacgataatgaggtatcatctatcataaaaataggggtacgtgtaaatccgctcactactgatgagcaaaccaactttgaaaaaggtaagaaattttcggtaaccgcaggccggacattggcacgtggtgccaggcgaagcttgcagcggtataagcagcgccgccaaaatctgattaatgttttgaagaaagccagcatcattgatgaacatacaatattggctgaaagcgatagaaacaccacacacgcaacctatgctttacgagcgagggcagccgatgaagaaatagcgaaagaggaatttgcgcgtatattattaatgatcaacaaaaagcgtggctacaaaagcagccgtaaagccaatagtgaagatgaaggccagctaattgacggaatggctattgctaaaaggctgtatgaacaaaagcttacacccgggcaattgtgttatcagtttttaaaagaggggaaaaagacattgcctgatttttacagatcagatttaaacgccgagtttaatagcgtatgggaattacaatcgaaatattatcctgatgtatttaatgatgatttaaaaaaggcacttgcgggtaaaggacaaaaggtaacttctgccattttttggactaagtatagttttaacaccgctgaaaataaaggtacaagggaagataaaaaattgcaagcctataaatggcgaagtatggccattaatacgcaattagcagttgaagaagcagctttcgttatcgccgatattaatggtaatatcaataattcgagcggatacttaggtgcaattagcgaccgtagtaaagaactctattttaacaagcaaaccattggcaagtatctttatagtcagctgcaggataatcctcatacacgcactaaaggccaggtgttttacaggcaggattattttgatgagtttgaaaccatttgggaaacacaagccaaatatcatcctgaacttaccaatgctcttaaagaagagataagggacatcattattttttatcagcgtaagctaaaatcacaaaaaggattagttagcttctgtgagtttgaaagcagagtagttgaacttgtaaaggacggcaaaaagacaagttataccataggtgcaaaggttatgcctaaatcatctccgctttttcaagagtttaagatttggcaaaatctaaataaccttttaattcagaacaaaaagagcaaggaaattttatcatttgatttagaagctaaactattactgtttaatgaattgaatatcaaaggcaatttaaaaaaagaacaggtatttaaattcctcggctataaacctaatgaatgggatttgaattttccagttgttgaaggcaaccgcaccaatcaacttttatatgaggcttatttaaaaatgatggtatatgaaggtcacgatgatatagagatagaggaattaaccgctgccgacataaagtcggcggtacggtcattttttgaaatccaggagatcaacgtagctattcttgattttaatagtgatgtggaaggccgtatatttgaaaaacaacttgcctatcaagtgtggcatctgttatacgcgtatgaaggtgataattccaatacaggaaatgacaaactttttgaattgctaaagtcaaagtttggaattaaaaaggaacacgcccaaatacttgctaaagtaaacctaagccaagattatgcgagtttaagcgcgaaagccatccgtaatattttaccattcctgaaagcaggacacccttttgcaaaaaaggataaagacgaaaaaattgccagtgcaacggcattggcaggttacaatcattcttcgtcaattactaaggaggaaaatgataaccgtattttaaagggctgtttggaattgcttccaaaaaatagcttgcgaaacccagtggttgaaaagatattaaatcaaatggttaacgtggttaacgcaatcattgcggacgctaaccttggcaaacccgatgaaatacgcattgaactggctcgtgaattaaaaaagaacctcaaagagcgagaagaagcaacggctcaaattaataagtctacagccgaacatgatgcaataaggctattacttgtaaaggagtttggcattaaaaatccaacccgcaatgatattatcaggtataaattatatgatgaattaaaatttaatggatataaagatttatacaccaacgaatatatttcccgtgaagagttattttcaaaaaaatacgatatagagcacatcatcccacagtcaagggtatttgacgatagtttttccaataaaactattgtagagcggaggattaaccaagcaaaagacaatgccacagcttatgattatgttgatgctaaaggggcggaaaagttaagcgaatacaaattaagggtagaagcttatttaaaagaatatcctgaaagaaaggcgaaatataaaaaactgctgatcaaaggcgaggctattggtgaaggttttatagaccgggatttacgcgatagccaatacatcgcaaaaaaggctaaggctatgctgcacgaggtttgcaggaatattgtatctactacaggtagtgttacacaacgtttgcgagaagattgggatttggttaatgtaatgcaggaactgaatttagaaaaataccgcaagcaactgcttaccgaaatggtggagaagaaagatggtaattttaaagaacgcattattgactggacaaaacgaaatgaccaccgacaccatgctatggatgctcttaccatagcttttaccaagcatagtcacatacagtacttaaacaacctgaatgcccgaaagagtgacgataaattaggccgcgcaatagctggtattgaaaaaaaggaaaccgattttcatatagatgataacgggaataaaaaaaggcgatttaagtcccctttagttaatttcagagaagatgctaaaaatcaccttgaaaatgtgttagtgtcatgcaaagccaaaaataaggtagtaacaaaaaataaaaacaaaattaaaagtgcgaaagaaaaggaacctcaaaaaacattgacaccccgcggacagctacataaagaaactgtatatgggaaaatacaacagtatatcgtaaaagaggaaaaggtaagcgggaaatttgatgaagcgactattgctaaagtaaccaaaccaaaatacagggaagcgcttttaaaacggttgcgagaaaacaataacgaccctgtaaaagctttcaccggaaaaaatgcacttactaaaaaaccgatttatttggatgtgcaaaatacagttttattgcccgaagtattaaagctttcttggctcgaagacgattatgccatacgtaaggacatatctcccgatttaaaaatcgaaaagataatagatgaagggatacgagagatattatataagcgtttaaatgaatttgttgggaagggaaaggagaaagaggcgttttctaatcttgataaaaaccccatctggctgaatgaaacggccaagattgctattaaacgggtaactataagcggtgtaaaaaatgcggagccacttcattttaaaaaagaccatcatggccgagatgttttagataagagtggtaaacctacccctgttgattttgtaagcactggtaataatcatcatgtggctatttacagggatgaaaatggcaacttgcaggacgaagtagtttcattatacaaagtaataaccgaacgcgtaaatcagggacttccaattgttgataaaacttataatcatcatttagggtggcagtttttatttactatgaaacaaaacgaatattttatatttccgtcggccgattttgatccgttagaaacagacctgcttaatcctgttaacaataaattaatcagtccgcatttattcagggtgcaaaaattctcaaaagtaatttatggcaattcagcggtgagagattatgtatttagacatcatttagaaacagctattgaagataggaaggagttaaaagatgtaacatataaatcaataaagagcctgccatattttgaaaacatcgtaaaagtaagaattaatcatataggacagataattaagattggcgagtattaaacattagtaatgtgtgatattaaattgctttttacaacattgatttacgttattgcaaataccggacataggagagagataatattttattaacttaaaatgatgctttaacaaaaacaactattatcggtaatttttcaggctgttttcccatttgtttactgttgtagatatcagagataatattatatgcgttaattaactcaataaataactcaaacaacggtattattaccatagcatgctggagatactcacaaagctgtttgagcaatttccgaactggttcctatgtggcgaaaattagtctgctatttgacattgaggggccgtttgtaaagtaattgatgtttgaaaaatgttaaatcctcgcctagttgaccttatgcttgtgttcggaaagaagctggaatcagcttaacccggttgaatgaagcgcaataaaggtcatagttaaatatataagaagccaagtttaatgtgggtaatgttggtttattgggtggttatggtcttggtaagatccgtaacaaacaaggaactttccataaacaattgccgtcttcaaggatttcctggacactatatactaaatgggcaagtgttttttagctggtgacaaaatagcgccatcacttttatgaatatgttagatattactacaagtagtgtccgttgatttagccagataatgttaacttgtttaaaacaataatgttgtataattgctgtttattaataagtatttggtattattgttaataatattacctttgccgacttttaaaatttctttttagctaaaataattagtaactttgtaatatgataacctacaagtttgatgcattaaagtcactaaatgcattactttttattgctaacaaaatagcaaaaaatggggttgctgataaatacgctactctaaaaatcctatattttgcagaaaaaaaacatctatctctttatggtagattgataacagatgataggtttgccgcattaaagtatgggccagttccgtctaatagctacgatatattagaaagtacattcgtatatagaaattcttttcaggttataagtaataagcaaatccaacctgttcaagggccagatttggattacttgtccgaaagcgatattgagtgccttagtcattccatagaggaaaatataactttggattttcaatctttaatggaaaagtcgcacgataatgcttatcacgaagcatttgataagggtattcaatatatgagcatagaaagcattgctatacaagaaggcgccgatcaaaatatgttgggtttcattaaagagcattatgaaactgcgaatttatcctcatggctacctgcttaggtgatttgttcccagaggagtttagggttgactatgcaggcaggtcgctaagcccaaaatcaatagtaataatagatgtccctgaattcaatttggactatgataagatgatggttttaattacatcgtcgatagataatactcacatggcttgtgtgtcgataaacacaagcccatcgccccgaaacaatcacgttattatagcttgcgctgattatgaatttttagagtatgatagccatatgaattgtaccaatataactccagtaaatattgagtggttaagggatatactaagtagagagccagaaagaataaaaggagaaatatcggacacccaacatgcagaaatattacagagattgagtgcctcaaccaatattgcacctgtaaccaaaagaaggtttaacctttagttatttagttattgggcttccccccgccttaatcatttcatccaactttccctcaaactttactttttcctcatacttatccgcaagtactttcttagcctcttttgcagtaatcaaaaatttacgaaattagttagcataagtcaagtgcacgttattattataaacggggcccaattctttattttgcttaatcaacttgcgttatttacgacacacataacttgtaataagtttattgtgaacggtaaataagaatacaggatttttggcaaataaggatacaggataaatggcaagaatgatgtagggaaaatggcaagaatgaatacatagttcagcttttgggagcaagcccccaaaagtacaacaacctttgtttttactaaaagacaagggtatttatg

SEQ ID NO: 2452 - DNA, 8588 bp, synthetic construct
  misc_feature 1..8588: note = Synthetic
  source 1..8588: mol_type = other DNA
tattttaccgatatcaccacattcgataatgtaagcaatacctgctaaatcggtgtttactttatttcgtttgatgttggcatgattaaatgaagcatcacctatcgatcctgatgccgttttgtttttatcgatagtaattttcactaccgccgaatctctagtaaaggtaaatccatcaccaaaagcatatgttctcacaataacagcttgtttagcgcttgtccaattacccacatactcgtttggtaattcccaattggttttgcacccagtgaaggttgcaatacagatgcctaagagtataattgactttttcatactactaatatagtgaaatgtgcaaatgcgaagatgcgtaaatgtgcagacttgtgctgagcggagccgaagcatgcgtagattaatattaaataaatagaattaaagtaattatagagtgatttaattgaaaacttaacagaatactaagtaattacataaaaaaaggcgagttgccccgccttaaatgttttcacaacggaataatccttattgtgatttgcttcaaatttgtaaaacaattataattacttatattcatatttccaaatattatatcatgaaaacgattttaggtttagatttagggacaaattcaattggttgggctattgtaaaagaagctgaaaatgaaaacgaaacatcttcaatagttaatctaggggtacgtgtaaacccattaacaactgatgaacaacaagattttgaaaaaggtaaaccaattacaacaaatgctagtagaactttagcaagatcggcaagacgaaatctccaacgatttaaacttagacgaactaatcttataaacatattattacaacataatattatcgataattctgattgtttagctgaaattggtaacaaaacaacttttgaaacatatcgacttagagcattagctgctaccgaacagatttcacttgaaaatctcgcaaaagtattattaatgataaataagaaaagaggttataagagtagtagaaaagcatcaaatgaagaagagggttcaattttagacggtatgtctatagctaaaacactatacgaaaccaatatcactccaggtgaatttgttctaaataatttaaaactaaataaaaaaaatatacccgatttttatcgctccgacttggaaaatgaattcaataaaatatgggactttcaaaaaaaatatcataatgaaatattaaccgacggtttcaaaaaagaaatttcaggaaaaggccaaagggctacatcagctattttctggaacatttataactttaatactgctgaaaacaaaggaacaaaagaagagaaaaaactacaagcctatcaatggagagttgatgcattaacaattgaactccctaaagaggtattagcatatgttattacagagataaataacaatttaaataattcaagtggatatttgggtgcaataagtgacagaagtaaagagttatacttcaacaaaattacagttggagaatacctttataaacaattacaagacaacccaaataatagcttaagaaacaaagtattttacagacaagactatttagatgaattcgagaaaatatgggaatgtcaatctaaatattacaaaatattaacgaatgaattaaaacatgagataagagatattattattttctatcaaagaagattaaaatcacaaaaaaatcttattagtatttgcgaattcgaacagaaagaaataactatttctgggaataaaaagaaattaattggactaaaggtatgcccaaaatcttccccattatttcaagaatttaaaatttggcaaaacctacataacattgaatttaagaataaaaaatctaaagaaatttataagttaaaacaagaagataaagttctattatttaacgaacttaatatcaaagggaggttagatttagatgcgatactccaaattttaaatttataccctaaagaatgggaaggaaattataaagctattgaagggaataatactaatgaagtactttataatgcatttttaaaaattttagaatcagaaggttacgatgaagaatttactcgtgctaaaaacaatgataatatttctataaaacaacttgaacaagattgttctgaaattaagaagatgttaaatgatatatttataacactaaatataaatacagaaattttacatttcaatgctctattagaaggaaaagatttcgaaaatcaagcatcatatcaattatggcatttgctttattcttatgaaggagataattctatatctgggaacgaaaaactttatcaaatattaatcagcaagtatggtttttcactagaacatgcaaaaattattggtgcaattaattttaagaatgattacggtagtttaagtacaaaggctatacgaaaaatatatcctcatataattgaaaaagaatatagtgaagcttgtgcattagcaaattataatcattcaaaagcatccatcaccaaagaagagaatgataaaagaattttaaaggatagactcgacttaattaagaaaaatgatttaagaaatccagtagttgaaaagattttaaatcagatggtaaatgttgtcaacaatctgattgtagctgaaaataagaaaaacgaatctgaaggatcttcaaattttcatttcgatgaaattagaattgaactagcaagagaactgaaaaaaaatgcctctgaaagagctgaaatgactaccaatataaataagtcaaaaatagaacatgagaaaattcaaaaactattagttgcagaatttaatatattaaatccaacacgaaatgatattattaagtataaattatatgaagaattaaaaactttaggctataaagacttatacacaaataagtacatacctagggaaaaactatttagcaaagaaatagatattgagcatattattcctcaatcaaaattatttgatgatagcttttctaacaaaacaatcgtttatagagatataaatattgagaaagggaatgctactgcttacgattatatatcttcaagatttggaaatgatgagttgactgaatatttaaatcgagtagaattattatacacttcaaaagaatcacctataaccaaagcaaaatacttaaaactacaaaagaaagagtctgaaattggggatggttttattaatagagatttgcgggacacacaatacattgctaaaaaagctaaagagatgttatttaacatttctcgtacagttgtttctactacaggatcaatcactgacaaattaagggatgattggggattaataaatgtaatgaaagagttgaatattgagaaatacaggaaacttggacttacagagtttattacgatgaaagatggtaataaaaaagaagttatagtggattggactaaacgtaatgaccatagacaccatgcaatggatgctttaacagttgcatttacaaaacataattatattcaatacctgaatcatctaaatgctagacgtgatgaaaacaataaaaaacattccattatacatgcaatagaaaaaatagaaaccgagtttattgttgatgatttgggcaacaaaaaaagaagatttaaagtaccatttgaaaatttcagaattgctgctaaacaaaacattgaaaatattattgtttctcaaaaagcaaaaaacaaagttgttactagaaatataaataaaacaattacgaaaaatggaatcttacaaaaggttgggttaactccgagagggcaactgcataaagaaacggtttatgggaagatacagcagtaccaaactagtgaagataaaatatctgcaaaattcgactttgaaatgatacaaaaggtagcaaattcaaaatatagaatgttattaatagaacgtttagctgaatttggaaatgatcccgccaaagcatttacgggaaaaaattcattatcgaaaaaccctatatatttagacaaaaacaaatctatttgcatgcctgaaaaggttaaaatagtttcgctagaaacagattatacgattagaaaatctatcaatccagaaaatttcaaggatttaaaaagtattgataaaattatagatgttggaataaaaaagattattgaaaatagatttctacaatacaatagtaaccccaaagaggcatttgcaaatatagaaaagaaccctatatggctaaatgaggcaaaggggattgcgataaaaagtgtaaaaataagtggtattaaaaatgcagaatccttacatattaaaagggataaccttggcaaagcaataattaataaagaaaatttaaatatacctaccgattttgtaagcactggaaacaaccaccatgtagctatctatgttgataatgaagggaaatatcaagaacaagtggtttcattatttgaggccgttgccagagtaaatgctaatcttcctatcattgacaaagaacacaattcgagtatcggatggaaattcttatttacattaaagcaaaatgaatatttcattttcccaagttcagatttcaacccagatgatatcgacctattggatccgaagaacagaaacctaattagtcctcatttatttagagttcaaaaaattgcaagtaaaaattacttctttagacaccatttagaaactacagtaaatgaaaattccaaactaataaatgttacttataagccacaattgggtttaaatagtataaaaaatataataaaagttagaattaatcatataggagatattgtacaaattggcgagtattaatgataaaacgcacgttatattttggcaacccagcctatttaaacaggcgaaatgagcaattggtcattaatataccaaatgctcaaggtttggatgatgccagtgggataaataccatcccaattgaagatattggaatagtaattttagatcaccaacaaattaccattactcattccttaatttcagcactcattgaaaataatgtagccatcattcattgtaatgaaactcatcacccaagtggattaatgatgcccttagcgagtaataccacccaaactgaaaaatttagagctcaaatagacgctagtatgcctctaaaaaagaatttatggcaacagacagtaattgctaaaataaacaaccaagctgctgtactaaaaaagaaaaataaaactatagataatatgttgtattgggcgaaagaagtgaaatcgggtgatactgaaaatcacgaagctcgagctgctgcttattattggcaaaatatattccccgagaatttaaacttcaggcgatcaagagagggcttacctcctaacccattattaaattatggatatgctatacttagggctagtattgctcgaggtttagtagcttctgggttattaccaacacttggtatatttcaccggaataaatacaatgcttactgtttagcggacgacattatggagccttacagaccatttgtcgatcaaatagtactagaaatggtagaaaatggtgaagatttcaccgaattaaccaactcgaataaagctcaacttcttaaaataccagcccttgatattgtgttcgatggagaacgaagtccattaatggtaggtattcaaaaaacgacatcatcactcgttaaatgttttgaagggaagataaaaaaaatagcctacccagaattgatataaaacctcgctttatgcgactcaatgaatatagagttttgtggattctcgtattatttgatttaccaaccgaaaccaaaaaagaaaggaaggtggctgcacgatttcgtaaagaaattatgcaagatggcttcgctatgttccaattttcaatctatttaaggcattgctccagtagagaaaatgctgatgtgcatattaaacgagtgaagaaacttttgccagaacttggtcatgtaggtattctcaccattaccgacaaacaatttggaatgatggaattattttttggcagaaaggagactgaattgccgaacacaccacaacaattggaaatgttctaagtcctagaattaaaaaaccattatgaattgaatctccataatggtttttaatgttcttttttaatttcaatttaagactacaacttgctgataatcatttcattaaactaccctatgttgtagctaatatcgtaaagaacaaatttgaaagcaaatcacaacaaatgtgcaaacaataatcgagaaaatgaagttgtagctaatatcgtaaagaacaaatttgaaagcaaatcacaacttaataggcgtaatgctctaggtgaagcgggttgtagctaatatcgtaaagaacaaatttgaaagcaaatcacaacggcgtttggaattggattaataaagttcatgttgtagctaatatcgtaaagaacaaatttgaaagcaaatcacaacatgtttcagactttcatcgatttgaatttagttgtagctaatatcgtaaagaacaaatttgaaagcaaatcacaactatcagatactatacgacgagtcgcagaaggttgtagctaatatcgtaaagaacaaatttgaaagcaaatcacaaccagtggctttgaagttaccgagtagtgcggttgtagctaatatcgtaaagaacaaatttgaaagcaaatcacaacaagcagttgatgttccaaaaggatatgccgttgtagctaatatcgtaaagaacaaatttgaaagcaaatcacaacacctaaactaaaataaaatgatcgaaataagttgtagctaatatcgtaaagaacaaatttgaaagcaaatcacaacagccatttaaaaagcagagtacaaaatctcgttgtagctaatatcgtaaagaacaaatttgaaagcaaatcacaacagatagctaaaaagtataatgtaagccacagttgtagctaatatcgtaaagaacaaatttgaaagcaaatcacaacagtggatgcagagttcaaaatcggtactcagttgtagctaatatcgtaaagaacaaatttgaaagcaaatcacaacagaacataggcaagacttatgcagtaacctgttgtagctaatatcgtaaagaacaaatttgaaagcaaatcacaactaccagcttggaacaacaaagcagctaatggttgtagctaatatcgtaaagaacaaatttgaaagcaaatcacaacagtgcgccgagaagttgcgcttcgtgttgggttgtagctaatatcgtaaagaacaaatttgaaagcaaatcacaacgacacgtaaggttttcgttacctaagtcaagttgtagctaatatcgtaaagaacaaatttgaaagcaaatcacaactgtcgagattaaagtatcaatgcgcaagaagttgtagctaatatcgtaaagaacaaatttgaaagcaaatcacaacattcagtaacggattatgcttttcccaatggttgtagctaatatcgtaaagaacaaatttgaaagcaaatcacaacagtcatcgttacggcaactagtgatgtgcggttgtagctaatatcgtaaagaacaaatttgaaagcaaatcacaaccactcataaataatatccccatactggtcagttgtagctaatatcgtaaagaacaaatttgaaagcaaatcacaactggcagatacagataaaacaatagtattcggttgtagctaatatcgtaaagaacaaatttgaaagcaaatcacaacagggaatgttttataaaaaaaaaaaaaactagttgtagctaatatcgtaaagaacaaatttgaaagcaaatcacaaccgatagtattttaattaatgttattggtgcgttgtagctaatatcgtaaagaacaaatttgaaagcaaaaaatctcaataaaacatttcgattttttgctttcaatagcgattaggtgtttttaattacagattaatcaaaaatttgtgtctttaaggacacaaattagaattaagatttgagatttggattattgggctaatctaatatttattgtccagcgtgctttgtctcatcccgatagctatcgggagcgaaattgcctgcctcggcgtaagatgaggtgcaaatgcatagatgagaaaaagtgaatcacgatagttatctattaaaatctgcacatttgcacatcttcgcattttcgcattttcgcatgcttcggctccgctcagcacaagtctgcacatttacccgatactcgatactaaatttcggagactccacccgacaccacaaacttcatggcatctgcggctttcatacgtaagggagaaactttcgatttgttaacgatgagcacctttccggcaatgctataagagaatgggaaatacaccgcaacttcatcatctaatccgatactgcttaagttattttgggtaaggaatccaacttgctttatgccttccgaaatctctactaaaacgggttcattgaattttttatcttctccaacaaaggcttctaataaatcgcgtaccgaagagtacatcaatttaaaaatcggcattcggtttagaagcttatcaaaataatt

SEQ ID NO: 2453 - DNA, 8516 bp, synthetic construct
  source 1..8516: mol_type = other DNA
  misc_feature 1..8516: note = Synthetic
ccgaatactttcgggtgaagagtctttacgcgtcctcctaagatagatgggtagccggttaaatcttctactgcggaacattcatatcccaacccttcgataaatgattgtgttcctcctgttgataagaatttaacaccagatttgtttagtagtgagagcatttcttcaagtccttccttgtggaatactgaaatcaatgctgttttgatcgttttgttttcagccatttgtttgttactttaagtttctttataaattacttaaattgatatgcaaagatacgataaaaaattggtttttctttattgtatcaaagtattttaagaaaaactctcggatatatgattgcaaaccttcaacaacttatttgatttgtgccgtttgcgagaattgcttgtgttcccgtgagggcggactcatttgcaacgagttcattcatattgctgttggttttgtatagtaaataagttgtttggctattgcatttatgggtcgatgagtcagaggttgctgattttataggccttttcgggtaattggtgtagaggattgttaattatccgggctttttaaggccttgtgacggagactatgttgctggaatattaagcttttttgttcaaaattctccgctctaaatagtcctcctcttgtattcactttttcggggttgagcattttttcaagcaaccactgctgccaagtatcttgttgagtttggatagaagctctacttctgccatatcaaacatctttgctatgtcaccagaggagtaacttgacttgaagctgcttgtgaagtacatggacagcacgagttcaaaccactgaccttcttgaggaatgatggcgtgcacgcaagtaggtttatggagaagttccgtgaactgaaacatgtaacgacatttgaacaccattgaaaccgtatttgaatatgtttctgactatatacaaggacggcaacaggcgtgccgacattatggtagcacgctgagcgacaacgtcctgaccctttctttcacgcactacgagcatatagctcttgatgtaaagactatacaggatttgttggtattgtattttgcggattgatttactatttttttaaaaaaaattgaatattttcgctggaaatttcgtaagtttgcatagataattgattgtatgaaaaagatatttaatttattaacattggcaatgtttctttttgttactgtatcgtgtgcctataagcaagaaaaagaaacaaatattgtaacagtaagtattctaccccaaaaatattttgttgaaaaaatagtaggggataaatatgatgtaaagtgcatgctgtcaaatggagggaatcctgaaacttacgaaccttcaatggctaatatgatgacgcttgaaaaaagcgatgcgtatttttttatgggaaatcttggctttgaaactgctatgcgaggaaaaataattgagtataacccgaatataaaatgttattcagtttcagatggaattgaattgattaaagatactcatggtcatggtgattttgatcctcatacttggacatctgttaataatgtgaaagtgataagccgaaatatccttaaagcaatgtgtgaacttgaccctgacaataaggagtattatgaagataattatactgaatttaataaggaactgacggaattggaagttaaatttgattcgttgcttgtcaatgtcaaaggctcttcttttgttgtatggcatccgtcattaagttattttgctaaggactatggcttggagcagattagtcttgaaagtcatggaaaggaatctccaataaagcatattgaaaagactgttgaatatgcaaaatcaaagggaacaaaggtcttttttatgcagaaagatacagattcatctcaagcgaatgccgtgaataaggaagttggggcagaggttgttcaaatcaatccccttgcttatgaatggaaagaagaaatagaaaaaattgcttatgcactctctaaatagacaattgctgataaaggcagaagatattacagttcgttacggagcaaaaactgccctggagaacgtttcttttgatatatttaagggggatttggttgcaatcactggtccaaatggaggtggcaagagttcccttataaaatcaattctcagattagttacgccttgtacaggcaagattacatattttgagggtgaaaaagaagtaaatgcactttcatttggttacttgccgcagaaaaacaatatcgacagtcgtttcccgataacagttagggaagttgtcgcatctgggttatatgagaacaaggttaatttaactgggaagtttagtaaagagaatttggacaggttagattacattatggatttgatgggggtaaagtgtttccaagacaatgttataggtagtctgtcaggtggacagttgcagcgaacattactcggaagagcattgatttcaaatccagaagtaatagttttagacgagccattatcgtatgttgatgttaaatttgtaaatcagatatacgagataatagagaaactatctcaaagagcaacggtaattgttgtttcacacgagatgactgtattgtcaaaattagccaacagacattggataattgacaaagaattagaagaatgccatgcatcaaagcactatgtaagaatggattgtgaatagataccaatctattacaatgcgtttttgccttaaatcaaattgatttatacatcattaatattaaggtatttatataaaaaatcccccgttaaggacgagggaaaacctaatgttttcacaacggaataaatccttattgtgatttgctaaatttttgtattggcaaagttaataaaaatatctttaacaacaagtatattgctaaaatttattatctttgaaaaaattaataaaaagaataaatactatgaaaagaatcttaggtttagatttgggaacaacaagtatcggatgggctttggttgatgaagctgagtcagagaacgaaatatcaggtattgtaaaattgggtgttagggtaaatcctttaaccgttgatgaaatgtctaattttgaaaaaggtaaaagtttttcaattaatgaagttagacgtataaaaataggaatgaggagaaacctgcagcggtataaattgagaagagaattcttgataaaatcattaacccgtagaggaatcattacggatgaaactattttgtctgaatctggtccgtcatctacttttgagacttatagattaagagccaaggctgcttgcgaaagaatagaacttgaagaatttgcgagggtcttgttgatgattaacaagaaaagaggttataaaagtaatcgcaaaattaaggacgctgattcacagggtagtactatgattaatagtattgatgtagcccgaaaattatatgatgaaggtttgactccaggtgaattatgtaaggatttgctgaaggatgggcaaaagcgtctacctgatttttataagtctgatttgcacgatgagtttgcaagaatttggcaaaagcagaaggcgttttatccagaaattctgactgatgaagcgtatgaagagatgcttaaatcgaataaggtttatgatgttttatcaaattttgccaagtatgagataactaaacccaaaaagaaagagcctctattgcaaatttatagtaatagagttgcctctttgacaaaacaaatatcgatagaagatttggcttcggttatttcttctctaaaagttcaaattaataaggcaaacggatatttaggtaatattagcgacagaagtaagattttgcacatcaataatattacagttggtcaattcttgttggataagattaacaataatcctagtgcaagcataaagaacaacgtcttttaccgtcaagattatttggacgagtttgaagttatttgggagcaacaggcaaaatatcatgcagtgcttactcccgaactgaaggaagaaatacgtgatattattatattttaccaaagaaaacttaagagccagaagggatctgttggtttttgcgagtttgaatcatctaagaaaatagttgatgggaaggagattactataggagcaaaagtagcaccatgttcgcatcctatttttcaggaatttaagatttggcaagttcttaataatttagaggtttctttggttgagcctgtgtatgctgaggctatatattctaatgtatttgagtgctttgataattctttcaagtctgacgaaagtagaaaacttgagcaagaagaaaaagaagtcttggcaagggaacttttttataagggtgatttgtcaaaatctgatgttttaaaaatcttgtttaagaaaactaagggtcttgatctgaactttgataaagttagtggtaataagactacgcatgcgatattttctgcttttgccgaatattttaatggcaaaaaggagaatactattgactttaagaattctgcaaatgaaatagaaaaacactttaagtctgcatttgataaatataaaatcaatacagatttactaaagatagatttgagtaaaagtaataaggagatagaaaaagagcctttgttcaggttgtggcatttgctatattcttacgaaggtgataattctgtttcaggagtagaaaaattgattgagaagttgaaagaattgtgcaacattgataatgattgtgcagcgattcttgccaatgttacttttgaaaacgactatggaaacctaagtgtgaaagctatgaataagattttaccatttatgaaagaaggtgaaaggtatgatcttgcatgtgcggaagcaggctatcgtcattcaaaatcatctttgacaaaagaggaaattgaaaacaaggttttgaaagacaagttatcactccttccgaagaatagtttgcgtaatccagttgttgagaaaattcttaaccaaatggtaaatgtagtcaactctgttatagatacttatggtaagcctgatgaaattagggtagagttggcaagggagttgaagtcttcgcccaatagatgcgacccgtcgggggatgaaattagggtagagttggcaagggagttgaagaaatctacaaaggagagagaggatttaaattcggcaattttaaaaggtaataaagaaaacgaagccgttcgtgaggtgttgagaaaggaatttaatatttctaatccaagcaagaatgatgttattaggtataagttatatcaagaacttaaagtcaatggatacaaaacgctttactcaaataaaaaaatcgatttgggtattctgtttagcaatgagattgatatagagcatattataccgcaagcaagattgcttgatgattcgttctcaaataagacgttggagttccgtgatgtaaatattgaaaaaggaaatagaacggcatacgattatgtcgcttctaaatatggtccagaggagttggaggcttataagaagcgatgcgaagctgtatgcattgaaggcaagaaagccaaatttcgtaaattgatgatgactgaggctgaaattccagatggattcattgaaagggatttgagggagactcagtatatttccaaaaaagcattggagatgctaaatgaggtatttaagactgttactgctactactggtagtattaccgatgagttgcgtaatgattggcagttggttgatttgatgaaagagttgaatcttccaaaatatgaagcattgggagaggttcgtgaaatcgaagattcaaaaggtcataaaaagaaagttatcaatgattggacaaagcgaaatgaccaccgtcaccatgctgttgacgctttaacggttgcctttactaagagcgcattgatacagtattataactataagaatgctgcgtggatagagggtcataagggtcatgcggttataagtgcaataaaagcaaagtattttgagggaggaaaggcaaagtctccaattcctcttactacgtttagggcagaagttaagagagctcttgaaagtttgttggtttctatcaagtcaaagacaaaggtagttactaaaaataagactaggataaatagaaacaatggtccattggagcagaataccttaactccgcgtggtgaattgcatgaggagacagttcgtggccgtataaaagttcctgtttgggagaatgaaaaaattggtgaggattttgatgctcagaagataagcagagttgcagatgtaagatatagaattgctctatcaaatagattgaaggaattcaacaatgatccaaaggctgcatttaccggtaaaaattctttaaccaaaaagcctataaattgtggggatggagaaaccgttccgcaaaaggttttggtgaagcattttgaagatgtttacactgttagaaaacctgttgatgagaatttgaatatcgagaaggtgttagattcacgaatccgtcaattgttgaaagatagggtggcgatgttcaagtctcaaaaagaggcatttgcagatttggaaaacaatccaatttgggtaaataaggaaagaggtattgtcttgaagagagttactattggcgaaaaactcggtaatgcagtggctttgcattataagaaaaataaagatggtaaattcattcttgacaaggaagggaataaaattcctgttgacttcgttaagacaggaaacaatcaccatgctgttatttatcgagtgccgcaaaaaggaaaagatggcaaattaaaatacgataaatatggcaatcttgagtatgagatagttgatattgtagtacctttttatgaggctgttagaagaaagtctgaaggtttggatgttgtcgataaaaacttaaataaggaagcaggttgggaattcttgttctcaatgaagcagaatgaatattttgttttcccgaatgagaaaacaggctttgacccgacaaaaatagaattaactgaccataaaaattattctgccattagtccgaatttgtatagggttcaaaagttttcacaagggtattacttgtttagacatcatttggaaacaactgtgaaaaatgagtctaaagaaatgaaggatattttgtataaacgtattacaagtttgaagcaatttgagaatatggttaaagtccgtgttaatcatataggtgagatagttgatgtaggtgaaaagtaattaaaattcttcaagtatgataaagaaaacaatttattttggaaatccagttaatctgacattgcgaaatgcgcaacttgttataagtcaaccagagaagaaagaggagaaagactggtatagcaagcattcgcaagttacccgacctattgaagatatcggattggttttgcttgacaataagcagattaatatttcaattggtgctttatctgctttattagaaaataatagtgctattgttacttgtgattccaagagtatgcctgttggcatgatgcttcctttgtcaggaaatgcaacacagaatgagcggttcaggcatcagttaggtgcgtcattgcctttaaagaaacaactatggcagcaaacgataaaagttaagattgcaaaccagatgtcagtccttgaacggcatacaaacgaagaagtcggatgtatgaaagtttggagtgaaaaggttaaaagtggagatcccgataattttgaggctcgtgcagccgcttattattggaagaacctttttaaaatacctggatttactcggaagcgagaaggaatcccaccaaataatcttttaaattatggttatgccattttgcgtgccgtcgttgctcgtgggttggtggcaagcggtttgcttccaacattaggaatacaccatcataataggtataatgcatattgccttgctgatgatattatggagccatatcgcccctatgttgatgaattggttttagaaattgttcgtagtggctgtaactatgaagagttgacaaaagaattaaaggcaaagttgttggttatacctaccttagatgttaagataggagggaaaaagagtcctttaatggtggctgtggggcagacaacggcatcgctttacaaatgcttttctggagagttaagaagaattttatatcctgaaatgtaatatcaatgatagagagaattagtcagtatagaaatatgtggttatttgtattctttgacttgcctacggaaaccaagcaagatagaaaagcctatgccaagtttagaaaaaacttattgacaaatggctttacgatgtttcaatattcgatatacattagaaattgtccgagttttgaaaatttgaatgtccacattaaaagagtaaaatcatttttgcctgggtgtggaaaagttgtaattttttatgttaccgaaaaacaatttgcaaatatggagttgttttatggtagtaaaagtcaaaagataatgactgcgccccagcagttggaattgttttaaccaaaatcggtcattagaggt

SEQ ID NO: 2454 - DNA, 8451 bp, synthetic construct
  misc_feature 1..8451: note = Synthetic
  source 1..8451: mol_type = other DNA
ctccgtacttgacggcaagctgctccagtgtctgcttgccctctatatagtcggttataacacggactttatcccggcggataccaccgtcaaaacggcgtccgcagtccttgcatttgtaccgttgtgtgcggcctctcaggccattcctgaccacattcgcagacccacagaaaaagcatttttttaaccatatcagtgataatcttcacaaaccttagctttgcagagtggttcactgccccaagatttgtttgccaaaagtaataaatttgtgcagataaagaaagtttaacaaaggacaatggagccggacggttctcaatctccacgaatgggaaagacccgagtatcttttttgccccgtccggcccgttgatccaggacctgaataagaatgttgccttagagtgaataaggtttgtaggtgagggatcgacggcccactgtccacaaaaatcgacgcaagttatgaaaaaaatcaaactcggcattgacatcagcaaggaaaagttgaatctttgctacttgtcgaatctggaaatcgtcagcgaagaggaagtcactaacgatgtgaaaaccattaaaaaggcgttcaaagatgctctcaagtccctgtctgtcaccgaggaggacatcctcgtgtgcgcggaatacacggggagatacatttatccattaacagtcgcgtgtcaggagatgaaagtgtttctatggctcgatgacccgacccgcatcaagaattcgatggggcttacccggggcaaaaacgacacgatcgacgccaagaggattgccgagtacgcgcatcgttacgaagataaagccgtacgctatgccattccgggcaccgctcttgtgtcaatgaaaaacctgctctccgacagggagtttctcctcacggacaggaagcggtatcaagcgcagctgacagaccaagagaagtatatgtcccctaatgatttcaaacataaagacaaacgctggaaggaggtcataaaggtcatagacaagcagatacaagtcattgatgaggagattgattctctcatcgccgcagatccggtattgaaccgacagaaggagctgctgaagagcatagacggaatcggggaaagaatcgccatcaacatgatcgccatcaccggaggctttacgcgcttccagaatgcgcgtcagttctgcagcttcgccggactgtcgccctacaagtacgactccggctcttctgtccgctccaaggcaaagatttccaagcggtcgaatcagacgatgaagaccttgcttcatatgagtgcggtaaatattgcgacaaatatggaaggagaatacaaggattattacgaacgcaaactaaaagaaggtaagcatgttatgagtataatgaatgttctgagggcaaagcttgtacatcggatgttctccgtcataaggagagatactgaatacacaaaacaatattctccagcatcgtgacagtcgtgaaaaacttctcgggggaaggccgggcggccaggggcggaacgccccgatgaacgcaatgaatatccacaaaacacaccgccgaatcgaagtggcgaactcaaatataattctttacaaaacccttggaaaatccataagaatagatatataaatcaacctgttgcaaagattttatcaccccaaatgtccaccccgccgcagattactatcgctcattagctgaaaagcgtttcatctaatttctttatattgcagaatcttaacaagttatagaggttataccaaccaaaaatgtcaattatacccaaaatgtcgattgagccccgggaaatacaatcactgctgcataagaagaaggcgagtcgaatgatatgacccgccttaaatgttttcacaacggaatgatccttattgtgaattgctcaatctttgttctgcaaatttaataatatagcgtgaatagcaaaaattttttcataaatttgaaatcagcactaaattctaataactatatgaaaaaagttcttggccttgaccttgggacaacaagtatcggctgggcgttggtaagccaggcggagaatgaaggtgaaaaatcgagaatcataagggcgggcgttagagtaaatccgttgacgacggatgaaaaagacgggttcaatgcgggtaaggacataacgacaaatgctgaccgccgtattaaacgaggagcaagacgaaacctgcagaggtacaagctgcgcagggaaaacctgctgtccttgatgaggagccttggttggattgaaggtgatactgttctgtctgaagacggagagggctctactttcagtacatatcggctgaggtcaaaagctgctgctgaaatggtaagtcttgaggaacttgcccgcgtattcttgatgattaataaaaaacgcggttataaaagttcacgtaaggcagcagcttcagatggagaggatggtcgtttgattgacggggttgaaatagcgaaggtcctgtatgaggagcatctgacccctgctcagcattctttgcgtcttattgaagaaaatcatctgaacgcgagacgtctgcctgactattatccgtcggaccttaaatccgaactagataggatttggagtgctcagtcttctttttatccggaaatactgactcctgattttcgtgagatgataaaggggaagagccggatacaagtcgctaaaatattcagagacaagtttgatgtcctgactgcagacaataaaggcaaagataagaagattgttgcactgcactggcgggtcagtgctttgtcggagcggttgcagccggatgttctggcgtatgtggtggcggatatcagtgcggcaatcagtgatgcaagcgggtatctcggggatattagcgataggagtaaattcttgtatttcaataagctgacggtaggccagtacctttattcagaacttgagaaagatcctcatttcagagtcaggaacaaggtgttctaccggcaggattacatggatgaattcgagcggatatgggagactcagaaactgtttcatcccgaattgacagaagaacttaagcacgagttcagggatataataattttctatcagagacgtctcaagtctcagaaaggtcttatcagtttttgtgagttcgagagccataagattaaaaagtctgtaggaggaaaagaaaaggaaatcacgatagggtgtcgtgtcgcccctaaatcgtctccgatgtttcaagaattcaagatttggtcggttctcaataatatcgtggtgaccggtccggaaggagataaaagacagttgacttctgaggagaagacaaaactgtcggttagtctccagctttatccgaaaatgtctgaaaaagaagtggttgctattctcttcggtaagaaagcaggagctattctgaattataggcagatagaagggaatgatacaatgtccgcctttttcgacaaatatttggagatagcctctctttgcggttatgacagcattgcaggaaggaaaacagcggaagaaaagttagaagccctttctgtatgttttaaacagaacggcttcaatacggatattttgcggtttgattcaagtctgcctaaagaacaatatgagcagcagccgttttttaaattgtggcatttgctatattcatacgagggagacaagtccaagacgggcaatgcatcgttaatcgagaagataactgaactcagcggtatgcccgaagagatggcctccgtgttggctggtcttacattcaaggatgactatgcatccttgagccataaggcgataaggaggattcttccatttctgaagaatggatatgtctatagcgaagcctgtgagatggctggttacagacattccaaggactctctgacttctgaagagcgagataatcgagtattggttgatagtctgactacattgccgaagaattccttgaggaatccggttgtggagaagatacttaatcagatgatcaatgtggtgaatgcgataggcagaaaatatggcaagccggatgagattcacattgaactggcgcgagaactcaagcagtcaaaagatgaaaggaagcaggctacggaggcaatcgcgaagaataatgcggaaaatgaaaagctgaaggctgaactgcagcgagatttcggcctgaagaacgtcagccgcaatgaccttatcagatataaactgtatcttgagttagaaggcaacggttttaaagccctgtattccgacagatatatctctcaagaacaactgttctctaaagaaatagacatcgaacacattatccctcaggccaaattgttcgatgattcgctttcgaacaagacgctggaatttcgtgatatcaatcttgagaaagggaatatgactgcatttgacttcgtggaaaagaaatatggggttgaaggtttggagagattcagaagcaaagtcgatgatttgtgcaaagctcattcgataagtgagagaaagaggaagaatctgttcatgacagagtcggagataccttctgacttcatcaacagggacctgaaagattcccagtacatcgctcgaaaagcaaaggagattctttcttcctacgtacgtatcgtgatgtccactacaggttctgtcaccaagaggctaagagaagactggcgtcttgttaacgtgatgcaggagattgatatggacaagtacgacaaggtgggtcggacatattatgaagagcaccgggacggttcagttgagaagcgtatagctgagtggagcaagagggatgaccatcgtcatcacgccatggatgctataacgatagcgtttacgaagccctctcatattcagttacttaacaatcttgttgcaagaagcgacaaaggcggcgcgatctacggcatttggataaaggaaacacatcgcgaagattccggatggacattcaatcctcctatgccctacgatgaactgcgtgctgaggtgaagaacgcattggaagggactcttgtttctcacaaggccaagaacaaggtgatgaccaggaacgtcaatagaaccaggaagaaaggaggcttcaatgaaaagattgagctgacacctcgcggagccctgcataaagaatctgtttatggaaaattattgaggtatgagacttcggaagtttccgtgaatgccaagatgacgaaagatgtcattgaaacggtttccagaaaagcagaacgcgacgcgcttatggccagatttcatgaaaacggagatgatcccaagaaggcgttctcgggaaagaacgctttgtctaagaacccgattttcattgatgaggctcattcgcgccaactgcctccgaaagtgaaatgcacgaggttggtggtcagctataaattgcgtaagacagtggaccaaaatctgacaatctcaaaagtcgtggatactcgtgtgagaaaattgttggaacagagagttaaagattatggcggagacatcaaatcggcattccaggatttggacacgaaccctatatggctgaatgaagaaaaacgcattcccgtgaggaccgtgaccatatctgagaattttgatctttcggctctgcacgacaagaggaacaaagacggacagttggaattccctgaggctccggctgatttcgtgaacctgagaaataaccatcatatcgccatctatgtagacgatgatggtaaatatcaagaaaaggtcgtgacatatttcgaagctgtccagagggtgctggacggtctttctccggttgacaagactttcaactcgtatttgggatggaaattcctgttcagcatgaagatcaatgaaatgttcgtatttcctgacaaggagacggactttgtcccgacggagattgacttgaccgatccgaaaaactacagcatcgtcagccgtcatctgttcagggtgcagaagttgagcagtggagattataattttagacaccatcttgaaacgaagattgaaaacgtgaaggaattgcagaatatttcatggaaaagaatagcatctttggataatctccgaggtgtagtcaaggtaagaatcaatcatttaggagatatcgtcgcagtaggagaagaatgataaaacggacaatatacatcgggaatcctgcatacctgtcgctgtccagccgccagatgataataagacggctttcgacagatgtgaccggtgaagatatcgccggaagcatacctgtcgaggacataggcgtcgtcgtcattgacaacaggcaggtgaccataacctcaggcctgatagatgcgctgctggaaaacaacgtggcgctgatatcgtgcgatcgcaggtcgctgcctactggtctgatgcttccgttgtgcggccatacgatacagaacgaacgtttccgctgtcagctttccgcgtctttgccgctgcagaagcaattatggcagcagacaatccagatgaagatcacaaatcaggcagcctgcttggcatattccacaggggagcggcacgagaatatgacgatatgggcggcaaaggtgaagagcggggattctgataatatggaggctcgagcagcagcatattattggaagaagctgtttccgataatgcccgggttcacaagagaaagagaaggtatgccgccgaacaatctgcttgattatggatatgccattttgcgggcggtcatagcaagggcgcttgtgtcaagcggtatgctgcctacgttggggattcatcaccataacaggtacaatgcatattgtctggccgatgatattatggagccttatcggccttatgtcgacaggtttgtagtggatatcctaaatgaatcacacggagagggtatggatttgaaaaaggatatgaaggcccgtctcctgacgattccagtattggatgtcagtatcggagggaagacaagtcctctgatggtcgcagcgtcaacaacgtctgcatctttgtataagtgttttttgggggaggccaggaaaatctcatatccgaatatgacggatgtccagaataagccagtatagggtcatgtgggttctggtcctgtttgatttgccgaccgatactaagcgagataggaaggttgcggcgaagttcaggaaagacctgataggggacgggttctcaatgttccagttctcaatctatattcgtcattgtccgtcatatgagaatgccaatgtgcatatcacgagggtcaagagaatgcttccggagaaaggcaaggtcggaatcatgtgcataacggacaagcagtttggtagtatggagttgtttgttggcgcaaagtcttcggacttgcctccgattgcgcagcagctggaattgttctaggattcaaaatatgtgtagaatcaaataaggatttgacttttgacggtcaaatccttattttctaaagtgctttacaactgcttgaacgtcagatgattgcttggattctgctgtaaagctgaatcaaaattacaaagattgagagcaattcacaacgcgtagtcgtaggtcttctcggtgccgttcgctgtaaagctgaatcaaaattacaaagattgagagcaattcacaacgaacgggaaaacactaacatactggagtttgctgtaaagctgaatcaaaattacaaagattgagagcaattcacaacaccccgtgaagacgttcgacctcgacttcagctgtaaagctgaatcaaaattacaaagattgagagcaattcacaacatagcaaagtcgaacagaagcgtcgaggggctgtaaagctgaatcaaaattacaaagattgagagcaattcacaactgttccaatcaccttaaatcctattgaaggctgtaaagctgaatcaaaattacaaagattgagagcaattcacaactatgtttcgtcgttctcttcgtggttattggctgtaaagctgaatcaaaattacaaagattgagagcaattcacaacacttctctcgcggtcgcagcagtctgctgcgctgtaaagctgaatcaaaattacaaagattgagagcaattcacaactgactactgattttgctgctctctatggttgctgtaaagctgaatcaaaattacaaagattgagagcaattcacaacttatactgctgccggtgctgctaatgctcagctgtaaagctgaatcaaaattaggcggggtggacatttggtaggatgaaatcgttgtaatagattgaaatccatatctttgtaaagattatcactgatatggttaaaaaaatgctttttctgcgggtctgcgaatgtggtcagaaacggcctgaaaggccgaaaacaattgtataaatgcaaagactgcggaaggcagtttctgggcggtcgtcgtagagacaaaagccagataattaccgactatatagagggcaagcagacactggagcagcttgccgtcaagtacggag

SEQ ID NO: 2455 - DNA, 8326 bp, synthetic construct
  misc_feature 1..8326: note = Synthetic
  source 1..8326: mol_type = other DNA
ataggtgcttttaccagtatctaaaataaatgaactttatgcagtttggggcaagacataaaaaaagcctcccagttaaagtcgagaggcaaacttaaatgttttcacaacggaataatccttattgtgaattgatttcaaattgttttacaaatataacaaaaaaaaacaattttttttacgggtttccgcattctgcttttttctttttattgtaaatttaaaatgttattaaaaaacaatatgaaaaaaatattagggttagatttagggacaacatctattggttgggcgcttgtaaacgaagctgaaaataaaaaagaaacatcagaaattataaaattaggcgtacgtgttacaccattaagcactgatgaggttatagattttgaaaaaggaaaccctttaacgatcaacgccaaaagaactgaggctagaggtgctagaagaaacttacaacggtttaaattaagaaggtcacgattaatacagttgttaactgaaaacaattttattacccctgataccctattagcagaggttggtagtaacaacacttatgaaacattaaaatttagagctcgtgcggctaaggaaaaaatagaaaaagaggaatttgcacgagttcttttaactattaataaaaagcgagggtataaaagtagtcgaaaagctaaaaatgaagaggaaggcactttaattgatggcatgtctgttgcaaaagaattatatgacaaaaacttgacgccagggcaatttgtatatcaattactttctaaaggaaaaaaatatattcctgatttttatcaatctgatttgaaaaaggagtttcataacatatgggaatttcaaaagaaacattaccctacaattttaacaaaagaattatttgaaaatttagaagggaaaaacaaaacacaaacttgggctatctgtgcaaaaccctttgatattaaaggcataagccataaaggtacagctactgaaaaacgaaaagagaaatatcagtggcgaacagaagcattacatactaagcttgatttagaactactagcaatcgttttacaagaaatcaataatgatttaaataaatctagcggttatttaggagcaataggtgatagaagtaaacatctgttttttaacaagataacggttggtgaacacctttatgctcagatacaagaaaataatcatacgagtttaaaaaatcaagtattctacagacaagattatttagatgaatttgaacaaatatgggaaacacaatctaaattttaccctgaatttactgaatctttaaaagaagagataagagatgttattatattttaccaaagaaaattaaaatctcaaaaaggattaatcagcatctgtgagtttgagaaaaagactataaccattactgtagatggtgatgttaaaaataaaataataggcccaagagttgtcccaaaatcatcacctgtatttcaagagttcaaaatttggcaaaatttaaataacttagagtttagttctaagagtgctgtaaattctaaattagaattatcaattgaggacaaagagtttttatttaatgagctaaacttaagaggggaattaaaagattcgcaggtactaaaactattaaatttaaaaacaaaagattggaaatgtaactacgaaacaatagaagggaatactacaaataaagcaatctttaatgtcttacaacatctatcacatgatgaaggctatggttttgattggaataagaaaacggcttcagaaattattgaagaattacaaactactttaccattgttaggtattgataagggactattaacgtttgacgttaatagcccgaatttaaaaaccgaaaaaagttatcaattatggcatctcttgtattctgctgaagatgatgtaaaaataactaaagcagacgaagttgtttacggaaaaaattctgttgatttaaagaagaaattacatgaaaaatatggcatacctattcagtatacggcattgtttgctaatattagtttacagcctgattatggtaatttaagtcataaagctatccgtaaaataatgccctatttacaagaaggtcatgactattctgaagcttgtaaattagctggttacaaccactctaatagtatcacaaaagaagaaaacttaaaaagagagttaaaagacaagcttgaaattgtaacaaaaaacagtttaagaaacccagttgtagagaaaatacttaatcaacttgttaatgtcgtcaatcagattattgatacttacgggaaacctgatgaggttagaattgaattggctagagaattaaaaaaatctgcaaaagaaagaaagttaatgactgcaggtattgcagcagctactaagagaaatgatggttttaaaaaaatcttacaaaaagcaccgtttaacatcttaaatcctacaaaaaatgatgttgttaaatacagactgtataaagaattagaaccactgggctataaaacattatataccaatcaatacatagcccctcaacaactattttcaaaagatattgatatcgaacatattataccaaaagctaaattatttgatgattcattttcaaataaaacattagcttttagacgtgttaatcttgataaatctgacatgacttcttttgattttatatcagataaatataacactgaattagaaggttatataaacagggtgaacacattatataataatggtaaaggtgaatttagtaaagcaaagtatttaaagcttttaatggaagagtgtaatttaccagatggttttatagaaagagacttaaggaacacacaatacattgctagaaaagctaaaaacatgcttcatgaagttatccgagatgtttatgctactacaggaagtattactgatagattaagaggagattgggacttgattaatgtgatgaaagaattaaacttgccaaaatatagagcattaggtttaaccacatatgaagaaagaaaaaacggtaataaagttgaacaaattattgattggacaaaaagaaatgaccacagacatcatgcaatggatgcactagcagttgcttttactacacacaatcatattcagtatattaataacttaaaagctaaatctgataaaaatagtattatatacagcatacagcaatctataacttctaaggacgataaaaacaaacgtgtttttaatgcgcctatgccaaactttagagaagacgccaaaaaacatattgaacgtatcttaatctcatttaaaactaaaaacaaagtcgttacaaaaaacgttaatactattaaaaccaaaaatggtttactaaagaaagttcaattgaccccaagagggcaattacataaagaaactgtttacgggaagtcaaaaagggaagttattaaacaagaaaaagtgggaggcacgttttctattgaaaagataaataccataacaaaacaagaataccgagacctgttattaaaacgattagcagaacataataatgaccctaaaaaagcttttacaggaaaaaacagtttagctaagcaaagtatattattatcagatggtaaagatttacccatacttgtcaccacaaaaacttacgagactatatacactattagaaaggcggttacacctgacaattttaaagaccttaagagtttacaaaaaatattagataagaggactagaatattactagaagaacgcttatcaaaacataacggaaatgcaaaagaagcttttacaaatttagatacgaacccaatttggctgaatgaagatcaaggaattcaactaaaaagagtaacaattactggggtagccaatgttgaagcgttacatgacaaaaaagatcatcttggaaagcctatcttgaatagtaatggtcatactcaagccgtagattttgtgagcacaggtaacaatcatcatgtggcaatttataaagatgctaaaggaaacattcatgatgatgtagtttctttatataaagctacaactagagctaatttaggagagccaattataggcaaagattataataaagaaattggttgggaatttttatttactctaaaacaaaacgaactatttgtttttcctaatgatgattttaatctacttgaactagatttattagacaacaaaaactatgctttaataagtccgcatttgtttagagttcaaaaattttcaaaagtagaatatggaaactcggctgttagagattatatgtttagacatcatttagaaactcaaataaaagatgtaaagccacttaaagaaatagcttatatcaatttaaaaagtgtagcgcggatgaaaaacattattaaagttagaatcaatcatattggtgaaattgtacaggttggagaatactaatcaattatactatgataaaacgcactatctatattgggaacccaacatacttaaaacttaaagacagacaacttgtaatagagggagttgatggcatacaaaaaggtactgtagctattgaagatatggccttgttagttttagatcattatcaaattacattgagtacccaattgatgaatcaattacaatcaaattgtgttgctatagttacatgcgatagtcatcacttgccttttggaattacactgcctttgtatgggcatacagaacattctgaacgtgtaaagtatcaattagaagcaagtgaaccattaaagaagcaattgtggaaacaaactattgtacaaaaaattaaaaatcaagaagcactacttaggttatacaatcgggtttctgaacctatggaaacctattggtcacatacaaaaagtggcgatactaccaatacggaagctaaagctgcacaacattattggaagaatttattcccagaatttcaacgccatcgttttggagatgggccaaataatttattgaattttggctatgccatattgcgaagtatcgtagccagagcattggtaagttcaggattattacctgtttttggtatttttcataaaaataaatacaatccatattgtttagctgatgatgtaatggaaccctaccgcccttttgtagataaaatggtggtgaactatgttacaaattatacaggttctgaagcattaactaaagagacaaaggcttatttattaggtattgcaacacaagatgtttggattgatggtgtacaacgtcctttaatggttgctgtaaccacaacaacagcctctttatataaatgttatacaggagaattacgaagtataaaatatcctgaattagattaaacgaaatgtctaacgatagatttaatgcatatagaattatgtgggtattggtgttttttgatttgcctacggaaactaaactagaacgtaaagctgccagtcaatttagaaaaaatttgataaaagatggttttagcatgtttcagttttcaatatacttacgtaattgcccgagtagagaaaacgctaatgtgcatatacggcgtgtcaaaaatgccctgcctaaatatggtaaaataggtgttttgtgtgttactgataagcaatttggaaacatggagttgtttcatggtaaaaaacaagcagaactgccaggtacaacacagcaactcgaattattttaactattcaattcttttttttaataaaaattacactaaacaacacccaataagcccttttttgagtttctaaaaaacaatccctaagcctttagtagtctaaagtcttagggattgaccatgtgattgctcacataaaaatacaatttgaaatcaattcacaacccagcgtggttatcttcgcaaatattattccatgtgattgctcacataaaaatacaatttgaaatcaattcacaacatccaagtatttgaacctccgtcccaatctcatgtgattgctcacataaaaatacaatttgaaatcaattcacaacacattattaagtataaatgtttcatcacttcatgtgattgctcacataaaaatacaatttgaaatcaattcacaacatactcttctaccttcgtttaactcagtatcatgtgattgctcacataaaaatacaatttgaaatcaattcacaacactcaatcttttctgcttttcgctcaactccatgtgattgctcacataaaaatacaatttgaaatcaattcacaactcttgtgacttattagccttctcagtttgtcatgtgattgctcacataaaaatacaatttgaaatcaattcacaacgcaagaagcatatgagaaaatcaatccaagcatgtgattgctcacataaaaatacaatttgaaatcaattcacaacatggtacgtgttggtaaggcattatcattacatgtgattgctcacataaaaatacaatttgaaatcaattcacaactttataagacataggttttgtgaaaaaatacatgtgattgctcacataaaaatacaatttgaaatcaattcacaaccacgaatgctgtcaggcaaaggcgtgttgtcatgtgattgctcacataaaaatacaatttgaaatcaattcacaaccaattaccccctacgctccaatctatattacatgtgattgctcacataaaaatacaatttgaaatcaattcacaaccgctcaatacttttactaatggtaaatacaaatgtgattgctcacataaaaatacaatttgaaatcaattcacaacacttcttctttagtcttacacgcttttaaacatgtgattgctcacataaaaatacaatttgaaatcaattcacaactagactctttaagcattgaatcaaaagtttcatgtgattgctcacataaaaatacaatttgaaatcaattcacaacattaatttacgttgtccataaatattttttcatgtgattgctcacataaaaatacaatttgaaatcaattcacaacaataggctttttgtattgtaatgctaagttcatgtgattgctcacataaaaatacaatttgaaatcaattcacaacagataagtattgttttgcttcatttttcatcatgtgattgctcacataaaaatacaatttgaaatcaattcactacattaaaccattgtattctgcttctggcatacatgtgattgctcacataaaaatacaatttgaaatcaattcacaacatagagtgttgattgacttttccagatttgcatgtgattgctcacataaaaatacaatttgaaatcaattcacaacatacgtgtatgctaataaaaaccgttatcacatgtgattgctcacataaaaatacaatttgaaatcaattcacaacagatgtttataaattaggcgtaagcagaaacatgtgattgctcacataaaaatacaatttgaaatcaattcacaacgcttttctatctgttatactctttactttacatgtgattgctcacataaaaatacaatttgaaatcaattcacaacagtctctagccaagtcccgttataaatattcatgtgattgctcacataaaaatacaatttgaaatcaattcacaacacacaaataactgcattaaacttcaagaaacatgtgattgctcacataaaaatacaatttgaaatcaattcacaacacaaaagatgatttatttattttaactttaaaaaatcgtcatcaattctatcactaatctttttagggatttcatgttcatctgcaaggccaacccatttagacgtcaaggcttggatgttttcaataatacctattggatttttaattgcaaattcttcagcaatagtaaggatatctttaattgttattgaagtacgctttccattaatagacaatgctcttgaggttgatttaaacgtaaataatggatttagcgcataggttagatcataagcaggccctaaattccaactattactttctttattatagataaaactatggttttttaaatggtcgtctacattacgaaaaacaagattgaatatcattcgcttaaataattgttgcagatctttatgaggaacttctaaggctaatgccactttaaacacattttcataagatgaattttctggctgacttttaaagtcccaacctgttagtccggtaacggttaatacgtgttgtttttcaccgttttgcctgtcgtatcttagtgtggcgaaatgtttgttttcaatcaatttagatggcatcatattaatacctgcctcttgtgctaataaataatatacatattctactttttctttattgtaaccatcactatcttctatatgcaattttactaaatagt

SEQ ID NO: 2456 - DNA, 8200 bp, synthetic construct
  source 1..8200: mol_type = other DNA
  misc_feature 1..8200: note = Synthetic
tagccagtgtagccgcgcaacacctcgcccacggccagataaaacacgaaatcatattccttcacggtgtcgaccataatcccgactgcggtatttccgtcgccaaaaagcagcaaggcagccaccaaaaccactacaaaggccccaaggttgacggccagccccaccactacgtagagccaccggctgcgcaaccacagccggtgcatgggtgtgccgagcgttatctcacggctgaaaggcttgcggcgcagcttccagcagtacaggccgtagcccaatgcggcaacgcttatggccgccagtatggccaaacctttaatgtcggaaaatccgtcaataacacctaagatgaccgttaccagcaaacacagcaccccgaaggccgtccacaggcggccttcaggcttcggcggatatgtgtaacggactatcttcagctgaccaaaatcaattccaaacataactatttctacttatatcaacaccggtcttactccatttcgcaactgcctgagcatcagtcgcttacgaaacgccttgcaaaaggtggcctttcgccttccaaaagacggcctttcgggctgtaaaaggcggccttttacaaggccgtttgccgcctttcgcatgacggcacataaccgaacgcacggcgcgagcccgatttttcatttttaattgttaatttttaattcttttaatgattcagcgtgcctgtgttgatgacgggctgcgccgtatcgtctccgcagagaaccacgagcagattgctcaccatggccgccttcttgtcctcgtcaagctcgacgatttcctctgccgagagcttgtcgagcgccatcttgaccatcgacaccgcgccttccacaatcttctccctagccgctattatggccgtggcttgctggcggcgcaacatcacggcggctatctcaggcgcgtaggccaagtagttgatgcgcgcctctatcacttctatacccgccatggccagccgttcgtcgattttagcctcaagttccttgttaatctcgtcgctgccgtcgcgcagagtcagttcattgccgccagtctcgccgtcgtcgtaagcgtattggcccgccacttggcgcaacgccgcgtccgcttggatgcgcacgaacttctcaaaagcattcattatgttggccgtcgacaccgtggagacgcccacctccgactgcgacttggacgcggccattgtctgcgcgtcgatctcaaacatcgccttgtacgtatccttgagcttccataccagcaccatgcctatcatgacggggttgcccgtcttgtcgttcacctttatcggctccgcgtcaaggttgcgggcgcgcagcgacagtttcttggccgagaggaaagggtttacccaataatagcccgcacgggtgaaagtaccgcggtatttgccgaaaaacatcatcacgcgagcctcgcccggctctatgagcatgaagccgccgctgacgaaaaagttggcaaacaccagcactccgccgcccacaccggcggcagtggccgctccgccgctgaaagaagcgatagcaagcacgatgagagtgatgcccaaggcatacataagcaaattgaacacaagcatcgctataccgttaagcgtgcgtcctgagaacgtgaattcttggttttccataatcctataaagttttaattcatggtttttataatatcattttgatattacaaagatatgtgtttcccacgtattgcgcatcatttgcggacaaacattaaaatattttaacgaaacatacccgtcaaaacacccgattatgaattatgaattatggattatgaattaaatttgcactatgaaccagcttgaaactgacgaaatgtacatgcgccgttgcctgcaactggcacgcaacggacaagagaacgcccggccaaaccccatggtaggggcggtgatagtaagccgcgggggacgcatcataggcgaaggataccacgtgaagtgcggagaggggcacgcagaggtcaacgccttcgcctccgtcaaacccgaagacgaggccctgctgcgtgaggccacgatgtacgtaagcctagaaccgtgctcgcactatggccgcacgccgccctgcgccgaccttattataaggaaaggagtgaggcgcgtggtggtgggaagcatcgacccgttcgccaaggtgcaaggccggggcatcaggaaactgcaggaggccggcatagaagtgaccacggaagtgcttgaaaacgaatgtaacaagctgaacaaacgcttcatgacgtacaacatcgggcaaaggccgtacgtgttgctgaagtggtgccagacggccgacggcttcatagacgacggtttcaagcctaccatgctgtcaacaccgttcacccagatgctatgccacaagctgcgggccgagtatgacgcaatactcgtaggcagggtgacggccgagcgcgacaacccgcgcctgaacgtgcgccactggagcggacgcgaccctatgcggattgtgctcgaccgcaacaagcctttctgcccggaggccgacttctcgaagcccgtcataccgcaactgttcaagtatctgcacggcaagggggtgcaaagcctcatagtggaggggggcgccgacacgctgaaacgctttttggcgaaaggcacatggtgggatgagctgcgcgtggagatctcaccacgtactaccaaagacttcgggacgcgcgccccggaactgcccgagacggcaatgttcgtaagaagccaaaagtacgacgacaacgagatattatggtataagaaccgccttgtagaactggtcggcccatactattgctgaaccgacaactggcggatttacaaaagacttttaatgcaaggcaaaaaagtaatactaatatacttttacaacaactcgccactttgcttaaacccaaatcggccattatacttcatccgtatttcgtgacgctgcaaagttggttggtttccgcttttgtcgaagatgtagcgggctatatcgagaaaaagcgggaaacaagatgacgacagcagcgcgaaatacggatgaagagcaaacaatcaagtgaaaatgtatgattaacgtcctaataaccgatttaggttaaagtaaaaaatacttgaacacatctactcgttcctaataacaaaaagcccgccgttaaaggtcgacgggcaaacctaatgttttcacaacggaataatccttattgtgatttgcttaaaattctgtcggctaagataacggatttttgccatattccaaaatattttgctaattttttatatatttgcagaatacaattgtattttacaaccgacaccatgaaaaagatattgggacttgacctcggcccgaacagcataggctgggcactggtaaacgaaaaagagaacgacaacgaagcatcgtcaatacaaaaagttggagtacgcaaaatcagccttgacaacttcgtgagcacccaaacaggaaaagaaagcaaagaccctttaaaggactttcaaagcggaaagggtatttccacttgtgctggaagaacacaaaaacgaagtatgaggcgaaacttgatgcgctacaaaatgcgtcgtgacagtctaatcgaaacattaaaaagcaacggcttcataaccgatgaaacaatattgtctgaacacggcaacaaaactacatttgaaacatacgaactcagggctaaggcggcaactgaagaaatcaccaaggaagagcttgcaagggttctcttgatgattaacaagaagcgcggatataaaagcaaccgcaagattaaatccaaagacgaagacggacaaataatcaacggtcttgacgttgccaaaaaactacaaaacgagcatataactcccggacaatacgtcttgtcattaatacttcaaggaagaaaagacataccagacttttatctttcagatttacgcgcagaattcgaccgcatttgggatttccaaaaacaattttaccccgaaattcttacagacgaactaaaaagcgagcttgaaggcaagaataaaagccagacatgggcaatatgctcaataccgttcgacataaaaggcataagccgagaaacaaaaggcgacgaacagaagaaagagaattatacatggagagctgaaagccttgaacggaaaatcgacttagaaagactcgcaatcgtacttcaagaagtaaacaaccaactgaaaaactcaagcggatatctcggcgcaataagcgatagaagtaaagagttatatttcagaaggcagaccgtcggacagttccttatggccgaacttggaaaaaatccaaactatagcttgaaaaacaaagcgttctaccgccaagactatcttgacgagtttgagcgtatatgggaaactcaagctaaattccatgatgagctgacgccagagctgaaacacgtaattcgcgatattatcattttttaccaacgtcctctaaagtcacaaaaacgtttggtggacttttgcgaatttgaaagccgtcaagtagaaatggatattgacggaaaaaagaaaacaaagacaataggactaaaagcttgtccgacatcatcaccgctttaccaagagttccgtctatggcaaattataaataacatacaagtttcgggaatgattgtgcctgattcccaaccagacctgttcggaaatacccctaaatacaaatacgggaaacgcttccttgagcaagacgagaaagaaatgctcttcaaggagcttaccataagggaaaagctgacaaaaaaggacatcctaaaattattatttgaaaactacaacgagcttaacctcaactataaggaaataaaaggaaacacgacacaggccgcaatcgttaaagcttgcttgagaataattgagcttagcggacacgatacgacttacgtaaaacgaatgacatccgacgaaacaataggattcatcgaaaaaatattcaacgcattgggaataaaaacaaatttcctgcacttcgactcatccgtcgaaggtaaagattttgtcaaacaacctgcatacagtttttggcacctgctgtactcatacgaaggcgacaacaaatctgtcagcggtgacaagaaactgaaagaaaggatatcagaactatgcaacctaaatgagaattataaagagtacgctactgtcatggcaggcatagccctcgagcaaggatacggcagcctcagcgccaaagcgatacgaaaaatcctgccttacatgaaagacgggctggaatacagcacagcctgcctatatgccggctacaaacattcaaaaagatcactcactaaggaagaacttgacgcaaaacctttaaaagaccagattgcaccattaccatgtaatagcctgcgtagcccggttgttgagaaaatactcaaccagactatcaatgtcgtaaattctgtaatgtcacaatacggcaaacttgacgaaatacgaatcgaaatggcgcgcgaactgaaaagaagcgcaagcgaacgcgaaaaaaccgtaaaagcaataaaaaagacaactgatgaaaatgagaaatatcgcaaaacgcttcaagaagaattcaatatcaaaaatccaagccgaaacgacataataaaatacagattgtatcttgagttggaaaaaaacggattcaagacgctttattccggcacatatataaaacaagagagattgttcagcaaggatttcaacatcgaacatatcataccacaggcaaaattgtttgacgactcgttcgcaaataaaacactcgaggcaacaagcataaacatagaaaaaggcgacatgacagcctacgactacgtaagcaataaatacggcaaggaaggtcttgaaagatacaaacaacgtattgacgccctttatgaaaaaggagaaataagtaagacaaagcgtaaaagactgctcaccacggaagccgacataccggacggcttcatcaaccgcgaccttaacgaaacacaatacatagccagaaaggcgcgggagatacttgaagaagttgcaagaacggttacgcctacgaccggttcgataaccgacaggttacgcgaagactggcaacttgtagacataatgaaagaactcaactggaaaaaatacgataagctcggactgacagagattgttgaagacaaggacggcagacgcatcggacgcataaaagactggactaaacgcaacgacaaccgccatcatgcaatggacgccataacaattgcttttacgaaaccgagctacatacaatatttaaacaatctaaatgccaaaagtgataaaagcaaaagtatatacggaatcgagcggaaagaactttaccgcgacaaaagcggaaaactgagattcatcccgcccatgcctcttgacgaattcagggccgaagcaaaacgccagcttgaaaacgtgctcgtatccgtgaaggctaggagtaaagtcgtgtcatccaatatcaacatcactaaagcgaaaagcttcaccaaaggcataaggaaaaagacacagcttacacctcgcggacaattacacaacgaaacaatttacggcacgataagacaatataccgtaaaagaagaaaaagtaaacgcatcgtttgatgaaacaaaaataatggccgttgcttgtaaacgttaccgcgaggccctgcttgacagattgaaattgtgctacaatgacgcgaaaaaagcctttacaggcaaaaacagtcttgaaaagaatccaatattcattgacaaactgcacacggaaaaaattccgattaaagtcaaaaccgtaacaatggaaacaatatacacccaacgtaaggaagtttcaaaaaacttgaaaatagataaagtaattgacgtaaaagtcagaaaaatccttgaagaacggttgaaacaatatggaggtgacgcacaaaaagcattttcaaaccttgaagaaaacccaatatggcttaacaaggaaaaaggaattgccataaaacgtgtgaccataaaaggtgtaagcaacgctatagccctccatgacaaacgtgacaaccaaggccgccttatgcttgacgccgaagggaaaaagcagcccgtagatttcgtcaatacaggtaacaaccatcatgttgccatattccgcgatgacgacggaaatctgcatgaacatgtcgtatcattctatgaagcaacggcacgtgccatacaacatctccctgtaatagacaaagactacaaaaagagcgacggatggcaattcttgttcacaatgaaacaaaatgaatacttcgttttcccgaatgaagaaacaggttttgatccaaatgaaacagacctgcttaacccgaagaattatgcggcaataagcccgaacttattccgtgtgcagaaattatcaacaaaaaattacatgttcagacaccatctggaaacaactgtagaagaaagaaaagaattatatggaattacatggaaaaacctacgttccttatccggtattgacaaacttgtaaaagtcaggataaacaatcttggccaaatagtaggcgtaggcgagtattaacctcaaaaaccttgcgaacatgattaaacgaacactatgcttcaccaaccccgcctacctgtcgctgaaggacgggcagatggtggtacgcctgccggaggtggaaaggagcgacatgcccgacatgctgaagaaggaggccgtaaggacaatacccgttgaggacatcggcgtcgtggtgctcgacaacaggcagataaccatcactcaggggctgcttgaggccctgctcgagaacaactgctccgtaatcacctgcgacagccgcggcatgcccgtaggccttatgctcccgctgtgcggcaacaccgtgcagagcgagcgcttccgctgccagctcgacgcgtcggtgccgctgaagaagcagctctggcagcagaccgtcaaggccaagatagccaaccaggcggctgttctggccgcctgcgccggggcagagacgggatgtatgcgccggtggtcggccgacgtgcgcagcggcgaccctgacaaccttgaaggccgagcggcggcgtattattggaaaagcctcttcgccggcgtgccggggcttcccgactttacgcgcgaccgccagggcattccgcctaacaacctgctcaactacggctacgc

SEQ ID NO: 2457 - DNA, 8063 bp, synthetic construct
  source 1..8063: mol_type = other DNA
  misc_feature 1..8063: note = Synthetic
gttacttaagagaggctattgaaattgcagatgaattcctaaaaaaagatacacctattttattcactaaaaatagatcaggaaaaaccaaagaaagctttgcccaaaaaaaaggcatgtttgaagaaggagaattatacgttttaattaatgaaaaaacggcttctgcaagcgaagttattgctggtgctattcaagataacgaccgtggatggattattgggagaaggtcttacggaaaaggattggtgcaaaaagaaatgaatttaggcgatggtagcgcggttagattaactacttctaggtactacacaccttctggaagatccattcaacggccctataaaaacggctctcccaactattttaaccaatatcaccaacgatttaccaatggcgaattaaaagagaaagatagtattcctattaatgattccttgcaatttgaaaccaaagcaggtagaattgtgtacggcggtggtggcattgttcctgatgtgtttgtaccacaagcttctggcttgcaaaacgactacgaatacatgtaccaaggtggcgtaatggaccgttatgtgtttgactttatggagaaaaacagagtgttttacaaccaacttagttttgaagagtttcaagagaacaacacagaaattactaaaaatataattcaggagtttgaagataatttaaaccaactcaacttttcttataatttttctgaagacagtctgattctcaaaaactaccttaacgctgtaatggctaaacaattatttgacgatgaaaaatcccttcaaatcaaattaaaatacgaccccatgattgaagccgttgtagaacattaccaaggagattttgcattgtaatacctgttattagaattgataaatggtataaatactttctttttaatatccattcttacaaattatcttctactctatacgcatttaaaaaaaagctgtaaatttattgcatcaatttataagagctgactaatctttgattaaagaacagccttgtttttttaaagcatgaagttttatccaacttggtcttcgttaatcagattatcttacctcttgtttatttagtagttgaagtggtttgcttgaaacatttaagtaaaaaaaaggcgataccgaaacttcggtaccaccttaaatgttttagctcgtgaggttgttattttttaaaataggtactcgtgaacctcctacctcggtttagcgcgtgaggttgttattttttttaatggaactcgtgaaacatttaaaatgaaaaaagtgacacttgaataaacaaatgccactttaaatgttttcacaacggaataatccttattgtgaattgcttcaaaattgtgaaacaaatatagaataattttttaaaagtttaaatattatgaaaagaattttaggattggatttagggacgacttcaattggatgggcttatgtgaatcaagctgaaaacgaaaatgaagaatcttcgattattaaaactggtgtaagagttgtaccactttcaacagatgaagagaacgattttaaaaaagggaatagcattactattaatgcagatagaacactcaaaagaggagccagaagaaataaatttaggtatcaattaaggagaaaagcattaattgacgaattaaaaggaataggttttattgatgataaaacaaaactaacagaaactggaactaattctactcatgaactcctcaatttaagaaacaaagcagtaaccgataagattgaaaaagaagaatttgcacgcattcttttgtctatcaataaaaaacgtggctataaaagtagccgaaaagcaaacaatagtgaagagggagaactcattgattctatgggaatcacaaaacaactttatgaaaataattggacgccgggtgaattttcttatcaacttttaaaagatgagaagaaaactttacccgattattatcgttcagatttagaaagtgaatttgaaaaagtttggcataaacaaaaggagttctatcctgaaattttaaatgaaaaattatttactgaattagcaggaaaaaacaaaaatcaaacttggaaaatttgcgaaaagcctttcgacataaaaggtataaaacttgaaggcgatagaaatcaaaaaaagctagagacgtttagactaagaaaaatagcccttactgaacaggttgagttagaacatttagcgattgtttttcaagagataaacaatgaaattaaccaatcaagtggttatttgagtgaaataagtgacagaagtaaagagttgcattttaatgatttaaccgttggtcaatatctctacaatcaaatttctaaaaatccacattccagccttaaaaatcaggtgttttatcgtcaggattatttgaacgaatttcaaagcatctggaataagcaagctgaattttacccagaattaactgacgacttaaaagataaaattcaaaatgaagtcattttctatcaaagacgtttaaaatcgcaaaaaggacttatcagctattgtgaatttgagagttgggaacaagatgtcacaattgatggagaaaaaaagcgaaaaattgttggtcatcgtgttgttccaaaatcgtcacccctttttcaagaatttaaagtttggcaaaacctaaattcaatcagaatcacaaacatgaagactaatgaagtatatcatattgaagaagattcaaatactgaattatttcaaaagcttaattggactgataagttaagtgataaacaagtcctaaaagagtttggtcttaaaccagaagaatggaaaatcaattttcaaaagattgaaggcaatagaaccaaccacaatctactggaagcttataaagaaattttaaaaatagaaggatatgacaatatcaactttacaaacattggagctgatgaattgcaaaaaaccttagaacagtgttttgatgaaattggaatcgataaacaaatcctagattttaatgctactttagaaggaaatgagttttcaaaacaaaaatcttacgagctgtggcatttgctctattcttacgaagatgatttttctagaactggtacttcgtctttagaagaaaagttaaaaataaattttggttttaaagatgagcatctgccctacttaataaacatacgttttcaagatgattacggtaatttgagtgcaagagctattcgtaaactaatgcctcatcttcaagatggcaaaatttattctgatgcttgcgaattgtcgggctataatcattctaattcattaactaaaaagcaaaatgaagaacgagagctaaaacctaaactagaaatactaaagaaaaacaatttacgaaaccctgtggtagaaaaaatcttaaatcaatgcatcaatgttgtaaatgcgattattgaagatgagaaaatgggacgtccagatgaaataagaatagaacttgctcgagaactaaaaaacactaaagaccaacgtagcgagatgaccaaggccataggaagggcaacaagggagcatgagcagtaccgtgaggaaattaaaaccaagtttggtttacctcacgtaagcagaaacgatttaattagatataaactttacaaagagctagaatctaacggatataggacactgtataccgacgagtatattaaacctgaagatttattttcaaagaaatatgatattgaacacattatccctaaatcaagattgtttgatgattcgttttcaaacaaaactctagaaactcgtgaaagtaacttagataagggagacgaaacagctttagatttcgttgaacgaaagtatggtaaagaaggcttagataagtacagaaatcgagttgaagaactttataaagcaggaaaaattaaaggctcaaaacatagaaagttacttatgtcattaaaagatatcccagaagactttttgaatagggatttaggaaattctgcctatatagctaaaaaagcagccgaaattttactcgatgtaacaaaacgagttagcttaacttctggaaccataaccagtaaattaagagaagattggggtttaattcaagtcatgcaagaattgaattgggacaagtatgaaaaagtcggtttaacttattacaaagaaaataaagaaggtaaaaaactaccaagaatcaaagactggacaaagcgcaacgaccacaggcatcatgctatggatgctattactgtcgcttttacaaaaccgggaatgattcagtatttaaacaatttgaatgctaaaagcaataaagagatttataaacttgaaaacgcttatacttttaaagacgaaagaggaaaacgaaaatttaaagctcctttttctaacattcgtaaagcttcaaaagagcatctgtctcagattttaatttcgcacaagactaaaaataaagtcacgactaagaataaaaataagattaatataaaaggcaaaaacacttacaaataccaaactgttgaaacaccaagaggacagcttcacaaggaaactgtttatggaaaatctaaatattatgaaaccaagttagaaaaagttgggggtaaatttgataaagattatataaacctagttgctaaccaaagttatagaaatgcgcttttaaaaagattagaagaatttgaaaacaatcctaaaaaagcatttacgggtaaaaattcgcttactaaaaacccagtttatttaaatggtacacaggaaactgttccagaaaaagtgaaacttgcttggttagaagagagatttaccataagaaaagaagtaactcctgatttaaaaattgataaagttgtagatgagggcatcaagcaaattcttcataaaagacttaaagattttaataacaaacctaaagaagcttttgcagatttagacaaaaaccccatttggctcaataaagaaaaaggaataaaaattaagcgagttaaaattaacggagtatctaatgcagaacctctgcaccattctaaaaatcatttgggggaggtaattttagataataaaaataatcctatcccaaatgattacgtgagtaccggtaacaatcatcatgtagcaatttataaagatgaaaaaggaaaccttcaagaagaagtcgtttccttttacgaagcggttgcaagaaaaaatgctggtttacctattattaataaagaccataaaaaaggttgggagtttttatttacgatgaaacaaaacgaaatgtttgtctttcctaacgaagaaaaaggttttaatcctaccgaaattgatttactgaatcctgaaaataaagcattaattagtgagaatttgtttagggtgcaaaagatttcgactaaaaactatatgttttgtaatcatctacacactttagcgattacaggtgatgatttgaaaaataaaaaaatgctatcaactttcatatatcattttatacaaacacctgaaaaattaataaatattgtgaaaatcagattaaaccatttaggtgatttagttcaggttggagaatattaatatactaacccatgaaaaaattccgcaacacctaccgtattccctctgcccgattaccgggttgggattaccgtaatgcgggggcgtattttatcacgatttgtacacataatcgtacacattattttggggaatgtgaacagggaaaaatgaaattatccacggctggaatgattgcccagggatgttggtaccaaattccgtatttgaatccccatgtttcattaggtgcgtttgtggtcatgcccaatcacgtgcatgggattttgattttggatgaaatggaaaataatggcgatggttgtggcgttggtaataacgatgacgacggtggtgtagagacgtttgattcaaacgtctctacaacccccgccgataccattccacaaacgcatacaaaatctgccaaccattatccgtccaataattcacaaaatgaccatccaacaaaatcatcatcaaaaaacccattttaccaaaacatatccccaaaatcgggatcggtatcacggattattcaacaatacaaaaccgtatgcaccaaacacattcgatccgcctgtcctgatgtagattttgaatggcaaatgcgattttatgaccatatcataagagatgaaaaggcatttttaagaatttcaaattatatcctcaacaatcccaaaaactggaaagaagatagattttataaacaaacacgtgaaacatgataaaatttgataattataaatcagttctaccccatccctaaagggagcctgattttccttgatttctcccttcaccctgttaaataatgcaacgcattacgcaaagcgtatttaacagggttaaggggcggggcaaaaaatcaaggaattttagataacttattttttttcgcgtactacgaaacaaacattatgattaaacgcaccctattttttagcaatcctgcttacctcagcaccaaaaatgagcaattggtcattcgttttcctgaagaagaaaaacaggaaaagaaaatccctattgatgatattggttttatggttttagaaaaccaacaaatcacccttactaatggcttacttatgaagttagtgcaaaataaaacggccattattacctgtgaccaacaacatttgccttgcgccctattgcaacccttggttggccatagcgagcaagctttgcgctacagtcatcaattaaaagctagtgtgccacttaaaaagcaattatggcaacagaccatcacagccaaaattaataatcaagcactgcatttagaaacgcgagataagaactctttaaaattggagaattgggctaaaaaggtaaaaagtggcgacagcgaaaaccatgaagcagtagccgctgcctattattttcaacatctttttaatcttcctttattcagcagagggcaacacggaaatccgcctaacaacttattgaattacggttatgctattttacgggctattgtagcacgtgccttaattagtagcggtatgttgccatcagtaggcatttttcatcacaataaatacaatgcctttgctttagcagatgatatcatggaagcttaccggccttatgtagatgcggtggtctatgaccttgttgaaaccggtgcgcaaattgatgaattgaatattcaattaaaagcggagttattaaaaattcctaccttagatgtatggatagatgataaatggagccctttaatgaatgccgtaagtagaaccacagcaagtttatatgcctgttttgaaggcagttcaagaaaattgctgtacccagaatttaaatgggaagttgattaaggatataaatgaaaatccttggtgctaatgaatgaagcaaatttatctcgactaaatcaataccgatgtatgtgggtgcttgtcttttttgatttaccaaccgaaactaaaaccgaacgaaaagcagccagccgatttcggaaacaacttttagatgatggttttggaatgtttcaattttctatttatacccgattttgcgccagtagagaaaatgcggcagtacacattaaacgtaccaaaaacaatttacccaaaaagggaaaagtagctgtaatgcagattaccgacaagcaatttggtatgattgaattgtttcatggcaaaaaagaagtagagccagaatcaccagaccaacaattggaattgttttgatttttacaaacatgaaaaaaatttctaaaatcaggctacaaaaaatcgaaggaactagtacttagttgttaaaattttagttgatttttaaatcctatttttagtcataaaaaaaagcataccagacagttacgagaggtatgctgtaaatcattacgtaaaaatacaattttgaaagcaattcacaaccagttggaacaacttcaacaaatgacttgagctgtaaatcattacgtaaaaatacaattttgaaagcaattcacaacctttaaatggttttcggctaccattttatcgctgtaaatcattacgtaaaaatacaattttgaaagcaattca

SEQ ID NO: 2458 - DNA, 7809 bp, synthetic construct
  source 1..7809: mol_type = other DNA
  misc_feature 1..7809: note = Synthetic
ggtgtcgggtgtccattgcttttgcgagcgacggtatccgaccgctgaagcacccacgcccctgacttgtactgcagcccaactagaaagtctagtccctctagaatatctagaacatctagctcatctagtctgtctagaaactctagagcgtctaccccgactactccatccatctcatctcttccccctcgctttctccacgagctcagccgacggcacgcacggaagctcgcacgtctccagttcccacaccaccgtccacgcaatttcctctcccggttgcagtagcgtgtaggccccctggctttccagctccatgtaggtctttccgcggttcacgtacacctgtatctccgcctctcccggtgccggctccgccggccccaggtcagcgaaccgcttcaccatcaacaggccgtctccatagtaagccagccaacctcttccgtcagcgttcaccttccggttggcgggtgcctcgtcggcggcataccatgccgcaccatgctcctgagagaacctcagcacccccgccggccagatgctgtccgctacggcatcgaagaataccagcccgccgttcgccacgcgtgtgatctcccacggagccaccttccgcccctcattcccttcgttcaccaaggtgtaggtcaccgccacacttctctcatcttcgccggcacggaattccttccgcaccctcaggcccagccgctccgaagcctgactcgtcagcacgagccgccccgccttcagctcagcctcatagggctgtttgtcgaactccgccaccggaggccagttccattccttctgagggctcgtccagaacgtgctgccgaaggactccggccagcgcgactgcgacagcacctccttttccccatagcggaacgagcggatacggccgccgaaccccgcgtcgatggtcatggtcagtttccccgccgtgacctcatagttgtccgaaccctccagttgcttgatgctggtctgtgcccccgtctgcatgaatgccggcagcagaagcaagaatagtaacgctgttttcctcataacggtttgtattgtgtgattgtagtgtttttaactccgtttcaagtcaccggcaaagttatcaagaaaaaaccaattaagcaaatctgcgtgctatatttttctgtcagtcctgcatccggcatcaatacggttgttgttggccgtgcttccctccagtatggcagatcctctctcagcccctaaacctccccgttgttgagtgaataccatccgcatggctaaatttcaaatctcaaaattcaaatttcaaagtacagacgtccatatatggcgtctcccttgaaaccatgttccgccttaatataccatctaaccgccaacaacaattttcaaaacctcccatcaggacccccataacatacaataataagaaaaaatcaaaaaaacttcaacctgtctcacgatttgagacaggcaactgctatatttacacgcaaattttgtatttataaaaagataaaacaatgtccaactctcaaagtaggctaatgtaaagaaactatcaaacaataatttgaaaaaattttggtgcttcaacatttttatctaaatttgcatatcagattgcattctgtaaagaacgggcttagaaaataatcgtttggaaagcacctgtttttcataaaaccttaaagcgacatgagatgaaggtagacaaagacataaaaaatgctcccgttaaaggacgagagcaaacctaatgttctcacaacggaaattaaatccttattgtgaattgcttcaaattagtgttgcaaagttagaaaattaattattaaccaccaaataaatcccaaaaaaaaatgaaaaaaatcttaggattagaccttggaaccacgagtatcggttgggctttagtcaatgaagctgaaaatcctgaagaagaatcttcaattataaaaatcggtgtcagagtcaacccattgacagttgacgaaaaaaacaattttgaaaagggtaagacaatcaccacaaatgcagataggactctcaaaagaggtatgaggagaaaccttcaaagattcaaacaaagaaggttgaaccttactgcatgccttatcaggaacaaatttataactgccgaaacgatactcagtgaaaacggcaataaaactcttttcgaaacccacagacttagagcaaaggcagccaacgaagaaatcagcctcgaagaatttgcaagagtgcttttgatgatcaacaaaaaacgaggatacaaaagcaacagaaaagcaaatgaagctgaagacggtcaagcattcgatggaatttccgttgctgaaatattatataacaaaggtattacccctgggcaatattcactttctcttttacaagaaggaaagaagtacactcctgagttctataagtccgacattcaagacgaattaaatcaaatattacttaaacagacagaattctacccggagattctaactcctgacttcttgaactctatagaaggaaaagaaaaaggggctgtaaaaaacagatttaaggcgattggcattctatcagccgacattaaaggaaaggatcgtaaactccaatccctgaaactgagggtacaagcattaaaagaaaaaatccaaatcgaagaggtggcttttatcgtagaacttcttagtggaatcataaataactccagtaagctcttaggaagtattagcgacagaagcaaggaactgtatttcggtaagatgacgattggcgaatacttgatgaaaaaactggatgcagaccctcatttcagcataaagaaccatacattcttcagaaaagactatgtagacgaatttgagaaaatctgggaaacacagtctaaattccatcccgaactaaatcaggaactaagaaagaaaatcgcaaagatcatttttttccaaagaccattgagaagtcaaaaaggacttatcagtgtttgtgagcttgagcaccgaaaaattgaaacgatggaggctggcaaattaatctcaagaattgtcggtcctaaagtctgccctaagtcatcaccaatttatcaggaattcaagatttggcaaaaactaaatgacattcgtatctcagacaagaatgagggaacagaatatgaactcaccgttgagcagaaacaaagactcgcagaagaactaagcgtcaaagaaaagctcacaaaatctgaagtcatcagaatcttattcggaaaggacaagtcaaaagacatgaactttaatgacattccgggtaatactacttctgcacagctttttaaagcttacgagaacataatggagatgaccggacatgagcaaaaatttgacaaactctcaggtaagcagatcatggaatttgttacaagcgtttttagtgcactcggatacaacacgtctattctatctcttgggactgatgtaaacgggaagaatctggaaaaagaaccgttatataaaatttggcatctgctctactcttatgaaggtgacaattccgctacaggtaacgacggactggtaaataaaattaaggagatttatcagtttgacaacatcgacttagctaaagaaattgccaaaatcaacttcaagccagaatacggaagcctaagtgctaaagcaatcagcaagatacttcctttcatgaaagaagggaaaaaatatagcgatgcttgtgctgaggcaggatataaccactccgagaaatctttgaacaaagagcaaattgaaaacaagcaacttatcgacaagcttgaattgctacaaaaaaacagcctaagaaatccggttgttgagaagattttgaaccagatgattaacgtcgttaactccgtcattgaaaactatgggaaaccagatgaaataagagttgagatggccagagaactgaaaaagacggctaaggaacgcgaggaaatgaccacctccatcaatcaatcaaagcaagaccacgagaaatacgccgaaatcataaaaagagattttggattcgcatatgtctccagaaatgacataatgaggtacaagctctacatggaactaaaagacaacggattccacacattatactctggcacttacattccttatgaccagctcttttcaaattcatttgatattgagcacatcattcctaaggccaaactttatgacgactcttttgccaacaagactcttgaggccagatcggtcaacctggcaaaaagcaacaaaactgcatttgactttgtcaaagaagtttatccagaaagaatcgatgaatacaaagcaattatcgccgacttacacaaaagaggtgtaattggaaagagaaaaagaaattacttgttgatggaagagaaagatattccatcagattttctcaacagggaattaaacgacacacgctatatagcaaaaaaagccattgacattctgagtcaaatcgtgaaagttgttattccaaccactggggccattaccgacaggctgagagaggactggcagttgattgacattatgaaggaattgaatttccctaaatacgaagcagccgggcttgtggaagttttcactgaccacaatgggaaaccgataaaaaaaatcaaggactggacaaaaagaaatgaccataggcatcacgccatggacgcattgactattgcttttacaaaacacgaatacattcagtacttaaacaacttgaacgccagaagtgacaagagcagttctatttacactatcgaaaaaaaggaacttgaacgcagacctgacggaaaaatcgtgttcaaagcacctatgaagaatttcagacaagaagcgaagaagcaacttgaagccacccttgtttcggtcaagtccaaagcaaaagtgactactaagcacaagaacaagcctaagaagaatgcacaggaaagtcctactattcaatccgtattgacaccaagaggacctcttcacaacgaaactgtctatgggacaagaaaacagtatatgcttaagtcggagaaagtcggagcttcattcacaagggaaaaaatcgctcaagttgcaaagaaagcctatcgtgaggctttgctaacaagactcgaagaattcgacggcgacccgaagaaagcattcacagggaaaaatgctttggagaaaaatcctatctggctcgactcaaatcagactttacatgttccatcaaaagtggaagtactctatatggaaactatctatactgtcagaaagcctataagcaaagatctgaagattgagaaagtattggatgcaggcattagaagaattttgcaagagagaataaatgaatacaacggagatgcaggaaaagcttttgctaacctcgacgagaaccccatttggcttaataaagagaaagggattgcaataaaaagcgtgacaatcaatgcgggactcaaagatcccgaaccaatcagaaccaaaagagacaaagagggcaagcagatattggacaacaacgggacgcccatcccatctgattttgttcagactgccggcaatcaccatattgccatttttgaagacgaagatggaaagctacaggaacatgtagtgtcgttctatgaagccacggccagacaaattcaaggtcttaccgtcgtcgacaaagactataacaaagaaattggatggaagtttctgtttacacttaaacaaaacgagatgtttgtcttcccatccgacgacttcaatccaaaagaggttgatctcatggatcccgacaactatgagattataagcaaacatctttatagggtgcagaagttgtcgtctaaatactatgtttttaggcatcatttggaaacaaacgtggaagatgtcaatgcattaaaaggcagcacatggttgaggattaacaaattagataatcttagaaatatcgtcaaggttagaataaataacatagggcaaattgtctgtattggagagtattgactatgattaagaaaactctatatttcggaaatccgatgtacttgagcttacgcaatgctcagttgcttttacgaaagccagactcgcagaagaccgacacaagtccggataagccaagcaatgaattcgagaggacaatccctatcgaagacattggaattgtggtattggacaaccgacaaattacaatcacaactggggcgatggatgcacttctggagaacaactgtgccattatcacctgcaatgccaagagcatgccggtgggacttgtgctgcccctgcatggcaacacgctacagaacgaaagattcagggcacagattgactcttccgttccactaaagaagcaactttggcaacagaccattcgacagaagatcctgaaccaagcttgggtattggaagaacaaagcaatgagacggccaagaacatgagggtatgggccaacgatgtgaaaagtggagaccctgacaacctggaagcaagggcagctgcgttctattggaaatcggtattcagtcagcagacagactttatacgaggaagggaagaagatccgcctaataatctgctaaactatggctacgccatcctgagagcctgtgtggcaaggggcttggtaacaagcggacttctgcccactttaggaattcaccatcacaaccggtacaacgcatactgcctggctgatgacatcatggagccatatcgaccctttgtcgaccgattagtcatcaaaataatgaatgaagtcgaggatgtcagcatactcaccattgacatcaaagcaaggctgctaaccattccaactctcgacgtatccataaacggaaagaaaagtccgctcatgattgctgtaggactgacgacttcatccctaagcaaatgcttctctggagaaatgagaaaaatatcttatcctgaattcatttgactatagctgattatgaactctgacatcacaagacttagcgcctatagagttatgtggatccttgtgtttttcgatttgcccaccgagacaaaaaaagataagaagaactatgtggagtttcggaagaacctcctcaaggacggattcaacatgtttcagttctcaatctacattaggcactgtgccagtagcgagaacgctgacgtacacttaaaaaaagttaaatctttcataccggagttcggaaaggtcggattgctatgtataactgacaaacagttcgcaagtattcaattgttcaatggaaagaaacctgaaaagcccaagactggagggatacagctggagctcttctgatacaaataaaaatctcgctctttgagcgagatttttatttaattttgcaccattttttctttttctaagtaattcagcaaacaattataaatcaatctattacaaagattgcgctgtttatgctagtgcaaagatactaatttgaaagcaaatcacaacatttcaagatttcaagtcttttgtgaaaaagctgtttatgctagtgcaaagatactaatttgaaagcaaatcacaactatcttagtcttctagtaaaataatacaagctgtttatgctagtgcaaagatactaatttgaaagcaaatcacaactgtaggcacagcggtaacgtgggcaagtagctgtttatgctagtgcaaagatactaatttgaaagcaaatcacaacatttcaaaataaattcttatatttgcggcggctgtttatgctagtgcaaagatactaatttgaaagcaaatcacaacacattctcggcggttttctctaattctgcgctgtttatgctagtgcaaagatactaatttgaaagcaaatcaca

SEQ ID NO: 2459 - DNA, 7781 bp, synthetic construct
  misc_feature 1..7781: note = Synthetic
  source 1..7781: mol_type = other DNA
gtcgaaaatggaaaaataaagattcaaaacgaaaaatgctgaatgaaaaattcagaaataactgattttttaaaacattcgaatcttgcaaaggtctcagagagtaaatccttaacgcttaattaggctttctaattagattggttagatacaccttaacaaatggttagattgcgatgctcttcttagttagattggttagttttggtgattagattggttagacaaagattagcttttggttagatatgtcttaacgtatgattagtttgcagtaaaatatttaccaacatacaagactgccaattaggcacaggttggagaccatgttccagcggagttcaattcatttgtcatatcaaatgcaatgaaacattccgttaaagtttgtagcgtgtttaatgaaattcttcacttcgtatcgaaatttaagtgtgtttatgcagtatgcaggcaatcttttgcactgtttgcggttaaatcaccaaattgtgactccacactccttatcccatttcttcttatttgccaattccacttatattaccgaaatttgcagccttgttttaggaaaaaatcttttagatacataatatttttataagaatgaatggattattatttttagggtggtcggttttgggtttgtttggcctaacacttgcctataaactgtttggcaaaatgggcttgataggcattattgctggcagtgtagtaatgatgaacatattggtgaacaaatcggtacttatatttggattaggagctaccagcggaaatgttttctattcgatgatgtatttggcaactgatattctgtcggaaaattacggtggaaaagaagccagaaagtctatcatgataggtttctttatatcaatactcaccatgattggcgcttgggtagcccttgccatgactcccgcaccttgggatatagcacacgagccactaagcctaatacttacacctatgtttagaattgtgttaggaagtatggtagcattctttgttagtaatatgattgatacctatacgtatcaatggttgaaaaagaaatttccaaaccaattgtggataagaaacaatggcagcacaatgagtagtcaactggtagatagtttattatttgcaactatagcgctgctcgatactatgccatttgttgcatggcttcaggtggtactctcaacttatctgttaaaggtgattatagctataatcgacacgccgtttttgtattttgtggccaaaagagtgaagacagaggagttgtaattgaggtttaagaattaagtgataagtattaaaaatgtaaagttgttgagatttgtagggcttatcttctttcattatcgcctaaaataataaaataataaaatattgtcatctaagcggtggctagagtagcattgtaggaataggccgtgatctgttcttataacagaaaattgagaacgattattacagatcagcactcgaatcacatagaatcattcatgactcacactatccacatcaagacaatttaagtatcaacccaacacttttctttgtaaatacattgttatatagatgcttaggcatgagcattagtaagagtataatgcaataattaaaatgcaaagactcaaaatttgatttcaatagctgttttatatagcttctatactttctgattatttcctcgtcaccacccttattcacaattaacaatgtgtttcttagcagtacatatattgtgcttttttgagctgataataaaaagccatctaagttgttgttccaatcttttacaatagctagaatagaatttaaactctttttattgcagcccgaccttattacagagccttcaagaaagtagtgtatatatcctatctctttagaaaaagcgatatgctttatatgctttgcagcataaaatgcccagtgatcgtcttcatgtggttccactccttccagaaaaaagagattgttgtcaaaaataagctccttttttattagtttgttccacacattaacaggaattctaggctctaccaaacagcgctgttttatccatttatgatttgaactgtattctggaaagttcttataattcaagtctaaccaatcttcagaaggattaaatttaggaatagtcattgtattaccctgcactatttctgcctcaggatactttttcacaagattaatgagggtttcaatgcaaccatcagttatttcatcatcaatatctaggtaatagatatattggccagtagcaattttggtaccgttatttctagcagtagaggcacccttgttttctctgttttttatatacttaaacgatataggtcccgaatattccgcaatttgttgcttaataatatcaccacttttgtcagttgaacaatcatctacaaaaatacactcaatatttgtataggtctgatgtttgatggagtcaaaacacctaataatataaggctctgcattataaatataaaccggcacaacgattgttactttcatgttgattgacctttaaatgggtttatttacaagtgtaaaattactatttttattcattcaagggttataaaatgaatatgtttttgtagaagagttaactgacagggtggtgggcttttttagtgaggtattaagtcagtgttcttttttaccctacctatgccaaatatgcacataaataaaactgttcagttaagctagtttcgttatatatttattcaaacatgtttggagggtgttttttttgcactattttttttctgcattttataggtggataaagtaatattacatctatttgttttggtgcaaatgtgtttggctgttggagttgggttgggttgttgtttttgcaaacaaaaaatgccccgcagataggcgaggcgctagatgttttcacaacggaataatccttattgtgaattgctttcgtttacaaatataataacttactttagtatcgcaaacttttgtttagttaatttattatatttaactttagcgcatataatatatctaataactctcttattatgaagaaaaatatcttaggccttgatttaggtattacaagtattggttgggcacatgttattgaaggagcaaccccgagtgaatcagaaataaaacagattggatcaagaataattcaatttgataattttgatagggttgataaacaaggaaatgtgtctgaatctagagatcctctacaagactttgcatcaggaagaggtttatcgcccaatgctgatagaactaagaaacgtggagcaaggcgtttgcttgaccgttataaaatgcgtagagaaaacctagttgacctgttgctaaaatcaaatatcataaaccctaatactgtaatagttgaagatggaaaaaacactacacacggaacatggcgattacgctctaaagcagccacagaacgtatagagttggatgaattggctagagtgtttttagctatcaataaaaaacgaggttacaaaagcagccgtaaaaccaaaagtgcagaagaaggttatgccatagatggaatgggtattgctaaaaagctttatgaggagaatattactcctggagagtttgtttttgaaaacatgatgaagggaagaaaggctattcctgacttttaccgttctgatttagaggctgagtttaataaagtgtgggattgtcaacgagagttttatccagatattcttacaaacgacttctatgaagaattgaaaggaaaaggtctgagagcaacctctgcaatgttttggaatagatatgattttaatactgcaagcattaaaaacttagatgatagcttaaaaaaagaacaaactattaaatactcaaagcgagatcaaacaaaattgcaagcctacaagtggagaagtgatgctatctctaaaaagttggataaggagcaaatggcttatgtaattgcagatatcaataacaatataaatagttctagtggatatttaggagcaatttctgatagaagcaaagagctctacttcaataatgaaactgtaggtcagtacttatacaaacagttacaagacaatccccatacttcgctaaagaaccaagtattctatagacaagattatttagatgaatttgaaactatatggactactcaagctaagtttcacccacagttaactgaaaaactgaaagaggagatacgcgatatagttatcttttatcaacgacaactcaaatcacaaaaaggccttataagtttttgtgaatttgaaagtaaagaggtggaaatagatggtaagagaagaaccattggttctagagtagcaccaaaatcatcccacctttctcaagagtttaagatttggcagaacctaaacaatgtagtgctccgaaaaagcagaagcaaaaagcgactatctgaagtagataacttagaaagcttgcttaaggatgaaaaggatgagtttgtatttgatatggagtcaaaggagttgctttttgaagagcttaacataaaaggaaaattaaatgctaaagcaattatagagcttcttggatataaacccaaagattgggagatgaactatacagagcttgaaggcaataatacaaacactgcgttatataatgcttatctaaagatattggaaatagaaggttacaatgaagacttgctaaaactatcaaataaggatgagataaatgttgcagagttaaaaacaagtgcatatgaaattaaagatatggtgaaatctatctttaaagtacttggaataaataccgatatattggagtttaatgcagagcttgaaggaaaagcatttgaacaacagccctcttatcagttttggcatttactttattcagctgaagacgattataaaaaatatagtgaagaagacatattgctgtttggaaatgaaagcattggtttgaaaaagcaactgtgtgctaagtttggctttgcaccagagcatgctaaggtattgtcaaatgttgcatttcaagatgactatgccaatctatctaccaaagcaatgcgtagaatttatccttatatcaaagagtccatgtatagcgatgcctgtaaattggcaggatatcgtcattcaaaacactctcttacaaaagaggagatagagaaaagagtgctgaaaagcaagcttgaagtaataaagaaaaacagtttgcgtaatccagtagttgaaaaaatactcaatcagctggttaatgttgttaatgcacttatagataaagagaatgataagttggagaaggctggtaaaccacgcaactttcattttgatgagataagaatagagttggctcgtgaattgaaaaagagtgctgatgaaagggctcaaatgacccttaacataaatgcagcaaatagagctcatgaagagataaataagttgttgcaatcggagtttggtgttaaaaaccctacacgcaacgatattatacgatatagattatatgaagaactcaaagataatggttataaagacttatactccaatacttatataccaagagaagcacttttcaccaaagatatagacatagagcatattattcctcagtcaagaatgtttgatgatagcttttcgaataaaacagtagtttataggaaggacaaccttaaaaagggaaatagaacagctattgattatattgaagatgagtttggagaaagtggagtgaatgaatacgcaatgaggatgggcaagctatttgaattaaatggtaagaacggaaatggtatcacaaaagctaaatatcacaagcttttgaggcgagcctctgaaattggcgatggcttcatagagcgcgacttgcgcgacagccaatatattgcaaagaaagccaaagatatactatttcaaattactcgaacagttgtatctacatctggacgagttacaaatagattgcgcgaagattgggatttaataaacgtaatgaaagagctcaacctgcccaagtatcgtgctttaggcctcacagagatggaagagagaaagtttggacaagaaatagagacgattcaggattggacaaagcgagacgatcatcgccaccatgcaatggatgcattagtagtagcatttaccaaacattcacatatacaataccttaaccacctaaatgcgcgtagaaattgcactcataagcttcataggcatattattggtatagaaagcagagaaacggaattgaaagagcatctagagagtgtactcatttctcacaaagctaaaaacaaggtggttacaaacaatatcaatcatgtaaaaactaaacgaggctataaaaaaagcttagagctgacacctcgtggtcaaatacatgaagagacagtgtatggaaaaataaaacaacctgtagtaaaagagatgagtgttggtgggcagttgacacctgaattaattgaaaaagtaaccaaccccacgtacaagaagctgttattaaagcgattaagcgaatacgacaacaatccaagaaaagcatttcttggcaacaactcattaagcaaatcacctatatacttagatgatagcaaaacagaaacattgccccaaagagtgagtcttctgttttatgaagattgttttacaatacgtaaagaagtagcagtagatctaagaatagataaagttgtggatgttggcattaggcgcatattgcaagatagattagaagagtatggtggtaatgccagggatgctttttccgatttaaacaaaaatcccatttggttaaatagagagaaaggtatttctgtaaaacgagtaactataacaggaataagaaatgcagaagcgctacattataagaaagatcattttggtgagtttgttttgaatgagaaagggaataaaacacctgttgattttgtgagtacaggtaacaaccatcacgtggcaatctatcgcgacaagaaaggcactttacaagaaaatgtagtgtcgtttttcgaagctgttgaacgagccagacaaggtattggcgcaattgatagatactacaacaaagatattggttgggagtttctgtttacaatgaagaaaaacgagatgtttgtgtttcctaatgaagagacaggatttgatccaaatgagattgacctaatggaccctagcaatagaaagtatataagtccaaatctttttagagtgcagaaaataactgctaaagattatacgtttagacatcatcttgaaactaacgtcaatgtgcaaaaagaattggtgaatattgcatttgttagactaagaagccctcaatcattaaaggatatcataaaagtacgcattaaccatcttggtgatattgtggctataggcgagtgttaattataaaagaatagagctatgataaagaaaaccctctactttggcaatcctgcatacctatcactcaaaaacagccaaatgctaattcgattgcccgaagtggtcaaaaacgatacattgcccgataggttcaaaaaggaagctgtaagaacaattcctatagaagatattggtgtagtagtgttagataatgggcagattacactaacacatggtttaatggaaaaactattggaaaataattgtgcgctaattacttgcaatagtaagcgtatgccctatggcatgcttcttccattggtaggcaatacaacccaaacagagcgatacagaaatcagattgatgcttcgttgccccttaaaaaacaattgtggcagcaaactgtagaggcgaaaataaaaaatcaagca

SEQ ID NO: 2460 - DNA, 7602 bp, synthetic construct
  misc_feature 1..7602: note = Synthetic
  source 1..7602: mol_type = other DNA
gcgagggtgcatttaaatgcaccctcgctttttatattattttgtttcttttctaaaaggaaaatagagatgtattttataggataactatttagagaatatttaataagacagtatagtatatgctataaaaatctgattatgtatattttgattcctttattaggaaaataagtgtagtttaaaaatgaatgattatcctgagaaacgtaaaaatgcccccgataaaggacgagggcaacctaaatgttttcacaacggaataatccttattgtgatttacttcaaattagtgtttaaagataaaataaaaagcgataatatgcaagttttttaaataaaattgttaatttaggacattgttaaaataaagattaccatgaagcagattttaggactcgatttgggaactaccagcataggatgggcattagttcgggaagctgagaataaagatgagcagtcgtctattgttcggattggcgtacgggtaaatccgttgacatcggatgaacaaaaaaattttgaacaagggaagagtattacaacgaatgcagatagaaccctgaagagaagtatgcggcgtaatttacagcggtataagttacgccgggatcacttaaaagattgtttacagaagaatggcattataactgataaggcggttctgagtgaaaatggtaattatacaacatttcaaacatattatttacgggcaaaagcagtaaacgagaagatctctttggaagaattcgctcgagttcttttgatgttgaataaaaaacgcggttacaaaagcagtcgtaaaatgaaatctgcggatgagggacaactgattgatggaatgtctgttgccaagcgattatataatgataatataaccccaggacagtatgtcctttcattgttggaggaaggtcgaaaatatattcctgacttttatcgttctgatttgttagatgaacttgataaaatatggacatttcaacagtgtttttatccggagatattgacgcccgaatgcagaaaattgatagcaggaaaaggtaaacaggctacagctaaaatctttttaggaaaatataaaatatatacagcagataataagtcgaaagataagcgtttacaagcctatcaatggcgagtcgaagcgttgagtgggcagctcccgatagaagtggtggcttttgttgtttgtgagattaacggagctattcaagcttcaagtggatacttaggggctataagcgatcgtagtaaagaattatattttgaaggacttactgtagggcaatatttggtgaagcaattagaaaagaacccggataccagcctaaaaaataaagtattttatcgacaagattatttaaatgagtttgaaaaaatttgggaaaaacaggccgaatatcataccgaacttacaccgcagttaaaaaaagaagttcgggatatcattatattttatcagcggacattgaaaagtcaaaagggacttgtcggattttgtgagtttgagagtcggcagatagaggtaatgattgatggaaaattgaaaaaaaagactgtcggctgcagagtttgccctaaatcgtcacctctttttcaggaatataagatttggcataatttgaataacttgaaaattgttgaaaaagaattgggaaaatctcgttttttgaatcaagatgaaaaagaatctttgtttcaagaattgaatattaaggaaaagttatctaaaacagatatcctcaagttgttgtgcttgaaggcaaaagagtttgatttgaactttgaaaaagtagaaggaaatagaactcaagcggaattgtttagggcatatcaggcaattatagagatgagcggaaacggagattatgatttttccaagatgacctcatccgaaattcaggatacagtgaccggggtatttcgaggtttaggatataatactgatattttatcttttgatgcagaaaaagaggaaaaaacttttgataaacaaccaatgtatcttttatggcatctgttatattcttatgaaggggacagttcggataccgggaataaggctttaattactaaaataaaaaaattgtgcggttttgagagtgaggaatatgcccgtatccttacagatgttacatttcaatctgaatatggaaacttgagtactaaagcaatacgtagaatattgccttttatgaaaaaaggctctgaatacagtgaagcatgtcggcatgcgggatatcgccattccgaaaggtctttgacaaaggaggaattagataaaaaagtatataaagatcatttggaacttcttcctcggaatagtctgcgtaatccggttgtcgagaaaattctcaaccagatgattcatgttgtaaataccgtagtcgacacttatggcaagcctgatgaaatcagaatagaattggcacgagaattgaagaaaagtgcaaaagagagagacgagatgactgcgtcgattaataaaacagctgcggagcataagaagtattgtgaggtgcttcagaaagaatttggattcacacatgtaagccggaacgatatcattcggtataaattgtatttagaacttgaaaataatggatataaaacgctttattccgatacatatatacctcgggagaagttgttcagtaaagagtttgatatagaacacattatacctcagtcgaaattgttcgatgattctttctcgaataaaacattggaatgccgaagtgtgaatatagaaaaaagtaatgatacggcttacgactatgtgttgaataaatatggagagcaaggtattttagattataaaaataggatagaaaatctatataaagatagcaaaatcagcaggactaaatatcagaagctgatgatgaaaaacagcgatatatccgggaattttattgaacgtgaattgcgagactcccaatatattgcgaaaaaggcacgggaaatattagaagagttggtaaaatttgttgtaccgacaactggatcggtgacggctcgtttgcgggaagattggcaattggtagatgtaatgcaagagttgaactggaaaaagtacgataagttagggcttacagatgtacggtatgacaaagatggtcgtgaaatacgttatataaaagactggagtaaacggaatgaccatcgtcatcatgcaatggatgctttgacaatagcctttacgaaaagaagcattatccaatatttgaataacctgaatgctaaaagtgataaatcgggaagtatatatgccattgaacaaaaagaacttttccgggataagcgtggtaaattgaagtttatccctccgatgccatgtaatatattcagagcagaagcgaaacggcatcttgaaaatgttttggtttcggtaaaggcaaaaaataaggttgtaacaccgaatataaacaggtcgaaaggcaaaaacgggataaataaaaaaatccagttgacacctcgtgggcaattgcataatgagacgatttatggtagtatgaagcggtatgagactaaatgggaaaagattggctcaggttttgacgaacgacaaatcgctaaggtcgcaaacaaaaagttcagagaggctttgctgtctcgtttggcagaattcggtaatgatccccaaaaagcctttacgggaaaaaacagtttagaaaaaaatccgctatatgtggatgaattacatactcaaaaggtcccggaaaaggttaaaattgttactttagagaacctttatacgattcggaaagagattactccggatttgaagatcgataaagttgtagatgcaggagtgcggcgagtgttgcaggagcgtttagacgagtttgatgatgattcgaaaaaagccttctctaatcttgatgagaatccgatttggttgaatggaaaaaagatgaaacgagttacgataatgggagttagcaatgcagtccctctacatgataagaaagattataaagggaacttggtttttgactctaaggggagaaagcagcctgtcgattttgtgaataccggtagtaatcatcatgttgcgatttatcgagacgaaagtggggagttacaagatattgttgtgtctttttacgaagcaacgacacgttcgactttaggtataccggttatagataaggagtataagaaagcagaaggctggaactttttgttttcgatgaaacaaaatgaatattttgtcttcccgaatgaagagactggatttaatccgaaagaaatagatttaatgaatcccgataattatactacaatcagtccgaatctatatcgagttcaaaagttttcgaaatgtatgtatggaaattcgtcagttcgagaatacgtttttaggcatcatttagagacttcggtaaatgatagcaaaggattaaaaaatatagcttataaaaatgtaaagagtttagtctatttggagggcattgtaaaagttcggataaatcatatcgggcaaatcgtttccgtaggagaatattgaatgtacgatttggtggtataattatctgtttgtaagtaatattcctaaaatcttgatattatgataaaaaaaacactttatttcggaaaccctgcttatctttctctgtggagagatcagttggttataaaacttcccgaagtagaaaagaatgagtctgttccggagtcgtttaaagaacagtatcgagtgacaaaaccggttgaagatttgggggtcgttgtacttgataataaacagataaccattaccttgggtttgcttgaggctctgctcgaaaacaattgtgctgttatcacttgcgatagtaagtgtctgcccgtaggactaatgctacctttatatggtaataccacgcagaatgaacggtttaggcaacaaatagaggcttctttaccattgaaaaagcagctttggcagcagacaatcaaagcaaagattgaaaatcaggcttcggttttatctgattgttctggagaggtggtgaaatgtatgcggatatgggcgagtgatgtacggagtggtgatccggacaatttagaagctcgtgccgctgcttattattggaagtctctttttcccaatattgatggatttacgagagatagggatggtgtgcctcctaataatttattgaattacggatattcgatattgcgggcggtagtagctcgaggattggtaataagcggtttgttgccgacattcggcatacatcatcataatcgttacaatgcatattgcttggcagatgatataatggaaccttatagaccttatgtcgacgaattggtatttcgtttggttgagtcttatggtagtaaaatagagttgagcaaagaggtgaaagcacgtttgcttactatccctacgattgatgtaaaaatcggaggaaaacgtagtccgttgatggttgctgtcggacagacaacagcatcattgtatagatgttttactggagaacttcgtcgtatatcatatccggagcgttaatggatagaataagtgaatatcgagttatgtggatattggttcttttcgatttgcctactgaaacgaagaaagacaagaaagcttatgccgaattcagaaaaaatttgcagaaagatggttttacaatgtttcaattttctatttatatccgtcattgtgccagtagtgaaaatgcagatgtacatgtaaaacgggtaaaatcttttctcccggaattcggaagtgttgggattatatgcataaccgataaacaatttggaaacatagagcttttttatggaaagaaaggttgtaaggttgaggctccgggacagcaactagaattattttaagaaagtaaatgcttggagaatcatgatagttgaaaaggattgttagaaaatttactatttaaaagagctcatctttatacaaaaattttttataattcgtttttgtctatatgtgttcttaatttttattaaaagtagaaacttacaacctttttgaggaaattgtatataatactcgtaaaaatatagaaaaccaaaatcccaaatacatttcgggattttggccgaaacagcattatttttatttttctaatttcctttgtaatacgctgaaatatagataataatctatattctgctgtttccaatggttcaaagatactaatttgaaagcaaatcacaaccaattgaacatcttaacaaaaaagtcgttggctgtttccaatggttcaaagatactaatttgaaagcaaatcacaacatgaaggatgatgggtcaacggtactgtttgctgtttccaatggttcaaagatactaatttgaaagcaaatcacaacatgatattctgtattgttgtcatagcttgtgctgtttccaatggttcaaagatactaatttgaaagcaaatcacaacggaactgtcgcgtccccatttgccgccaaagctgtttccaatggttcaaagatactaatttgaaagcaaatcacaacggaccaagcgtgcggatgtggctgtgaacggctgtttccaatggttcaaagatactaatttgaaagcaaatcacaaccttcaagttacgcaggaactcggtaggcgcgctgtttccaatggttcaaagatactaatttgaaagcaaatcacaactttagtttagaaccgaatacgttaggtttcgctgtttccaatggttcaaagatactaatttgaaagcaaatcacaactgttttcaccgttcctcttggagatggctgctgtttccaatggttcaaagatactaatttgaaagcaaatcacaacttataatatgatagagataaaagatttatagctgtttccaatggttcaaagatactaatttgaaagcaaatcacaactgattctttgccccgaatattgaccgtaccgctgtttccaatggttcaaagatactaatttgaaagcaaatcacaaccctgattcgtctttgagcatattgatgtatgctgtttccaatggttcaaagatactaatttgaaagcaaatcacaaccgctcgagcaatgcggtatggctgcaaagggctgtttccaatggttcaaagatactaatttgaaagcaaatcacaacacccctattatatcctcctctttatcctatgctgtttccaatggttcaaagatactaatttgaaagcaaatcacaaccttggaattacacaacatttttctcagaaagctgtttccaatggttcaaagatactaatttgaaagcaaatcacaaccgttaggcaacgaccgcaaaacgatatcagctgtttccaatggttcaaagatactaatttgaaagcaaatcacaaccccaccaacaggaatatctatataaccttgctgtttccaatggttcaaagatactaatttgaaagcaaatcacaacatttagatggtgtagaaatagattgtttcagctgtttccaatggttcaaagatactaatttgaaagcaaatcacaacccttctattgggcactgatatgccaagaaagctgtttccaatggttcaaagatactaatttgaaagcaaatcacaacttatccaacctaattttgtgccccttcagag

SEQ ID NO: 2461 - DNA, 7571 bp, synthetic construct
  misc_feature 1..7571: note = Synthetic
  source 1..7571: mol_type = other DNA
ccatgctcgactcattaggttatcgagaactcacatcgaaagccatcatctcgcacaccattggcggaatatgtgctgctatttgtgcgcattgggtgtacatgctttatacgttgatatagatttatccctcaaaactcaaggacgttaatgcccgataggggttaaaatccaaatacttcatacaccaatttaggcgaatttgccaaccaatttgggcgaatttgaaaagtaaaatgggcgaaattgctgaccaatttcgcccattttgcaggtcggttgataatcctgcatcttgtatttgcccgtatttacacgcctttgcaatatcctttcacgtgaaacgagaatggtagataaagcgtctcgtgccacaaaaacattcgtgaacacgtcaaatatacttgtcaccgtatttcatttgcacgtcattgatatattttcttataagcgcagatgagtcctcacgcttgcagattagtagcacattgccgttctctgctacaatgaaatcctccaaaccatttatgataccgatgtggtcgtcgggcagcttgattatattaccgtggctatcctctataatcatctttcctccgatgctcacgttgtcatcatcactcttgcgcatgatgtcgaagatggagccccaggtgccgaggtctgcccagccgaaatcacactgcatgacatatacattctcgctcttctccagaatacccatgtcgatggaaagattaggataggatgggaaattctcgtttatatatgccgtctcctcctcaagattccatacatggttctcgtcatcaaactttgtgagcaccgtggggaatatctgcctcaacgaatggcgcaggtattttgcgtttgcgatgaacagtccgctattccagagaaactctccactcttcataaacatttccgcgaaactgcgctccggcttctccgtgaacgacttcactctgaaaacagaatctgtttcacacttttcgccatattgtatatacccataaccgggttccggacgtgtcggtttgacccccattgccagcagagcgtcacgctctgacacgagattcaatcctctctctatgttgtcaaggaaagcctcctcgttgaataccgccatatcgctcggtgtcaccacaatcctcgcactgctgtttttatggtaaatgcgatatgtggcccatgcagtgcttggtgccgtgttacggaatatcggttcactgagaatattcccaataggaatttcgggcagttgttcctctacgaaatgagcatatacgttgtttgtgttgacatatatattctccatcggaatcaacttgctcatcctgtcgaaagtctgttgcagcaacgtcctaccggtcgagaagaaatctacaaactgtttgggcatatcttcgcgactgcatggccatagtctccgaccctttccacccgccaagataacacagaagttatctttattccgagttctcatattattagatttgaattatgctacgaaaataacaaaaataaaccggtcaaacaaacttttgtgcatttatttaattattttttccatttcctttgttttttgccaaaaaagaattatctttgcacccgcattcgtcaccaagacgtttttcgctaagcccagatggcggaatcggtagacgcgctggtctcaaacaccagtggagcaatccatcccggttcgatcccgggtctgggtactaaaatcccttgcaagtcgaagatttacaagggattcttctttttagcatgtgctaaaagtgtaacagagaaccattccttcaagattaaatattatttctgaaatatttgtattttaagacaattttaatatctttgcacttaaaatgttactaaatcatggagaaattgttagcaggaaatgtaaagttctatatgtataaatcaaggtaagcagttaaaggaacttgctaatgatatgagtgttggccctgcatcgttgcacgtgaattgaatggaaacgctctacttgataccatagagaagactgccaatgctcttggagtatctgtaaaatcattgttcgaagataatagtccgttttggttgaatgatttattaagcaaatggaaaaaataatcagtttaatagtaggctcgaacttgataaattatcaaatgaaatgaatatgatggacatataaaagacaaaaatattatgatagacaaaatgaaacttacacttgtatttatggtagttattgtaactattataacatgtgttaatcctttattccctcatgagcaattgctacaacatattggaacatttttgttattaatacctttggtatatgatgtttttaagagaaaaatacctatggtgccatatatcggaattgtttgttttactattctacatgtcattggagcacgctatatctattcatacgttccgtataaagaatttgcaatttctttggggattgcggatcctgattttttccaagattcacgcaatcactatgaccgcttagtacatttctctttcggtgtattgttgtttccctatttggtttatgtttgtaaaaggtggctgaaacaactgcggtcggtagcagtgcttatggcatggatgatgatacaaacgtgtagcatgctttatgaactatttgaatggttgcttaccatagttatggaatcagaagtggcagattactacaatggacagcaaggagatgtttgggacgctcaaaaagatatggctttggctttattgggctcaacttttatacttgtcttatatctgctccattataatagaaagaacaaaaccaattaagtttttgctaaaagtgtaatgtttgataatgtaatataaacaaccggaattgtctgtttaaccgcaataaagggcttgtagtaaggaaacaaaaaatccaccgttaaaggacgatggaacctaatgtttacacaacggaataatccttattgtgatttgctaaaaattagtgttgcaaagatattatattttcttgtaattcgcaagttttatagaatatttttactatttttgcagaaaatatctaatttacataatcatgaaaagaatattgggacttgatttgggaacgaccagtatcggttggggtttggtgaacgagggagagagtgttgaagaggagtctgggattattaaactcggagtgaggaataatcctctctctgttgacgagaaatcgaatttcgaaaaaggtaaggcgattacaacaaatgcagaaagaaccctgaaacatggcatgcgtatcaatctgcaacgctacaagcaacgaagggataatcttgtggcttgcttgaaagaacatggaataatcaacgatgatactccgctgtttgaactggggaacaacacgacatttcagacttatcgggcaagggcaaaggccgttagcgaagaaatatcgcttgaggagtttgcgcgggtactgctgatgataaacaagaaacgcggatataagagtaacagaaaagcaaaagacgcggaagagggcgaacttatcgacggcatggatgtggccaaggaactatacaataaaaaccttacgccgggacaatatctaatgattttgaaagaaagcggaaagagttatcggccggctttttatcgttctgacttgcaaaacgaactgaacaggatatgggataagcagaaagaatttcatccggagattcttacagatgaaatgagaaaagaaattaacggactaagttctacccaatgttctgccgctttctataacaagaaaaacatcacaacggcgaaaaactcaggaaaggattcttatagcactaaactgaaatggcggaatgattgtctaaagaaagagatggacatagagcaggtggcgtatgtggtgtgcagtctgtgtggtgagataaatggctcgagccaaaggctggccatgataagcgaccgtagcaaggaattatatttcagcgggaaaaccataggacaatatcttatggcattgcttgacgagaacccgaacacaagtcttacgaacaggattttctatcggcaggactatatagacgagtttaatgctatttgggaatgtcaggcgcggtatcacaaggaactgacacctgagttaaggaaaaaaattgccgacaacatcatattctttcagcgcgatttgaagagttgtaagtcgcttataagtttctgtgagttagaacattctgagaaagaggttgatgttggaggaaagaaaaagaaagtgactatcggtttgcacgtgtgtccgaggtcgtctcctttattccaaacattcaaaatatggcaggtgttgaacaatattcaagtaagcgttgtgggcaagaaacgcaagtctgttccaaaagattcttcgctatatctgttctccgaacgtgaaatgggagcaacacaaagattcttggaacaagacgaaaaagagttgctgtttaaggaattgtcgataaaaagcaagcttaaaaacactgaaatcctgaaaatgctgtttgacaatccggagagatacgagattaattacaacgaggtggagggcaattgcaccatgtcggccttttatagtgcgtgtgctgaaataatatcgcaaacaggaaacggcgaatatgatttcaataagatgagagcagataaagtgaaatcgttggtaaaagaaatcttttcgggactgggttacaacacagactttctttcattcaatcccctacttgaaggcaaagaactcgaacagcagacttcttataggttgtggcatttgctatattcatacaccggagacaagtctgtgaccggcaacgatgctttgctgaagaagattggagagttatgtggcctggaacgtgaatatgcacggatactggcgaacgtgtcttttgttgacgattatggcagcctgagtgccaaggcgatgcgaaaggtattgccttatatgatggaaggtacagaatacagtatggcttgtcaatatgcaggctacaaacactctgcacactcaatgacgaaagaggaattggaagccaaacaatatgccgaccatttagaaataattaagcgaaacagtctgcgcaatcccgtggtagaaaagattcttaaccagatggtgaacgtggtaaatagtttgatagacacttacggaaaacctgacgaaataagaatagaattggctcgcgagatgaaacagagtcgtgaagaaagggctgaacaagacaaaaatataagaaaggcaactgccgaacaggaaaagataaagaaaacacttgaaacggaatttgggattaagaacgtcacaaggaacgacatcctgcgttaccgactgtatgaggaactgaaaatgaacggatataaaacgctttattcaaacacatatatcccacgtgaagacctgttcaccaataagttcgacatagaacatattataccgaaagcaaagttgttcgacgactctttctcaaataagacccttgaggcacgcgatgtgaatatcgaaaagagcaataaaacggcatacgactttgttgcagagaagtatgatgagaagtggctggcagactatgagacacgagtggaggaactgctaaagcaaaaggtgatatccaaaacaaagagaaacaaactgctcatgagggaagcagatattccaaaggatttcctcaacagagaccttaccgactcgcagtatattgcaaagaaagcaagagaaatgcttgagagcatcgttccgaatgtggttacaactaccggtgcgataacaaaaagactgcgcgaagactggaagttggttgatgtgatgaaagaactgaactgggaaaagtataatagtctcgaacttacagaaacaatttacgaccatgataataaaccaataaaacgcatcaaagactggacaaagcgcaatgataacagacatcatgcgatggatgcactgacaatagcattcacaagacctgccataattcagtatcttaataacttgaacgcaagaagcgataagggaggcagtatttatggcatagagaagaagtatatgaaacgtgacgaacacggtaaattgttattcataccgccgattcctattgaaaaattcagggaggaagcaaagcgacaactcgaagccatacttgtgtcaacgaaggccaagaataaagtagttacgaagagcatcaacaaaataaagacaagaaatggagataaaaagaaagtgcaactcacaccgcgcgaccagttgcacaacgagactatatatggaaaaatagagcaatatcataccgaaataaaaaaagttggtggaaagttcaccgaagaagtggtgctgcgtgttgccaacaaacgaatccgcgaggctctttacgcacgattggcagagtttgattacgactcgaaaaaagcatttacaggaaagaactcgctcgaaaaaaatccggtgtggattgatgagaaacggttatgttgcgttcctgaagaagtgaaacttgttgccatgaaacaggtttttactataagaaaattggtagataagaaccttaacatagataaagtgattgatgctcgtgtaagagaaattctgaaacagcggcttgaagaatatggagatgatgccgccaaggctttctcaaaccttgaagagaacccgatatggttcaacaaagaaaagggaattgctataaagagggttaagatttccggaataagcaatggtacggctatacgcgtaaaacatgatgtggcaggagaattgatacttgatgaacatggaaaagcgttgggaaatgattatgtaagcacttcgaacaatcatcatatagcattctttacagacgcagaaggcaatttgcatgagcatgtggtttcgttctacgaagcaacggcaagggctattctcggctatcctgtcattgatcgttattataataatgaattgggatggaaatattcattctcaatcaaacaaaatgagttttttgttttccctaatgaagccgaaggttttaatccatgcgacatagaccttatggacgaggcgaacgctccgataatatccagaaatctttatcgggtacagaaattctctaatcgagattattattttaggcatcatttggaaacgaatgttgaggagaataaggctctgaaagacgttgcttggaaaagaataacatgtgtaaacaatctgaaaggcgcagtcaaggtgcgcatcaatcatataggtaagattgtgttcgttggagaatattagacaatgacgctatgattaagaaaacattgtgcttcagcaatcctgcctacttgtcactacgggacgggcagttggttataaaaattccggaaatacagaatagtagtggaatttcggaggctctgaaagaagagtctattataacacgacctatcgaagatatcggtgttttgattatagacaacaagcagttaaccattacgagtggtctgtttgaggcgttgcttgccaacaactgtgcggtaataacatgcgatgcgcgctcaatgcctgtcggattgcttcttccgttggacggtaa

SEQ ID NO: 2462 - DNA, 7562 bp, synthetic construct
  variation 5112..5113: note = n is a, c, g, or t
  variation 6153..6205: note = n is a, c, g, or t
  misc_feature 1..7562: note = Synthetic
  source 1..7562: mol_type = other DNA
  variation 285..445: note = n is a, c, g, or t
ctacctaaatttccgctcaacaaacttgggttgttcttcttcctgttgattaaaaagtcgatccaatagtgctttggtcggtttggtttgttccgtttctattcttcgtaatatagcttctaccccatccatgcgtttattaattagtgtttccaagcgctgtttagaatcatcaaagggctcaaacggactgatggaattccgctcaaaaaagtctaaaagagcctctaaggtttcggtataattcgcatcatgtgctagggcatactttttaaagcgctccannnnnnnnnnnnnnnnnnnnnnnnnnnnnnnnnnnnnnnnnnnnnnnnnnnnnnnnnnnnnnnnnnnnnnnnnnnnnnnnnnnnnnnnnnnnnnnnnnnnnnnnnnnnnnnnnnnnnnnnnnnnnnnnnnnnnnnnnnnnnnnnnnnnnnnnnnnnnnnnngcatactttttaaagcgctccacggtttcggtgtgaaaatttattcgggaaaatcgtttaggcatcactagatttttaaagattaggataatcaatcgccccctttataagggtttagaagcgtttcacggaaaatcgctacaaagcagttgctttcaatactttacaaatttgaaataacttactataaaacagttgattacaaataaaaatgagctatacaaccgcgcgcagcgggttatcctcttgcttctcatttttgtccgcttcgctactcaaaatgataacttttacatcctaagttatcaattaaaatcctcattaattttgatgtcaaatgctttcaaattttatggaagatcaaaaccatttacttggtatatctggagcgcttttcttgaagtttgatagaaaaacaaaagctccacattagatagatttcaatatacacccaaacgaaaaatagttgcttctaaacatccatttactttccatagcgccatcgcgtttccttttcgataccctccatttaaaatttagtattgaggaaagcttttataaaaagagcgacaacggagcctgattatgcaaagcggctcaaactaaattttagttctttcgagaaaaggaaaggagcgtttgaaaaaagtgtgttggccgtattttgagtttgactcagcctctttttgagcactcgttttatagtgcacttgaatcaagcgaacctaatcctcccgaagtttcgagatcgggattgggttcaagatttttgaatgaaccgcttttaccgtcccgaaatttcgggtgaagcttttttgcggaatggagggaaatggggtttattccccttacattttaaatcaatttataagatattggaatgtaaatgaaaaactattgaatgaaaaaagcgacccgtaaaggccgctttgaatgttttcacaacggaataatccttattgtgaattgctttcagactgctaatataagtaattgattttaaaagcaaaatgaggaaaagcgtaattatataattaatatataatttatattgtggttactaattctataaatccaactaaggtgaaaaaaatattaggacttgatctaggaactaactcaataggatgggcattagttaatgaggctgaaaatgagaatgaagaatcttcaataataaaacttggtgttcgtgtcaatccgctaagcgttgatgaaaagacaaactttgaaaaagggcgccccctatctacaaatgccgacagaaccctaaaaagaggaatgcggcgtaatctgcaacgatataaacaacgcagagaaagccttattgagattttaattgaatatggtattatacaaaaagacactcctctaactgaagcaggaaaaaatactacacacgagaccctttccctaagagcaaaggctgcaaaggaaaggattggactagaggattttgccaaggtcttacttgccataaataaaaaacgaggctataaaagcagccgaaaagcaaataatgaagaggaagggcaagcaatagacgggatggctgttgctaaaaaattatacgacaataacattactcctggtcaatatgttctggaattactattcaaggataaaaaatacattcctgacttttatcgctcagatttaaaggatgaattcaagcgaatttgggaaacgcaaaagcaatattatccagatgtactcaccactgagctttataaagaattagacgggaaaaacaaatctcaaacttgggctatctgtcaaaaaccatttcagattgtaggaataaaaagaactacaaaaggaaaagaaaaaaatattgaaacgtatcaatggcgtgctgaaggtctgacagaaaaattagaactagagcatcttgccattgtacttcaggaaataaataacagcataaatcagtctagtggctatctaggagccatatctgacagaagtaaaaagctttatttaaaccaacagaccgttggcgaaaatctgtatgcgcaacttgtaaagaatcctcatacttcccttaaaaatcaggttttttatcggcaagactacctggacgaatttgaaaccatttgggaaacccaatccaaatttcatttacaactcacagaagacctaaaaaaagaaattggtgatgtcattattttttatcagcgaaaattaaaatctcaaaaagcattaataagcttttgtcaatttgaaagttgggagcaagaatataaagaagaagagagcggaaaaataaaaaaaagaaccgtgggacggcgagttattccaaaatcttcccacctctttcaagaatttaagatttggcaaaatttaaaccatctggtatttaaaaatcaagaaaccaatcaaaacatcaaggttaaagatctggaacaggacttacgccaagggctatttgatgaactcaatatgcgaggtgatctgaaccccaatgatttgcttaaaatcttaaaatctgaatttaagattggaaagctgagtgattggaaatgcaactttgaaaaaatagaaggtaacagaaccaacgctgcactgtataatatatatcaaaaaatttctgattttgaagggtatggagttgattggaaaaagaaagatgctcgtgcaatcaaagaagaacttgcttcaacttttcctgaaatgggaatcgaagctacaatcttaaactttgatgcagaagctgatgattttactaatcaagccagctaccaactttggcacttattatattctgcagaggaggatgataaagtttctgaagaggataaattaatctacggaaataccagcgtgtccctcaagaaaaaattagatcaaaaatttggctttaagccagaatacgcaacaatgctggctaacatgtctctggtttccgattatggcaacctttcggcgaaagcaatccgaaagattttaccttacctaaaagacggacacctttattcggaatcttgtggtttagcgggctacaaccactcaaatagtttaacggcagaagagttatctaagagagcattaaagcctacactagagcttttaaaaaagaatagccttcgtaatcctgtagttgagaaaattcttaatcaaatggtgaacgtggtcaatcaggtaatcgaaacatatggcaagccagatgccatccgtatagaattagcaagagaattgaaaaaatcggcaaaggaacgtgcaaaaatgactaagggaattgctgatgccactaggagaaatgaagaaataaaaaagattattacacagcgatttggcataccaaacccaacaaagaccgatgttgtacgctatcgtctttggcaagaactggaaccaagagggcataaagatttgtttactgatacttatattccgccagaaaagattttttctagtgaaatagatatcgagcacattatcccaaaagcgcttttatttgatgactctttttcaaacaagacactttcctataaagacatcaacctcaaaaaggcaaatagaactgcaatagattttatcaaacaagattttcaatctgaagtagaggcatatacagcacgtgttgagacaatgcttaaaggtggtcatataagtaaaggaaaacgcaataaactgctaatggctttaacggatattcctgatggttttattgaaagggatttacgtaatagtcaatatatcgcccgtaaagccaagcagatgctttttgaagtattccctgaagttatggcaaccacaggaagcattacagacaaattacgcgaagactgggacttgattaatgtgatgaaagaattgaacctacccaaatatcgtgcactcggattaacggagtttgaagagcgactagataaaggaactgaaactttatttaaacacgaggttataaaagagtggaccaagcgaaatgaccatagacaccacgctatggatgcattaaccgttgcatttaccacgcacaaccacattcagtatataaacaacttaaatgctaggagagataccacacaggataatcaccctattataaaaaatatcgccaatcaaattaccgaggttaactctaaaagtaagcgtgtttttaaagcgcctatgagcagctttcgcgaaagcgctaaggagcatatagaagctatccttgtaagttttaaaaacaagaataaagttgttacaaaaaatataaatgttacaaaaactaaaagatttcagagagctttgtaaagaattcgctatgcttcacgcacctgctgaagtatattggttcactgctctcatttgggtctccggcgcattgttcggtcgctggttcctataaaatgatcatcccctttgatgtataccataaattcttatccgacgataaggataagttagatagagtatatcatctggggcaagacataatatgggatggcaaggaggttctggactctttattcgagaaacatgatgatctcgatttgagtccagagcactccttagcattaaaaaacatattaagcattattttctggggagagtacgttgcttggaacgtgacttcggatttatcatctcgacttgatgattttggcgcaaaaatggcagcggtatctcaagctcacgatgaagccagacacttttatgtcatgggcgattatctaaannaaactaaaaaaggagaaaacaagaaaatacaactaactccacgaggtcaattgcacaaagaaacaatttatggcaagtctaagcgaccaatggacaaacccgttaaaataaacagtaggtttagtattgcacaagcttctttgataatcaatcaaaaagaaaaagaagccattttaaaccatctaaaaaaatatgataacaatgctgataaagcatttactaccaaaacgcttaaagatgatccggttattctgaatgacgagccattaaaagaagttagagtgtttgaggagattttcacaattagaaaggacctgaatcctgagaattttaaaacacttaagcatattgataaggttgtcgatgaaggtgtgaaagaagctatgaaaaaacgtctcgcggagcataaaggagattttaaaacagccttttcagatttagaaaagcatcctatttggttaaatgaagctaaaggaatctccataaagcgggcaaccataacaggggtgagtaatgcagagcctttgcattatgccaaaaaccatctgggaaatcttatatatgatgaccttggaaaggaaatcccggtagattttgccagtacagggaataaccatcatgtagccatttaccaaagtgaaagtggagaattagacgatgaagttgtttctttttacgaagccgtaatacgaaaaaatcagaagttgccaattgtaaaaagtcaaagtaaacaaggatggccactaaagttcaccttaaagcaaaatgaaatgtttgtctttccatctgaaggttttgacccaaatgaaattgacttaatggatgaaaacaatcaatcacaaatttcaaatcatctgtatcgtgtgcaaaaattatctaaagtagaatatggtaaatcagcggtaagagattttgtttttagacatcatttagaaaccgaggtagtcgacataaaagaaatgaaagatatttcttggaaagctattaaaagtctaggtcatttacaagatatcataaaggtaagaaccaaccatttaggnnnnnnnnnnnnnnnnnnnnnnnnnnnnnnnnnnnnnnnnnnnnnnnnnnnnnttttaggccaaatcgttcaaataggagaatattaatatgattaaacgcaccctcttttttggaaaccctgcttatttaagtacccgtaacgagcaactggtggtcacctttcccgaggaagataaaaaagaagcgagcatccctatcgaagacttaggctatgtggtgcttgaagatccacaaattaccatcaccaatggactaatgatgaagttagttcaaaacaaaacagccataatcacgtgtgataagcagcatttgccctgctctttaatgcaacctttagtaggacataccgagcaaaccgaacgtatgcggcatcagctcaatgccagtcttcctcttaaaaaaaacctatggcagcaaaccgtaagtgcaaaaatttataatcaagcattacatttagaatccagaggaaaaaatgccaagaaactcaaacgctggagtaccgatgtcaaaagtggtgataccggaaacctggaggccgttgctgcggcgcactattttcaaaatctatttagtgaggtattcggctttagtcggaatcaaaaaggaatagcccctaacaatctactcaactacggttatgccattttacgagcagtggtcgcaagagcactggtgagtagtgggatgttaccctccattggaatctttcaccgaaataaatataatgcgttctgtctcgctgacgatattatggaaccgtatcgtatttatgtagatgccttggtttacgaaatcgtagaaaccggctgtaatattgaagaactctccaaaacacttaaagcagagcttttaagtattccggcaatggatgtctatattgatggtaaatggagccctttgatgaatgcggtaagccgtacaacgagtagcctgtatgattgctttttaggaactaatcgtaagatactctatcctgaatatacagtgaacagatcgcttgaatgatgcaggaaaacaatttttcaagacttaaccaataccgttctatgtgggtacttgtattttttgatttaccaacagaaacgcgcaccgaacgtaaagtcgcagcacggtttaggaaaaacttactcgatgatgggtttgcgatgttccagttcagtatttatatgcgtttttgcgcaagccgtgaaaatgccagtgtacacataaagcgtaccaaaaacaacttaccaaaaaaaggaaaagtctgtgtgatgcagatcaccgataaacaatttggtatgatggaactttttcacggtcaaaaagaagttgaaccggaagctcccagccaacaactcgaacttttttaagaaaaaaaatgccaggtcgagcgcggtcgagacctattgaaaaggtttgttttttt

SEQ ID NO: 2463 - DNA, 7535 bp, synthetic construct
  source 1..7535: mol_type = other DNA
  misc_feature 1..7535: note = Synthetic
gggtgccggcagacgaatcggacagcaatatgagaatgaaaaagcacaggaaggcgtgtcactttgccccgcggcagggagggtttgcatctccgtggaaccggacggttcccctggagttggtggaactggaggacagtagtttccacctgttggtcaaggtggtggcggatggcatggagggggagatgattatcgacacgggggcgtcggtgacggtgttggaccgcaagctcttcgcggcgaaggcggtggacgaaggggaggaggcggtccggatgcagtcggggagcgtgaccggacagattgaggatgtgcagctgatacacctcgacacgttgcgcatcgggggacggaagttgaagaatgtccgtatggcaggcatcgacctggattacgtgaacgagatgtaccgcaagcacctctcccggcaggtcatcggactgctgggaagcgatttctgcgtccgctacggggtgtgcatcgactattgccggagggagttgaggatggggagataaaaaagagaaagggcaaggaaatgttcctgacccctgccctgaatgttttcacaacggaataatccttattgtgatttgctacaattagttttgcaaaactataaataacttttttatatccaaagagttttttgatataaattcgtatatttgtgagtgaaagaaaaacagcatgtcatgagaaagattttaggcttggatttagggacaaatagcatcgggtgggcgttggtagatgaggctgaaaataaggatgaaatatcatctattgtaaagttgggagtaagggtcaatcctttgactgtagatgagatgcaggactttgaaaaagggaagagcattacgaccaatgcggtcaggactctcaagagatccatgcgccgtaatttgcaacgatataagttgcggcgtgacgcattggtcgggcttttgaaggagaacggattcattacggatgggactgtccttgcggaacaggggaatggaacgacgtttgaaacttatcgtttaagggcgaaggcggctgaggaagaaatctctttggaggaattggcgcgtgtgttgttgatgatgaacaagaaacgcggatataagagcagcagaaaggtaaaaggggatgaagagggggcgttgattgacgggatggaggtcgccaaaaaattgtatgatggggatttgactcccgggcagttttgtttgcagttacttgaggaggggaagagggtttttcctgatttctatcggtcggatttgcaggaggaatttgacaggatatgggaattccaaaaacaattcaatcccgaatcgttttgtgatgcggccaaagaggaggtcggaggaaaaaatagaagtcagacgtgggctgttctgtccaaatattttgtgtgggaaaaagaggagaatgtttggaatgaaaatgaggctaagactgaaaggcaggtaaaaggatgtaggcttgtcggacttaagcgaacggtaaaaggggaagagttgaagaaagaaaattatcgttggcgtgtgcaagcccttacggagcaattgtctatggaagaggtggcagtggtgttgcaggaaatcaatgggcagataagtgcatcaagcggttatttgggagctatcagtgatcgaagcaaagttctttattttaatcgccagacagtagggcagtatcagatggctgaacttgataagaatcccaatacgagtttgcgtaatatggtgttctatcggcaggattatttggatgagttcaatgtgatttgggagaagcaagccgagtatcataaagaactgacgccggaactgaagaaagagattcgtgatattattgttttttaccaaaggcgtttgagaagccaaaaagggctgattagtttttgtgaatttgaaaatcgggagattatcattgaaaaagacgggaaacgacaggctaaagttgtgggatgtagggttattcctcgttcgcatccattgtttcaggaattcaagatatggcagacattgaataatatagaagtgtttgttggtgagaaaaagggaaaacgaaagaaaacagatgtcttgcccggtttatttgacgaaacggaggatgctctaacgacgagaggcagacgctttttgtatcaagaggagaaggagatgttagccaaagaacttgcgataaaagagaatctgaagaaagccgatgtgttgaaactgttattcgaaaatccccaggaattggatatgaatttcaatcagatagatggcaatcgtacaggatttgcttttttctctgcatatagtaagattatcgaaaaatatgggtatgaaccgttggattttaagcaaccggcagatgaaataaccgatcagttgaaggctatttttactagtttgaactggaatgccgatgtgctttttatagacttgaacaaggagaataaagagttggagaggcaaccttatttcaggctttggcatttgttgtattcatttgaaggggataatacgccgaccgggaaaggtaagttgattgggaaaatcatgcaactttgcgggatggggaaagaatatgccgtagagcttgcaaatttgtcgtttcaagatgattatggcagtctgagtgcaaaagccattaagaagattttgccctatttgagagaaggtaatccatatgatgtggcttgtgaatatgccggctatcgccattctaagtcatcgttgaccagggaggagatagaaaatcgggttttgaaagacaaattggagattttgcctaaaaacagtttgcgcaatcctgtcgttgaaaaaatcctgaaccaaatggtgaatgtggtcaatgcaatcattgacgagtatgggaggcctgacgaaatccggatagaattggcgagagagttgaaaaaaagcgccaaagaacgtgaggaactgaccaaggtgattgcaaagaatactcgtgaacatgttgatatacgtaaagtgcttcaatcggactttggtatgataaatgtcagtagaaatgatattatccggtataaactttatgaagagttgaaagagaatggatataaaacattgtattcctaccaatatattccaaaagaaaaattgttcagtaatgaaatagacattgaacatattattcctcaagcccggctttttgatgattccttgtccaataagacattggaatataaggctattaatattgaaaaagggaataagaccgcttatgattttgtaaaggagaaatatggagaagatgggctacaacaatatctcaatcgttgtgaaagtgtgtataaggacaataaagccaaactccggaaattaaaaatggaagagcatgatattccgaatggatttattgacagggatttgagaaatacgcaatatatagccaaaaaggctcttgccatgctgaaagatatttctcgtagagttgtggctacgactggttccattacagataagttgcgtgaagattggcaacttgtggatgtgatgaaagagctgaacctgcctaaatatgaagccttgggattggttgagaaatttgaggataggaatggaagaataattaaacgaataaaggattggacaaaaagaaatgaccatcggcatcatgcgatggatgcattgactgtggcttttaccaaagatgcgtttatccagtacttcaataataaaaatgcggcatggacatccgatagtaaagagcattccaatataatcggtatcaagacccgttattttgagtccggaagagctttgccgcctatgccgttagggcaattgcgtgcagaggcaaagcaccatttggaaaatttgttggtttctatcaaggccaagaataaagttgttaccaccaatgtaaatatgataaaaaagaaaggtggtgcatataaaaaacaacaactgactccacgcgggcagttgcatttggaaacaatctacggaagccataagcagtatgtcacgaagatggaaaaggtgaatgcttcttttgatgcggaaaagattgcgactgtatgcaagcaggattatcggaatgcgttgctcaaacgattggcagatttcggtaatgaccccaagaaagcgtttaccggtaaaaacacgttgggaaagaatccgatttatgtagatgaagcaaagaccatatccatgccagacaaggtacaaacggttgaattggaaacggtttacacgatacgtaaacctgttgattctgatttgaatgtagacaaggtgatagatacgaaagttcgttctattttgaaacagcgtttggaggaatatggaggagatgctaaaaaggcatttgctaatttggatgaaaatcctatatggttgaataaagagaaagggattagtattaagcgggtaactattcgaggaataaataacgctcaatcattacatgaaaagaaagataaaaacgggaaattggttttggatgaaaacgggaatccaattcctgtggattttgtaaatactggtaataaccatcatgtagctgtttatcgtaagccggttttagatgataaagatcaagtgaaactggatggagaaggtaatccgatgtatgaattggatgaggttgtcgtttctttctttgaggctgtaacacgggctaatctgggacttcctattgttgataaagattatagaagaagtgaaggttggcaatttttgtttagtatgaaacagaacgaatatttcgtgttcccgaatgaaaagacgggttttaatccgaaggagatggatttattggctccgaataactatacagagattagtccgaatttgtttagggtacagaagataggttcaaatgactacacttttagacatcatttagaaacgacgatacagaatagtatgaatgatttaaaattcataacctggattagatgtggaaaaaatggtatcaatgatatagttaaagtccgaattaatcacatcgggcaaatagtttccataggagagtattagaacgattaagccaaatgcaagtatcaagattgtttgaatggattgataaaagtggaaaacataaaatttgagtaatcatgcaggcgaaaggaaatcaaattcttctctatcaagcggaagatggtgaggcaaggattgaagtgattctttctgaggataccgtttggttaagtatagaccagatggcggaattattccaacgcaataaatccaccatctcccggcacataaaaatatactggaaagcggagaattgaaaatgaacgcagttgttgcattttttgcaacaactgcgtctgatatgaaaacttaccagatttcttattacaatcttgatatgataatcagtgtgggataccgggtgaatacacaattatctcccgtggaattgcattttattgataattttgaaagagagaggaaaaaattgaaaaagcaatgatactcaacaaatacttatactatgataaaaaagactctctattttggcaatcctgtttatctttctttgtggaatgggcaattgactatcaaattgccggaagtggagaaaaataatactttgtctgaggcattcaagaaacaagccgaagtcaccaaagcgattgaagatattggcattgtgatattagataataaacaaatcacgattacttccggtgcgatggaggcattgttggaaaataattgtgcatttattacctgtgacagtaaaagcctgcctgtcggtttgatgttgcctttgtgcgggaatacgacacaaaacgaacgtttccgcgaacaattggatgcttctttgcctttgaagaaacaactttggcaacaaactattcaggctaaaataaataatcaggcagcaatattggaccattgtacgcatgaagaggtaaaatgtatgcgtgtttgggcgaataatgtacggagcggtgattcggataatttggaagcacgggcggcagcatattattggaaatgtttatttgggcatataaacggatttacgcgtaaacgggatggtgtgcctcccaataatttgttgaactacggttatgccattttacgtgcaattgtggcgcgagctttggtgtcaagcggattgttgcctactttaggaatccatcaccataatcgttataacgcttattgtttggcagacgatatcatggaaccctatcgtccttatgtcgatgaacttgtgtttcaattggtgaaagaccaagagattcctcaggatttgacaaaagaattgaaaacatctttgctttcgatacccactttggatgtcgttttgaatggaaaacgcagtcctttgatgatagcggttggacagacgaccgcttcgctttacaagtgtttttgcggagaaatccgcaaaatagcttatcctgaacgataatggatatggaccgttttagcgaatatcgcattatgtgggtgcttgttttcttcgatttgccaacagataccaaaaaagacaagaaagcttatattgattttcgtaaaaatttgcagcgggatggtttctctatgtttcaattttctctttatatccggcattgtgctagcatggagaatgcacaggtgcatattaagagagtaaaatcttttcttcctgaatttggtaaagttggaattatgtgtgtgacggataaacagttcgggggcattgaattgttttatggacaaaagccgcaatcttctgaaactccaggtttccaattggaattgttttgaaaataataaatcccgcttttatgcgggatttattataaggattttgtccttttttcttttctaactattggtataaacgtttattaatcagtttgtaatacagattgagttgttgccaataggtcaaagatactaatttgtaagcaaatcacaacgtgcgggggacgggaggcggaacgggaagtggttgttgccaataggtcaaagatactaatttgtaagcaaatcacaaccgaggctatcggttctatttctggcgctggttgttgccaataggtcaaagatactaatttgtaagcaaatcacaacgttttcagcccattcctctttcggaggtcggttgttgccaataggtcaaagatactaatttgtaagcaaatcacaacttaatcaacgtgatgctttggccgagcttggttgttgccaataggtcaaagatactaatttgtaagcaaatcacaacgctttatgcaaatggtaacaattttggtttgttgttgccaataggtcaaagatactaatttgtaagcaaatcacaacttccattaatcctatgtatcagcgaggaatgttgttgccaataggtcaaagatactaatttgtaagcaaatcacaacagctcagctctctcgtgaacatcagacatgttgttgccaataagttaaagtacatctactgcacttaatcaataatgaaagttctgatttagttgcatgcaaatatacgcaattattcttttcgtaagaatgtttccctccatcctttggaatggttttaacggctcctattgaaattgtatatcgg

SEQ ID NO: 2464 - DNA, 7464 bp, synthetic construct
  source 1..7464: mol_type = other DNA
  misc_feature 1..7464: note = Synthetic
  variation 302..303: note = n is a, c, g, or t
atgaatccgaaatgagagcggattataaaccgattcatcacgataaaatttaaatttccaaaacccttatagaacttgcagtttctgtcggttcgaaacaaaagctccgaagaaatttggggctttttgtttttgggtaaattttttttcttcatccgattaaccaatgattggttaaaactgaaattctaaatgaaagtaacagggtaaatttttttaatggatgaaagcataggagaacagcccggaaaatatttttttctttcggtttttgagaactttatttcatacactatccatgnntgggtggacaagtgggtgagtaatgcttcaggttctcaggtctattgtctgatgtcgattctgtgacagaccgggataacaaactgaaacaaaataaattttataggctgtggccaggccggaaaaggtgaatttttatccggtttttggctggttggtttcatacactatccatgctttatccatacactatccatacatcatctatggagtatctcagtatcaaagctatttgttttcaggctaaattactgacaaacaaataaatatacaaggtattggaaatgacatttctgtccttttggtacggaagccgaaatctgtgaccaaatcggaaatttgtgtcgttttggcggtttgcagacatttgggacaaattcattgaagtaatccaagccataacgcaaatttaaaggagagggattttcttaaaaaaatatctgttatgctcaatttgtctatgaaatgaaaagtttgtttataagagaagactgcaaaaactgaaataaaaaaatgccccgaagatagtcgaggcgctaaatgttttcacaacggaataatccttattgtgaattgctttcaaaatttgtaggacaaatgtaaataaaatttttaaattgacccaactaatagaaaaaacagtttataacgacgtattttgacgttattattaattagcttacgcgaatgttttaaaactcagaattatgaaaaaaaatatactcggtcttgaccttggcacaacctcaatcggatttgctcacattattgagggaaatactccggaacaatcatcaattgttcaaatcggggttcgtgtgaatcccttaacaactgacgaacaaactaattttgaaaaaggcaaacccgtttctgtaaatgccgacagaaccttaaaacgtggagcaagaagaaatcttgaccgctatcaggatagaaggaagaacctgattgatgctttactgaaagccgatgttattacaaaagatactattcttgctgaaaatggaaaaaacacaactcacgaaacttggtgtttgcgagcaaaatcggttgctgaaaaaatagaaaaagaggaattagctcgtgtgtttttggctatcaataagaaacgtggttacaaaagcagtcgcaaagccaagaatgaagatgagggacaggtaattgacggaatggcgattgcaaaaagattgtatgaagaaaatctcacgcccggacagttagcctatcaattattaaaagaaggtaaaaaatacatccctgatttttaccgttcggatttgcaagctgaattcgataaggtttggatttttcaaaagcagttttatcctgaaatattgaccgatgacttttacaaagaattacagggaaaaggacaacgggctacttccgcttcattttggggtaaataccaattcaacaccgctgaaaataaaggcaatcgggaagaaaaaaaattacaagcctacaaatggagaagtgaagcaatttccaaacaattggaaaaagaagaagtagcttacgtcattacagagattaataacaacctaaataattcaagcggttatctcggagctatttcggacagaagtaaagaactattttttaatcatctcactgtcggacaatatctttataaccaattaaaaaacaatccgcatacacgattgaaaaatcaggtattttaccgtcaggattatttggacgaatttgaagcgatttggcaggaacaagccaaataccacaaagaattgaaagaagaactgaaagccgaaataagagacattgtaattttctaccagcgaaaactaaaatctcaaaaaggcttggtaagcttttgtgaatttgaaagtcaggaaaaaatcatcaacggaaacaaaaaaagaattggtttgaaagtcgctccaaaatcttcgcctttgtttcaggaatttaagatttggcaggtattgaacaatgttttggttcgtaaaaagggaagcaaaaaacgggcagttaagcaatcagaccaagccacattattcgatgaagaaaaggaaatatttgtttttgatttagaaaccaagcaaaggttattcgatgaattaaacattaaaggaaatttaaaagccaataaaattattgagtttttagggtataaatctgccgaatgggaaatcaattattcggaattggaaggaaaccgaaccaacaaagccttgtatgatgcgtatttgaaaatattggaattagaaggttacgatgaagacttattaaaacttcagggaaaagacgatattaacgtttcggaactgaaagcatccgcttctgaaatcaaggatatggtaaaacgtatttttgaagtgctgaatatcaataccgaaatcttagaatttaatgcagaattggacggaaaagcctttgaacaacaagcctcttatcaattatggcatttgttatattcttatgaaggcgatgattccaaaagcggaaacgaaaaactgtatgaattattggagaaaaaattcggtttcaaaaaagaacacgcccaaattctggcaaacgtagcattgtctgatgattacggaagcctgagcaccaaagcaatgcgaaaaatttatccgcatatcaaggaactgcattacgataaggcttgtgaattggccggttacagacattccgcttcttcattgaccaaggaagaaattgtaaatcgtccgttaaaagacaaactggaattgctgaaaaagaacagcttacgtaatcctgttgtagagaaaatcttaaatcaattggtcaatgtaatcaatacgattattgaaaccaacagtaaaaaagatgaaaacgggaaaattaccgaatatttcaaatttgacgaaatccgtatcgaactggctcgtgaattaaagaaaaatgcgaaagaaagagccgaaatgactaccaatatcaatgcgtcaaaaattgctcacgaaaagatttttaaattactgcaaacggaatttggcattaaaaatccgacccgaaatgatatcattcgttaccgtttgtatgaggaattaaaaaataacggttacaaagatttatataccaatacttatattccgagagagattttgttcagtaaacaagtggacattgagcatattatccctcaatcgaaaatgtttgatgacagcttttccaataaaacggttgtttacagacaaaccaatttagacaaaggaaatcaaacggcttacgattatatcgaaagtaaattcggggatgataaagcggaggaatacaaagcacgaatagaagccttataccaattgggaatcaaaagcaaagaagacggaatttccaaggcaaaatatcaaaaactgcttaaaaaagagtccgaaataggagacggatttattgacagagatttgcgggacagccaatatattgccaaaaaagcgagaaaccttttatacgaaatttgtcgggttgtaaccccaaccacaggaagtgttacagacaggttaagagaagattggaacctgataaacattatgcaggagttgaattttgagaagttcaaagctttaggattgacagaaatggtggagaaaaaagacggaactttcaaagaacggattgttgattggagcaaacgaaacgaccatcgccatcacgctatggatgccctgactgttgcatttaccaagcatagccacattcagtatctcaattatttgaatgcccgaaaaaacgaaaaccacaaattgcacagcaatattatcgggatagaaacagcagaaaccgaagtaaaaattgatgctgaaggaaacaaaaagcgaattttcaagttacccattccgaattttagacaacaagccaaagaacatctggaaaatgtattggtttctcacaaagccaaaaacaaggtcgtaaccaaaaacaagaataaaaccaaatccaaaaacggagaaaaagtaaaaatagaactcactccaagaggccaattgcataaagaaaccatttacggaaaatatcaatattacgtaaacaaagaagaaaaagtcggaacaaaattcgatgaagaaactatcaataaagtaagcaatccgctatataaaaagctactgttacaacgcttatccgaaaacggaaatgacccgaaaaaagcctttgcaggaaaaaacgcattgagcaaaaccccgatttatctcaatgaagagaaaacggaaacattgcccgaaacagtaaaactgacttggttggaagaagattattcgattagaaaagacgtaacacccgaaaatttcaaagacgaaaaatccattgaaaaagtattggataaaaaggtaaaagacattttgaaagaaagattgaaaacttttgggagtgatgcaaaaaaagccttttctgatttggataaaaacccgatttggctcaatgaagcaaaaggaattacaatcaaaagagttaccatttcaggagtgaagaatgcccagttcttacattacaaaaaagaccatttaggaaattatattttagacaaaaacggagataaaattcctgttgattttgtcagtactgggaataatcatcacgttgctatctatagagatgaaaaaggaaatttacaggaaagagtggtttcactttttgatgcggtacaattagtcaatgcaggtgagcctgtaatagacaaacaatataaccaaggcttgggttggcaattcctatttacaatgaaacaaaatgaatactttatattcccaaatgaaaaaacaggatttaaccccaaagaagtagatttagtagacccaaaaaacaagaaagagattagcccgaatttgtttagggtgcagaagttggcaacaggagattattggttcaggcatcatttagaaacaactgtagatgtaaaggctgagttgaaagatgttacatataagcgatgtagtttggttggaattaaagatattgtaaaagtccgtatcaatcatttgggagatattgttagtgtgggagaatattaataatgaaaattgtaaaatgaaccgttccgatttttaaaatcaaaagggttgggtgtataataatgggtgcagtcaaaaactccgtttatcgtataatcctgcagattcatattgaggaataaacgtaattaataaaaaacaaatatggcgcacaaattaaaaataaccttgaattatacagacccgaagatacaccgaacagttatcgttccggaaaattttaacttcgatgaattgcattttgtaattcaatgtgttatgaattggaacgactcacatttgtatcaattcaatattggagctccatacaacagcgattcaattcgtttatcggatgatgaagaagatgacctttttgggtttgaacgacacaaaaaatacaatgctgaaaaaatatttctatctgatttttttaatggaaaactaaagaaaatgaattatatctacgattttggcgatgactggatgcataccataaccgttttaaagaaacctgacgaagaggtactttatccaaagtgtgttaaaggtgaaaatgcagcaccgatagatgatattggcggaatttgggggttttatgacttaattgaagcctcagaaaagaaacgaaaaaatgccgaagaaaaagaaatgcttgaatgggccggaatcacgaaaggaaaaacctatgatgacatttatggatttgatattgaccgagtaaaccggcgattaattgtcgcttttcgataatttttaaaaacgtttccaagctttcccaaagttccaaattttggaaaagttttttcagatgttagaattttaaaactcaatactgtgttaaaacgaaccgtttacatcggaaatccttcctatttgaagctaaaagacaaccaattgcaggtgattgatcccgaaacccgagaagtcaaaggatcggcaccggtagaggatctggcatttttggtattggacaattatcagatcaccttgagccatcaactgattgttgccctgcagggtaacaatgtcgccattatcagctgcgatgcacagcatcttccttttggcctgatgctgccgatgagcggtcatgtggaacattccgaaagattgaaagttcagatgaatgtatcagagccgctcagaaaacagttgtggaaacaaacagtggaagccaaaatcagccagcagatgttgcttttgaaaaaattgggaaaagaatatgaaccgatgaccgaatatctgaatgcggtaaaatcgggggacagtaccaatatggaagggattgctgctcaattttactggaaacggatgtatgaaaatttcagccgcgaaagagaaggagaggcgcccaataattttttgaattacggttattcgatcatcagaagcatagtggcaagagcgctggtcagttcgggtcttcatccgaccatcggcctttttcaccgcaacaaatacaatccgtattgtctggcagatgacattatggagccttacagaccttatgcggacgaattggtttacagaatgatgaatcttccgacccgaccgaccgagctgacaacctcggtaaaagcagaattgctgaaactggcttcctgcgatgtgatgatgatgcaaaaactcaggccgctgatggtggcggtcagcagcacgacatcatcgctgtacaaatgctattccggcgaacagcgagtgatcagatatccgctgttatgctgagtcaaaatcgttttaacgcataccgtatcatgtgggtacttgtattttttgatttgccgaccaataccaaagccgaaagagccaaggcgagcaaatttagaaaactgcttttggatgatggttttcaaatgttccagttttcaatttatcttcgtcactgtccgagccgtgaaaatgccgaagtccatgtcaaccggaccaaacagcgtttgccgaaatacggtaaaataggaattcttaccataaccgacaaacaatttggccagatggaattattttttggtcagaaacagaccgatcttccggttggtccccagcaattggaattgttttaacagaatcggagaaattcataaaaaaatcagatgctaattaataaaacatctgattttttgattctgttcgttccgtttgatccctctgttacaaagggattcaattgaggttggaacgaatccctgta

SEQ ID NO: 2465 - DNA, 7300 bp, synthetic construct
  source 1..7300: mol_type = other DNA
  misc_feature 1..7300: note = Synthetic
ctcctcccgacaatcaacagcaggataagcatgtagaaaaccctctggcgctatgtttggacggcggttcgactccgcccatctccacaaaggtagttataacaggtgagttatatttttacgcagaactttacgctaaaaggcgtggggttctgcgtttatttcgtggtacgggttgcggggtacaagttacgtgtttcgggttacgagttacgtgttgcgtggtgcaagtgaagggtgtaagttatgggttgagtattgcggaacttgattatgggtcttggcgggttttgaaggggaggatgtggatggtgacgccggctattttagaattgattctcccgacaattgttaacagatatatttcatactctacagaaaaaacagcgacactcccgcgatacttataaaggctccgataacctctataactttcactttttgcttaaaaatcaggtaagatggaagaataatgagaaccggagttagagccataattgtcgaagctatgccggcattggcatattgtactgccatcaatgagagtgaaactccaataaaaggccctgtgatggtggcaagagtggcataaagcatcccacggcgatcatttagtgcatggacaagctttggaccttccttcctaatcagaaggattaatataaatccgatggcacccatcaccgctcttatgaaggtcgatgcgaagggaaccattgcgctcactgcagtagtaccttcagggattgcagcatgatagtgtcccatacctaccttgcttagtacgagcccaactccttgcccaactcccgcacctatacccagcaaaactcctttgataggaagcttgacggccactttgtgtccatgacccctgcttagaatggacatagcgatgcccgaaagagtcacaaccatacccaacagacctttccaggaaattgtctctccaagtaacgcccagcccgttatagctgccaccggaggagccagagtcataaagagctgcccgaaacgcgcacctattaccagataggagttgaagaggcaccagtcgccaaacacataccctatgagtcccgaaagaagcagccaaaaccaggtctggccatcagcaaagcgcggccagggtgctccgatcactatccaaagggttgcaccgagcatcagtagcgacagtgtcatccttatgatatttagctgcagcgaccctatgcgctttgtgccaacttcggcaaaaagtgcagtcgccgtccagctaatagctaccgccaatgatatgagttctcctgtgtatcccataacaggcggcaaagatagttatttttagttctgagtgttacgggttacgtggtgcaagttgcgtggggtggaagttaggaagaaataagcaattataagctgtggaaatagaagatttgttgtaagaataaaaaaatcccccgttaaaggacgagggaacctaatgttttcacaacggaataatccttattgcgaattgactattgtgtatcttcaattacaaagaaagtaattatttattaaataagcaattttactttctttttgttatttttgttacgattaaaaatacaacgatatgaagaagataataggattggatttgggaactaccagtattggctgggctgtagtaaatgaagcagagaatgattctgagaagtcatcgattgagagattaggcgtaagagttaatcctcttactgtcgatgaaagaaccaattttgagaaaggaaaacctattaccacaaatgctgataggactcttaaaagatcgatgcgtagaaatctgcagagatacaaactgagaagagataacctaatagaagtcctgaaaagagagggctttataacggacgagactgttctggcggagcaaggtaatcattcaacttttgagacatatcgcttaagggctaaggccgtatctgagaaagtatctcttgaagaacttgccagaatattattgatgataaacaaaaaaaggggctacaaaagcagcagaaaagcaaagaatgaagaggagggctccctgattgatggtatgtctattgccaaggagttgtatgataatgatatgactcccggacagtattcactctcattattggaagcgggtaaaaaaagtcttcctgattattatcgatcggatttacagtcagagtttgaaaaaatatgggtagtgcaaaaggcatattatccagaacagctgtctgatgaattgaaggatttattgataggtaagaattcaaaacaaacctgggctattattgctgataaaacagtttggaaagaagatgtcaagcaatggaatgaaacactcgccaaaactgaatatctaatcagagagtataagttgaaagggattaagagagaggggaaacgcgatgagcaaaaattggaaaactataaatggagggtagccggtttaagaggtagattgcatccggaacagcttgctattgtatttcaagagataaattcgcaaatatattcatctagtggatatctgggtgcaatcagtgataggagtaaagaattgttcttcaataagcagactgttggacaatatcttatgaagttgttggatgaggatcctaatacaagtcttgtcaaccgtgttttctacagacaggattacatggacgaattcgagactatatgggaaaaacagtccgaattccacccggagctgacccatgagttgaagagggaaattagagatataataatcttttaccaaagaaggctcaaaagccagaaaggacttatcagttattgcgaacttgagagttgggaaattgatgttgtcagaaacggtaaggttgaaaagaagactataggacaaagagtaattccgcgttcttctccattattccaggaatttaaaatttggcagatgctaaacgatgttgaagtatctgttaaagacattagaatcaaaaaacgaaaagaaggcaacaacctctcactcttcgaagaacaagatccttctgaaaaacttaaaatttatggtcggagacggctgactgaagatgagatggcactcgtggcctcagaactttctattcgttccgagatgaaaaaagaggatgttcttaaattgttgtttgatgattggaagagtctggacctgaatttcaaaagattggatggcaacaagaccggtaatgcactctacgaggcatatagtaatataattgagctctctggtcactttcccattaattggaatcatagtgctgacgaaataacatcttatgtaaaagaagtatttgatgctttaggttggaactccaatatattgtcttttgactcctctaaggatttacaatcacaagattattacatgctttggcaccttctttactcttatgaaagtgacaatagcgaaaccggtaataaatcccttatagacaaattggtttcattttgcggttttgatagagagtatgctgtagttttatcaaatgtttcctttcttgaagattacggaaacttatctgctaaagccataggtcggatattgcctcatctcaaagatggtaacgattactatttgtcttgtgaacttgccggttacaaacattcgaagtcctcaattacaaaggaagagaatgaagcaagaattcttaaggattcgcttgacttgctacctaagaatagcttgcggaatcctgtggttgagaagatcctcaaccaaatggtgaatgtagtcaacgcgttaatgcaggaatatggaagaccggatgaattccgtgttgaattagcaagggaattgaaaaagaatcagcgcgagagggaagagatgaccaagtcaataaatgaaagcacaagggtgaatgaggggataagggaggtgcttatgaaagagtttgatttaacacatgttactcggaatgacattgttcgttataaactctatgaggagttgaaggataacggatatcacaccttgtattccaacacctatattcctaaagaaaaactttttagcaaagattttgacatagagcatatcataccgagatcaagattatttgatgattctttttccaacaagactctggaagttagaagcatcaatatagacaaaggcaatcagacagcatatgattatgtcctatcaaaatatggtgaaactgaactcgaggagtatatgaatcgttgtaaagcacttttcccgaaagattctgcaaaattgaaaaagttgttgatgacggaaaccgatattccggaaggatttgtcgaaagagatttgagaaacactcaatatattgcaaaaaaagcgttgtctatgcttaatgatgtttgtagaagagtagttgcaacaacaggtagtattacagatgagctgcgtagcgactggcaactggttgatgtgatgaaagagcttaactgggaaaaatataaagaacagggactggtagattatcactcgggccaggatggtcgcataataggcaagattcaagattggaccaaaagaaatgatcatcgtcatcatgcaatggatgccttgacagtagcttttacaaatcctgctttgattcaatattataataatgtgaatgccagtttcaatcagaccagcaatgcatatttgataaaaaataaatacttcaaggatgggcgcgctataagtcctattccattgaatgagttcagagcagaagccaaaaggcatcttgagaatattcttgtttctatcaaagcaaaaaacaaagttgttactagaaatgtcaatgtcacaaaaaatggaaaaggcggaaccaacacaaagattcaattgacgccccgaggacagttgcacaatgagacaatttatggaagccatcaaagagtcttttatgttgaagagaaagtcggatcatcatttgacaaagagaagatatctagagtttcgaatgcacgttatcgtcaggccttgatggaaagacttgaagcttccttatggaatcccaagaaggcctttactggagccaatgctctgtccaagaaacccatatggataaatgaggaaaaaggggtacaacttccagaaaacgtgaaagttaaaaatgaagaggttatttatactataagaaaacctatagatgaaagtttgaatattggcaaagtcatagatccaaaggtgcgagcaattcttgaagagagattgaaagagtatggaacgcccaagaaagcattctcaaatcttgatgagaacccgatttatttgaataaagaaaagggaataacaatcaaaagagttacaatatccggtataaatactgctcgtgccctacgcgaaaaagatggtaaaaatggagaaaaagcacctaaagatttcgtgagcactaacaacaaccatcacgttgcgctattcaaaaggcccataatagaccaaaagggtgttgaaggatatgagttctgtgaggtagtcgtgccctttatagaggcagttgccagggtaaatcttggagatcctgttatcgatgtggattatggaaaggatgagggatgggagttcatgtttacaatgaaacagaatgaatattttgttttccctaatgagaaaacaggatttgatccgcacgaaatagatttgttgaatccggataattatgctttgataagtcctaatctgtttagagtacaaaaattctcaactaagtattatgtattcagacaccaccttgaaacaggggtaaaagatgttgaggaattgagagacgttacttggaaaagaattacttgtcttgatagcaggttattgggaattataaaagtaagaatcaaccatattggcaggattgtatcagtaggggagtactaggtgtttctacttccgggattatatttaccaactagatacactttatgattaaaaagaccctttattttggaaatcctgtgtatctcacacttagagatgctcagttagtaatcaaatttccggaagttgaaaacaatgacgacctgcctgaccttttcaagaaaaaaaatgttattactcaaccggtagaagatatcggagtggttattttagaccacacacagattactattacaacaggcgctctagaggcattgttggagaataaagcggctgtgattacttgcaattcacaacatatgccgaccggactgatgttgcctttatatggcaatacaattcaaaatgagcgtttcagggaacaattgtctgcctccgtgcctctgaaaaagcaactatggcagcagactgttaaagcaaagattgaaaatcaggcggcggtgcttcaaagaaacctttcatctgatataaggtgtatgaaggtatgggcagaaaaggtcaaaagtggagattcagacaatcttgaggcgcgtgcatccgctttttactggccaagagtttttcccgtaattaatggttttgtaagaggacgtgatggattgcctcccaataatctcttgaattatggctatgccattttgagggctgttgttgccagggccttggtttcaagtggattgcttccgactctcggaatacatcatcataatagatataatgcgtattgcctggcagatgatattatggagccatatcgcccctttattgatgctctggtgtgtgatattgtaaagtcaggaacggattatcagaatcttacaaaggatataaaatccaaattacttgcaatccctacaatagatgttcagattggagatttaacacgtccacttatggtcgctgttactcaaacgacaacatctttgtacaaatgcttttcgggagagttgcgccgaattgcatatccatcattttaatgagcaggataagcgaataccgcgttatgtgggtattggttttatttgatttgccgactgaaactaagagaaacagaaaagacgcagctcaatttaggaaaaatcttataaaagatggctttacgatgtttcagttttcaatatatatccggcattgtgcaagttatgagaatgctcaggttcacgtaaggagagtcaagtctatactaccggaatatggacatgtaggtataatctgcattacagacaaacaatttggaaatattgagttattttacggaaagcaaatgtatgaagttactgctccgggacagcagttggagctgttctaaataagaaatcctgttgaaccaacaggatttctctaaaaagtcgcaaacaattttaattctaattttcgtcataagtcgctaaaatacagtcagatacacggagtctactgtttgcgatatatcaaagatacgaaatgtagtcaattcacaac

SEQ ID NO: 2466 - DNA, 7251 bp, synthetic construct
  variation 6586: note = n is a, c, g, or t
  source 1..7251: mol_type = other DNA
  variation 6616: note = n is a, c, g, or t
  misc_feature 1..7251: note = Synthetic
  variation 6523: note = n is a, c, g, or t
  variation 7005: note = n is a, c, g, or t
gtaggatttgttactgcactgctactatactcaccgtaccaatcattacaccactcccatacgtttccactcatatcgtatatgccaagttcgtttggttgcttttgtccgaccggttttgttccgcttggcgaattattatttctataccaacctacatcattcaaattattgctcccgctgtaaatgtaacctttacttttaactccgccgcgtgccgcaaattcccactgcgcttccgtaggcaagcgaccgcctttgctctttgcccaatcgtttgcctgaaaccaagttacattaacaacaggatgattggcatttcctgattttccgtactgcgcgttcgttataggatatttgcttatatagtaatcttgcgtcagcgttacttgatgtcgcgtttcatcgttgaatcgtccgctctcgcttgtcgggcttcccatcataaatgttcccgctcttaccaatacgcattctattccgttgattatttttgtttcggcagtttgagacgtttggcttgcaacttgcgacgtattgctttttgcagcgttaagttccgatttaagttttgaaagcgtcgcgttaagcgctgttattatgctatctttttgcaaaacttgcgattttatattttctatatacgctcgatttctttcgttcgcttccgttaaacgggcaattcgcgccaaatattcggcttctttaatcttatattgatttatttcgccgaataaaaacgtttcgtttctctgcatttgcgttcttaaagtagaaagttggctgtttaatctttcgacttgttgtaaaacttcctgattcttatctttaagtatcttcatttctttctggttaagcagtatttcatccgcctttctcgacgcttgcgacgggtcgactaccatttttgcgcgaatataatattgcgttcccgaccaagtttccgccaaaatatccattttcaccatactcgcggctattgccgttatcttttcggaataattgtcgtaaataaactcgttgctacgagaagccccttccattcgttgctcggcgattatcacttgcccgatttctctaagcaaaatcgctcgcatttgctttaccgcgttacttcgcgccgaaactttgctgtcgtattcgctcgccaaatacgtatattcgcgaacaaattcctgtggtctaccaaacgtcaatgtcggcagaagtgtcaaaacaaacaaaattattgttgtcttgacgttaaatttttttgctattagcattttttacctcgctatgttaattttgccgctgtaaaataatatttggcgagagtgataaaagaaaattgttttttgtgagaatattttttttgaacttttaacgttttttatattttaatcatatatcataatacttttgataaattaaatatagtatattatcagtcaaggattaaggaagcaaaaaaataaggattatcgttatgaaaaaaatactcggattggatttgggaacaaacagtatcggctgggcgttggtgaacgaagcggagagcggtgaggaaaaatcctcaatcgttcgattgggcgtcagggttatcggctatgataattttgtcagcacaaaaaccggtaaggagtcaaaggagccggagaaggatttcgcgggcggcaagggaatctctcctaacgcggggaggactatgaaacgcactatgcgccgcaacctgcagcggtacaagcttcgccgtgaaaacttgatagaaatcctgaaagagtatggttttatttccgatgaaaatattttgtcggagaatggcagccgcacaacctttgaaacataccgtctgagggccaaagccgccacggaggaaatatctttggaacaacttgcccgcgtgttgttgatgataaataagaagaggggttacagaagcagccgtaaagtgaaaaatgaggatgatgggcagttgattgacggaatggaaatcgctcaaaagttgtacgacgagaatctcacgccggggcaattttgtttgcggttactggaaaacggtcaaaaaacgctccctgatttttaccattctgacttactggctgaatttgataaaatttgggcggaacagaaggagttttatcctgacattcttacggataaattaaaagaaaacttgtgcgggaaaaatggaaaacaaacgtgggctatttgcgcaaccccatttcaaattgtagggataaagcgtgacgtaaaaggtgaagagttgaagaaagaaaactttgtttggcgtgtcaaagccctttccgaaaaaatggatttggagagtttagccgttattttgcaggaggttaacgcgcaaattaacaattccggcggctatttgggaaaaatcagcgaccgaagcaaagaattgttttttaacaggcaaacggttgggcaatatcaaatggctgttttggataaaaacccaaacgcaagtttgaaaaatatggtattctaccgccaagattatttagacgagtttaatacgatttgggaaacgcaggcaaaatttcataaggaattgaatgacaagttaaagcgcgaaatccgcgacgtggtaattttttatcagcgcaaacttaaaagccaaaaggggactattgttttttgtgagtttgaaagccgtaaaacagaagttgaagtggaagggaaaaagaaaataagaaccgtcgggagccgcgttgttccccggtcgtctccgctatttcaggagtttaagatttggcaaaacttaaacaatattgaacttaccgataaagactctggtgaaatgcgggcgctaacgccggaggagaaagataccttatttcaaagattgcaggtaacggaaaagttgagagataaggaagttttgagcatcctgtttgataaatcagctaaaaaatatgcgttgaattatgaaaagttagatggcaacaaaacgcgtgccgcgatatttaatgttttaggggattccggtttgttatcgtttgattccaataaggaattggacgaacaaccgctatacaaactttggcatctgctgtattcttatgaggacgataactcagtaaccggtattaacaggttagtcaataatttaaagctaacgtttggattatcagaggaaacagctaaaaaacttgctaatatatcttttcaggatgattacggaagtttgtcggcaaaagcgattcgtaaaattttaccgtttcttaaagaagggcataaatatgatgcggcgtgcggatatgccggttacagacattccgccagttctttgaccaaagaagaaattgaaaataaagttttgaaggataaactggaaaatttgcctaaaaattatttgcgcaatccagttgtggaaaaaatactgaatcagatggttaatgtaacgaacggagttattgacgcctacggaaaaccggatgaagtccgtatcgagttagcgcgtgaactgaagaaaaacgccaaagagcgtgaacagatgacaacggctataagtgaaagcacgaagaaaaacgaagaaattgttaaaacgctacaacgtgagtttggcataacaaacccacgcagaaaggatataattcgctataaattatatatggagttagcggcaaacggttataaaacgctttattccgatacttacatagcgcgggaagaactattcagcaaaaattttgacgttgaacatattatcccgcaggcgcggctttttgacgattcttttgcgaataaaacattggagaagcgggatgtaaatattaaaaaagggaatagtacggcttatgacttcgttaagaacgaatacggtgaagataaagcaaaagaatacctgattaaaattgagaaattactgaaagatgagaaaatatcgagaactaaacataaacatctgacttggagtgaaaaagacattccagaggattttattgaccgcgatattcgtgatacgcaatacatcgcgaaatatgccaaaactatgttgtgtgatattgttaaagaggtagtatctacaacaggttctatcaccgaccgcttgcgcgacgattggcagttggttgatgtgatgaaggagttgaattgggacaagtacaaaagtctcggcctgacagaagaatttaccaacgaggatgccgcagaatccgtaagattaaagattggacaaagcgaaatgaccatcgccaccacgcaatggacgctttgacagttgcgtttactagacacgcgcacgttcagttcttcaacaatataaacgctcattatgatttgaaatcaaatatttacggaattaagcagaagtattttacaaaagacaataaggcattgccgccgataccgttgaatgaatttagaagcgaagccaaaaaacatttggagaataccctgatttccgtaaaagccagaaacaaggtaattacgcaaaatattaatacaacgaaaaagaatggcgggacaaataaaaaaatacagcaaactccgcgcgggtagctgcataacgatacgatttacggaagccaaaaacagtatgccataaaagaggaaaccgtgaacgctaaatttgatgaagccaaaattttgaccgtcactaaacctgcgtaccgtgaagcgctgctgaaacgattgcgtgaaaacggagacgcccctaaaaaggcgtttaccggaaaaaacagtttagcgaagaatccggtttatttagacgatacgcatacaaaacaaataccggaaaaggtaaaaacagtttcgattgaaaccgtctatacgattcgtaaggaagtttctcctgatttgaaaatagacaaaataattgatgacaaggtcaggcgcgtattggaaaaacgtttggaggaattcggcggcgacgccaaaaaggcgttttccaatttggatgaaaatccgatatggctgaataaagacagcggtattgccgttaagcgtgtaactatttcgggtgtcagtagcgctgaacccttgcatgacaaaaaagataaggacggcaatgccatattggacaaaaacggcaataaacagcctgttgattttatcagtacggccaataatcatcacgttgcgatttatagtgattcggacggtaacttgcaggaaaacgtggtgtcatttctggaagcagtcagacgggctaacgccggtttgccgattatcgacaaagagtatatgcaaagtgaaggttgggaatttctttttagtatgaaacgaaatgagtatttcgtgtttccgaatgaagagaccggatttgccccacaggaaattgatttaatgaatcctgaaaattatcatctaattagtccgaatttgtttagggtacagaaactatctacaaaaaattatgtttttaatcatcacttggaaactattgccgtaactggtgatactttgaaaaataaaaaacaattatctaaaattacttatcattttattcaaagtttatcatatattagagatatagtcaaggttcgtatcaatcatatcggacaaatagtatatataggcgagtattgacaaatgataaaacaaacgctatatttcggcaaccaaacttatttaagcacaaaaaatgagcaactcataataaaaaccgccgaaaaagaaatttcacgacctatagaagatataggagttgttgttttagacagtccgcaaataacgataacgcagtacacaattacaaaatttttggaaaataacgttgcggttataagttgtaatgaaaaacatatgccgataggaatgttactgaatttggacgggaatacgctgcaaagtcaaaaattcaaagaacaaatttcggcaagcgaagcgttaaaaaagaatttatggcaacaaacgattaaggcaaaaattcaaaatcaagcgagcgttttgagaattacaggaaaggactcgaaacggctgaattatttaacaaaaaaagtaaaacccggcgatgtagagaattgtgaagcgcaggcggctaattggtattgggatttagtgttctatgactatatgaaagatttctcccgaaatttcgcaggagcgccgaacaatatactaaactacggatatgcgattttgcgggcggcaacggcacgtgcgctgactgcttccgggctattgccgactttgggaatttttcatcgcaatcaatacaacgcttactgtcttgccgacgatattatggagccgtatcgtccgtttgtggacttggcagttattgaattgatgagaaaatatccgcttgaagattttcaagaatttaataaagatataaaacaggcaatgctttcggttattcaatgcgactgtttttttaagcaggaaaaaagtccgttgtttgtagcattaacacggacaaccgcctcattgtcttcgtgttttgaaggtaaaaaaaggaagattttatatccggagataaaatatgaacacaaacgcgttaaatcagtataggattatgtggatttttgttttttacgatttgccgacagaaacgaaagcgcaaaggagaaatcattccaantttcgccaaaatttgataaaagacggatttgaaatgtttcagttttccgtgtattttcggcantgttcaagtaaagagaatttggaagttcanagtaaaagagtaaaatcgtttatgccggaaatgggtaaagtcagtattgtaaatttcacagacaagcaatttgaaagaatggaggtcttttacggaaatatactgcccaaaaatcacaaaaataaggaatgacgacgatttacaaattaaacttccgttagaatttttttgactttttaataattttcttgactttttattcgtaaatttattatattgtatatgcgaaagcaattcacaataaggattattccgttgtgaaaacatcagggcgggagtaaaatctcgccctttatatttttcaaatattataccgttccgtaaataattgcttatatacacggaaactccctgtttaaccgcttaaaacaatcttaatataaaaaatntaccgattcttttttcattgcaaaaaaaaggggataatggagtccagatttgtctgaaattcattatccccgtttttttaattatattagtaagttcctgataaataaggagttatcactccaacgttgcgaatactcctaatataataaggttcaagataagttaagcgtttaaaaagtttcaattttttcatatttttcccctttactttctcataaaatacaatgcgccatttatataatgta

SEQ ID NO: 2467 - DNA, 7161 bp, synthetic construct
  source 1..7161: mol_type = other DNA
  misc_feature 1..7161: note = Synthetic
gaacctaatgttttcacaacggaataatccttattgtgatttgcttcattttagtacgacaaagataagaataaaaatgatatatcctgcaatcttttcaaatgctttttttacatttgtggaaattaactttaaattattgttatgaaaaaaatattggggttggatttggggaccagtagcattggctgggcattagttaatgaggcagaaacgagcgaagagaaatcgtcaataattaagcttggtgtgcgagtaaaccctttaacggtggacgaattgcagaattttgaaaaggggaagagtatcactacaaatgcagataggacagcaggtcgaagtatgcgacgtaatttgcagcgctataaactgcggcgtgaaaatctgattgaggtcttgaaagaatataatttcattaccgatgaaacgatattgtctgaaaatggtaatagaacgacttttgaaacatatcgcttaagagcgaaagctgctgtagaagagatttcattagagcaatttgcacgtgtgttattaatgattaacaagaaacgtggttataaaagcagtcggaaggccaaaggagcagaaaatgggactttaattgacgggatggaagtggccaaaaaaatgtatgatgagggtattacacccggcgaattatgtttgcaacttcttacagcaggaaaaagatatttccctgatttttatcgctcagatttgcaagctgaatttgatagaatttggaattttcagaaacaattttatccagattccttaattgataaagtcaaagacgaagtaagaggaaagaataagtcacagacttgggctatattagcgaagtattttgtatggaaagaagttgaaaatagttggaatgaagaagaagcccaaactagaagagtagaaaaagaatacagacttgtgggaattaaaaggggagtaaagagagaggaattgaaacttgaaaacttccaatggcgagtaaaagcactttccgagaggatgaatcctgaagaacttgcaatcgttttgcaagagataaatgagcagattagtaattcgagtgggtatttaggtgcaattagtgatcgaagcaaggaactatatttcaatagacaaactgttggacagtatcaaatggctgttttggataacaatcctaatataggcttgcggaatatggtgttttataggcaggattatttggatgagtttaatacgatatgggaaaaacaggctgaatttcataaagagttgacggaagatttgaaaaaggaaattcgggatatcgttatcttttatcaacgtcgtttgaaaagtcagaaaggtttgataaatatttgtgagtttgaaaggcggcagatagaggtggaaatagatggtaagaaaaagattaaaactattggtagtcgggttattcctcgttcttcacctctattccaggaatttaagatatggcagactttaaacgatatagaggtgtcggtgcttggtgtgaaaaataaacgtaaaaagcaagatgataattctactacactgctcgattctgccgaaaatattgattctttgaaattgaatgttagccgtcctctggatgctgatgaaaaaagcttacttgctaaagaactttttatccgtgataagctgactaaatcagatgtgctgaaattgctatttaataatcctcagaatctgaatctgaattttaaaaatattgatggaaatagaacaggaagtgccttatatcaggcatttagtaagattcttgaaatatctggtcatgagtctattaatttcaaaaaatcagctgacgaaattgtagaacaagtaaaaacgatattttctgctttgggttggaatacggaagttttgtgttttgattcggaaaaagaattggacaagcaaccttactttaaactttggcatttattgtactcttttgagggtgatagtacgccgaccggagatggaaatctgattcaaaagatagcagatttatgtggttttgaaaaagattatgcttcaattttggcgaatataacttttcaagaagattatggtagtttgagtacaaaaacaattcgtaagatattacctcatctaaaagatggaaatcagtatgatgttgcttgtgaatatgcagggtataaacattcaaaatcctcattaaagaaagaagaaattaagaacaaggtattgaaagataaattagagcttcttcctaagaatagtttgcgtaatccggttgttgagaagatactgaatcagatggtcaatgtgattaatgcgattattactacttatggcaaaccggatgaaatccgtattgaactggatcgctaattaaagaaaaattcaaaagagagagaagaactgacgaaatctattgtggatacaacaaaaacgcacgaagggataagagctattctgcaaaatgatttcggaatgtctcatgtaagccgtaatgcaataattcgttataaattgtatgaagagttgaaagataatggttataaaaccttgtattctaatacctatattcccaaagaaaaattgttcagtaaggattttgatattgagcatattattccacaggctcgtttgtttgatgattctttctctaacaaaacattggaagtgaaaagtataaatattgagaaaggaagtaaaactgcttatgattttgtggaggagaaatatggcgaacaaggtttgcaggaatatttaaatcgttgcgaggtactgttcagggataagaaaactaaacttagaaaattgaaaatgcaggagagtgaaatccctgaaggatttattgatagggatttacggaatacacagtacattgcaaagaaagctctttctatgttgaatgaaatttgtcgtcgagtggttgctactactggggcgattactgatgaattgcgtgaagattggcaacttgttgatgttatgaaagaattgaattgggaaaaatataaagtactgggattagtcgaatattttgaagataatgatggaaggttgataggtaggattaaagattggactaagcgtaacgatcaccgccatcatgcaatggatgctttgacagtagcatttactaaagatgtatttatccagtattttaataataagaatgctagtcttaagcctgatacgaatgaagctgcaataagaaataagtattttcaaaatggaaaggctattcctcccatgtctttagatgaatttcgtgctgaggcaaagaagcatttaaatgatacgctaatctctattaagaccaagaataaggtagttacaattaatctcaatagaacaaaaaagaaaaatggaataaacaaaaagcagcaacaaactccacgagggcaattgcatttggaaactgtttacggtagtcataaacagtatgtggttaaagaggagaaagtgaatgcctcgtttgatgcagctaagatagccactgtaaataaacctgcttatagagatgcattattgaggcgtttgcaagaaaatggcaatgattcgaagaaagcttttactggtaagaattcattggacaagcaacctgtttggttagatgctaagcagaacgagtgtgttccggaaaaggttaaaacagtaatgcttgaaacggtttatacggtacgaaaacctattgatgaaaaattgaatgtagataaagttgtagatgcgagaattcgtaaacttttgcaggatcgcataaaagaatacggtaatgcgaagagtgcatttgccaatctggatgaaaacccgatatggctcaataaagagaaaggtataactataaagcgagtgagtgtttttggtatcagtaaagcgcaatcacttcatgaaaagaaggataaggatggtaattttattttagataaagacagtcggaggattccggttgattttgttaatacaggtaataatcatcatgtcgcaatttatcgtaaaccagttttagacaaaaagggacaggctgtatttgatgaaaatggtgaattgaagtttgaacttgaagaggttgtagtttctttctttgatgcagtgacgcgggtaaatcttagtcaacctattattgataaagattataagagaagtgaaggttggaagtttctttttagtatgaagcaaaacgagtattttgtgttcccaaatgagaagactggctttgaccctaaagaaattgatttgctgaatcctgagaattatgctttaataagtccaaacttgtttagagtgcaaaaaatagcctctaaagattatgtgtttaggcatcatttagaaacagttgttgcagataggaaagaattgcaggagattacctggaaacgaatttcttctctaagtatattgaacagaattattaaagtccgagtcaatcatattggtcaaattgttatgataggggaatattgagatggagaataaattgaaattgtttcaaggcaagagtattcgttccgcctggaatgaagaagaacaacaatggtatttttctattttagatgttgttcaggttttgacagataatgcaatgctaagcaatatacaaagcgaatgtgttcaagagatgaaatgttgaatttgaactggggtacaaattgtaccccagttcaaatgactgctgaagatggtaaaagaaggaaaatccaagcggcaaatataaaaggactttttcgtatcattcagtctattccttctcccaaagcagagctttttaaactgtgatcagcccagattggctatgatcgtgtacaagaaattgagaccccagaattagctcaagagtgaatgaaagaactttatgaacagaaagggtgtctcctcagttaccgtttgaagaaggtgatgaataatattcactaaaattgaagtactatgattaagaaaacactctattttggaaatccaatttatttatctttaaagaatgcacagttagtaataaaactaccggaagtagtgaaaaatgaaactttaacgggaggatttaaacaaaaggcagaagtgacaaaaccaatagaagatattggtgtagttgtattggataataagcaaattacgattacctcaggagtactggaagctctacttgaaaataattgcgctatcataacctgcgatagtaaaagtatgcccgttggcctgatgcttcctttgtatggcaatacaactcagaatgaacgttttcgtcaacaattaggtgcttctcttccattgatgaaacaattgtggcaacaaaccattaagcaaaagatagagaatcaggcagctgtgttgaaaaaatgtgcaggggaagaaataagatgcatgaaagcatgggctgctgatgtgaagagtggggattctgataatctggaagctcgggctgcagcttactattggaaaaacctatttaaaatagatggtttcacgagagatagagagggcattccacctaataatttgttgaattatgggtatgcgatattgcgtgctgttgtggcacgtgggttggtattgagtggacttttgcctacgttaggcattcatcatcataatcgttataatgcgtattgcttggctgatgatataatggaaccttatcgtccgtatgtggatgaactggtttgtgatattatgaaaaaaggaggagattatgggatgttgacaaaggaactgaaaggacagcttttgacgattccgtcgttagatgttattatttcaggtaagcgtagtccgctaatgatagcagtgggacaaacaacagcttctctttataaatgttttaatggagagttgcgtaaaatagcatatccggaaatgtaatggaccgttttagtgaatatcgcattatgtgggtactggtgttatttgatttgcctactgataccaagaaggataagaaggcgtatgcagacttccggaagaacctgcagaaggatggatttactatgtttcagttttccatctacgtacgacattgtgccagcagtgaaaatgcagatgtgcacataaaaagagttaaatctttcttaccggagtttggacaggtgggaattatatgtattacggacaaacaatttggtaatattgagctcttttatgggaaaaaagttcaagatgtgaatacaccggggcaacagttggagttattctaaaagtaaaaatcccacttgttggtgggatttttagtggaaaactgtttgctttttgtgattcaaattgattgtttaaccatttgattattagattataatgaatagtcagctgtttccaatggttcaaagatactaaaatgaaagcaaatcacaaccgtacccgtcaagcctacaacgcgcggtagctgtttccaatggttcaaagatactaaaatgaaagcaaatcacaacagttgcaaagctcgacttcttgaatagagagctgtttccaatggttcaaagatactaaaatgaaagcaaatcacaaccagttgagaaaatgaccgaaaacattatttgctgtttccaatggttcaaagatactaaaatgaaagcaaatcacaactctatcgaagcgacccgaagcgttaagcctgctgtttccaatggttcaaagatactaaaatgaaagcaaatcacaacagaaataaagtttttcacgccttcaacctgctgtttccaatggttcaaagatactaaaatgaaagcaaatcacaactgtcgagaaccaaaactttctcggtcattgtgctgtttccaatggttcaaagatactaaaatgaaagcaaatcacaacggtagtcgttcccgatacaagcaaggttaagctgtttccaatggttcaaagatactaaaatgaaagcaaatcacaacaatctgcgaatccggaagaatatgccaagcgctgtttccaatggttcaaagatactaaaatgaaagcaaatcacaactcgttgataacaagatgctttcccttggcggctgtttccaatggttcaaagatactaaaatgaaagcaaatcacaactaaccaacagtgtggattatctgcgaggctgctgtttccaatggttcaaagatactaaaatgaaagcaaatcacaacccacacctgcaaactcaccgttcctgttgagctgtttccaatggttcaaagatactaaaatgaaagcaaatcacaacccacacct

SEQ ID NO: 2468 - DNA, 7063 bp, synthetic construct
  source 1..7063: mol_type = other DNA
  misc_feature 1..7063: note = Synthetic
gacgtatttaaaacaaaaaacgaggcaaacttgcgtatgccccgtagtaaatgttttcacaacggaataatccttattgtgatttgcttctaaagttctgacacaaacatatcaataaatttgatacaaccagcgaaaattgtttgaaaaaatatttttcatcaaaaattacatgatcgtacatagattacgacctgtcaaactacgtttgttttaaattttaagtacgatgaagcgaattgagtttctaaaaaatgccgttggattgtttggcgttgcccacatttcccaattggaaattaaacagtatgaaaaagtctatttgaagcatttcttcgtgcgcggatttcagtattacgaaggaccaaattgcatcgacgagatcaatgatagcgggttgattgaactcgttcgggaacccgaaaatcagtttgacaaacgggcaatcgccttgtattttaacaaaaagaaaatcggattcgtaccgagagaaagtaacaaaaccttgagtattttgatggataccgaattactcgagtttcacgcagaaattacgcatattgagccaaaagccgaacattgggaacaaattcgtgtggcaatttacgccctcaaagaaattcgatcaaatcaagattggaaaaaaattgagccctatgtgctcctcaaaacgccaacatattattcgctgaaatcggaagacgacaccttgacgcgcgtaaaaaccaatccgatcgttgaacaggaagccctaccccgttttcagtcagaaacgtatctccaaaaacactggaacaatgcctccggaaatgacgaagcttcggttgtatattactccgtagactcactagaagcattcgaacacgattggttgcttggaaatgaaacgcaaactgctgaatcattaatctcccaacaagaagaagatgcattgatggagaatatcaatttctattaccatagcaaccccgaatttgcatctaaagaacgctattttgtactcgacatcaaccacgtactcgacgatcagttggagattaccggaatcagacccgttgttggcgaccatggactcccctattttgaagttgtttttgagcaaaaaccacacaaaaaaacgaacaacatccgacaaggtcgtgccaccaagaccacaaaaagaaagcaaccaacaaacggattcacaaatacaacaaaagacgactattttttaaacggaaaacactccgtttgaatattttaattagttttaatcaacttaatttagattacgatgaacaacacgaatggcaaaatgattttgggattggatttggggagcacaagcataggttgggctttggtcttagagcgcgaaaatcagcaatcagaaattattagaactggagtacgagttattcctttaagtactgacgaaattggaaactttgagaaaggtaaagcgatcacgacaaatcaagatcgcacaaacagtcgaagtgcaagacgaaatttgcaacgatataaacttagaaggacagaattactcagtatattaaaggaaaacggcttcataactgatgaaacaatattgtcggaagatgggaaaaattcgacatatgaaactttagaactcagagcaaaagcagtatcacaaaaaatttcaaaagaggaatttgctagagtattgatttctatcaataaaaagcgaggctataaaagtagtcgtaaagccaaaaatgatgatgaagggcaattaatcgatggtatggaagttgctatgaaacttcacgaagaaaacattactccaggacagtattgttttgatttattacagaatgagaaaaagcatttaccagacttctatcgttctgatttacaaaatgaatttgacttaatctggaatttccaacagcaattttattcagatgttttaaatgatattttgaaagaaaaactccacgggagaaataaaacacagacctgggccatctgtaaagatcctttcaagatcgttggaataaagagagaaacaaaaggtttacaattaaaaattgaaaactataagtggagagcaattgcaacaaaacaaaagttagattttgaacaattagcaattgttttatcagatatcaacaatgacatcaataaatcaagtggatatctaggagacattagtgacagaagtaaagaattgtatttcaacaaacaaacagttggtcaatatttatttaatcaaattcaagaaaattgtcatacaagattaaaagggcaagttttttacagaaaagattatgaagatgaatttgatactatttggatagagcaatctaaacatcatgcggaattgtcaaatgaattaaagactgaacttaaagacatttgcatattttaccaacgaagattaaaatctcaaaaaggtctaaaaaacacatgtgaactagagagtaaaccacgagaaatcatagtagatggaaaacttaagactaggttaatcggcccaaaagtaacacctaaatcttctcctctatttcaagaatttagaatttggcaacgtctgaatgatctagaagtttggaataaaaaagagagaactaaatggcgcttggacgacgactccaaaaaattattattcgaagaactgaatgtgaaaaataaactttcgaaagctgaaattttaaaaattctattcaaagatttcaaagatttagatctaaacttcaaagatgttgatggaaatagaactaacgcaacactttacgaagccttcaaacaaataattgaaatatcaggtcatggagaacatgatttgggaaaaatgactgcaactaaaattgttgaattgattgaaaacgtttttacgacaatcggaattaatacagagatattaaaatttaatactttgttggaaggcaaagaattagaaaatcaagcagcttatcagttttggcatttactttattcttatgaaggagataattccaaaacaggaaatgatagtttaattcggaaattacaagtgaaatttggctttgaaaaagaatatgctcagcttatctccaaagttacttttgaaccagattatgcaagtttaagtgctaaagcaatttcgaaaattttacctcatctaaaagatggattggattacagtcaagcggcaagtttagcgggatataatcattcaaaatctctcaacaaagaagaactagaaagtagagaacttaaagataaactagaaattttagagaaaaatagtttacgtaatcctgttgttgagaaaattttaaatcaaacaattcacgtagttaatgcaattattgaagaatacggaaaaccagtggaggtgcgtttggaacttgcacgtgaactaaagaaaagcgctaaagaaagagaagatgctacaaaaaacatcaataaggcaacaattgaacacgagaagataaaagagattctgaaaaacgagtttggacttacttatgtaagcaagaatgatattgtccgttataaactctacaaagagctagaaccaaacggatataaaactttatactcaaatgaatacatatctgcccaaaagttattcagtaaagactttgacattgaacacattattccacaatcacgcttatttgatgattcattttcgaataaaacacttgaactaagaagcatcaacattgaaaaaggtgacaggaccgcttacgattttgtatcagaaaagtatggcgaaagtggattaaaggaatttgaaaaaagagttgaggatcttttcaaaaatgtggatggcaaaaaagggaaactcactaaacttctaaaaaaatcgtcagaaattgaagatggatttattgacagagatttgcggaactcccaatatatagcaaaaaaagcaaaagatattttacaagacgtatttcgtaaagttacgacaacgacaggtactattacaaaccgcttaagggaagattggcaattagtcaatgttttacaagagttaaattgggagaagtacgaaaagttaggattgacttattacgaaacgaatcgtgaaggtaaaaaactcccaagaataatagattggacaaaacgcaatgatcatcgacatcatgcaatggatgcactcacggttgcatttacaagaccgagtcatgtacaatatttgaatcatttgaatgcgcgtaaggatgaaaatagcaaagaattttctaaggtcatcggaatcgaaaaaaaggagttgtataaagacgaacgtaacaagttgagatttattcctccgatggagctgcataaatttagacatgaagcaaaaaatcaccttgaaaacaccttgatttcattcaaagcaaaaaacaaaatagttactccgaataaaaataagataaaagggagtgatcatgcacaaaaagttttcactccaagaggacaactacatttggaaactgtttatggcagtatcaaacagtatgaaacgaaagatgtaaaagttggaggaaattttgatcaagatacgatatgcaaagttgcaaaacaaaattaccgagttgctttacttaaaagattagaagaatttgataatgatcccaaaaaagcattcactggaaaaaacagtttggataaaaatccaatttacgtgaatgattctaaaacgaaaaccattcctgataaagtaaaattagtttcagagattactatttatactattcgcaagccaattagtcctgaattaaaaattgacaaagtagttgatgtaaaaattcgcaggctacttgaaaagcgactgcaggaatttaataacgatgcaaaaaaggctttcacaaacttagacgaacatccaatctggctaaacaaagaaaaaggcattcagatcaaatcagttactataacgggaatcagtaatgcagtcgccttgcacgataaaaaagacaaaaacggaaaagtagtaatcgatcaaaacggtaacaaacaagctgttgattttgtaaatactggcaacaaccaccacgttgcaatctatcgagatgagaaagggaatttgcaagaaaaagtggtttccttttacgaagctgtgatgcgtatcaatcaagggttacctgcaatcgataaggcgtacaatagagataacggatggcagtttttattcacattaaaacaaaacgaatactttgtttttccaaacgagaaaacagggtttaatccaaacgaaattgacttattagacccatctaattattcaaaaattagcccgaatttgtttagggtacagaaaatttcaacgaaaaattatatgttcgcacatcatttggaaacacaggctatttctggtgaaaccttgaaaagcaaaaaaatgctttcgactatttcatattattttattcaaacaccttcaaatcttaaagacattattaaagttagaaccaaccatctaggcaaaatagtttgtgtgggtgaactataaaatgtattatcactaaggacggcgtgggtaacatgtatttcacatgttgcgccacatcgtgatgaaatcaatattttcaaatctaaacaacgaaatataaccttttcaaaattaatccgttgaagtagtttgttaacccgataaactacgtgtatggtcaagcgaaccctgcattttagcaatcctgcgtatttatcctgcaggaaccagcaactggtcgttgaattgaaaaacgacgaaaaaacaattaagtctgtccccatcgaagatgtaggaatggttattttggagcatccacaaatcaccattaccacccgcttgttggagtatttgttggagaacaacgtcgccatcattacctgtaattgcaagtacatgccgagcggaatgtttttaccttttgaaagcaacagcgaacaaacacagcgcatgcgcacccaattggaagcgagcgcaccgttgaaaaaacaattgtggcaacaaaccgtaaaatccaaaatctacaaccaagcgcaagtattgctgtatttgggcgagaaaaacgaccgattgattcacctggttggagaagtagtaagtggtgacacaagcaattgcgaagggcaagccgcttctcactattgggggaaaatttacggtggcaattttgtgcgatcgcgcgaccctgaaacgcccaatgcgcaattaaattacggttatgcaattttgcgttcggtagtcgctcgctcgcttacggcatccgggatgtttccttcgatgggtatttttcaccgcaataaatacaatgcattttgcttggccgacgacatcatggagccgtatcgaccgtatgtagattggttggtgttgcatctgcccgatttgaatcaatcagaagatggactcacgcaggctcaaaaaatagccttgttgaaacttccgcaaatcgatgtccaaatcaacggattgaaacgcccacttttccacgcagtgagtatcacaacggcgagtttgtacaagtgttttgcgggagaacaacgcaagattcattatcctgaatttcatcattgatccatgttatccgaacgttttaatgcatatcgaactatgtgggtaatggtattatttgatttgccgaccgaaaccaaaaaggaacggaaagcagcaactgattttagaaagaaattaattgacaacgggttcatgatgtttcaattttcgatttatattcgcttttgtcaaagttcagaaagcgcagaagtacataccaagcgggtgaaaggaaatttgcccgaaaaagggaaagtaggagtttttgccattaccgacaagcaatttgggaaaatggaaattttttatggtacaaaaaaagaaagttcaaatccaccagcacaacaactggaactattttaatcaactcgcaggatcgaaatttgacagcacgattttaggatcggcacaacaaatacacttttttttattttgtaataaaaggctgaaacccttgctatttctacgaaataagccacgaccttgtgacttatccgtaaaaatagaacttttgaaagcaaatcacaacacttcggattttgcaacatttcaagccaatcttgtgacttatccgtaaaaatagaacttttgaaagcaaatcac

SEQ ID NO: 2469 - DNA, 6893 bp, synthetic construct
  source 1..6893: mol_type = other DNA
  misc_feature 1..6893: note = Synthetic
tttttgttctggcttatgggaatctcattgctattattcctcttgctctatagaagattgaaaaaaagagttgctcacaaagagatttaggcaggctctaaattttcaatttatccaaacgccctatttataggtaattgaaaaaggaaaggtgcgtttccttgcgtataatgttttcacaacggaataatccttattgtgatttgattacaattttgaatggtgtagatttgaaggaaaaagaaaaagcgagccttgcgacccgctttagatgttttcacaacgggataaacccttattgtgatttgcttcaaaatgtaatacaaatatataaaacaaaatcaatatgtcaagaaaaatattaggactggatttaggaagtgcgtcaataggctgggcattagtcaatgaagctgaaaatgaaaacgaaaagtcgtcaattataaagattggatcaagaattatccagtatggtgataatttagttaaggtagataaatcaggtaaaatatctgcatctatgacacccgaacaagattttcaaagtggaaaaggcttgtcgccgaatgcaggcagaacaaaacaaagaagcgcaagaaggaatttacaacgctataaattgagaagagataatttaattgaggaattaaaagaaaattcaattgtttcggaaaattttattttttcagaagaaggtaatgataccacttttaaaacatatagaaatagagccctcgctacaaaatctgaaatccctttagatgaatttgtgcgtgtacttttaatgattaataaaaaacgaggatataaaagtagtagaaaagcaaaaggcgaagatgatggtcaactaatagatggaatggctgttgcaatgcagttatatgaagacgataaaaccccaggtcaatttgtttacgagttattaaaaaagaataaaaaatttattcctgatttttaccgttctgatttacaagctgaatttgataaaatatggaacttccaaaaacaattttattctgatatccttactaacgaagtatatgaaaaactaaaagggcaaactaaaaaaataactgccgactatttttctaaaactttaaaaattgaaactcccgaattaaaaggtaagtgggatgaaaaaaaattacaacggtttgaattgagaagtaaagcaataagtctgcaattaccccttggagaaatagctgaatctcttattgaaataaataatgacataaatttttcaagcggatatcttggagcaataggcgatagaagcaaagaattagtttttcaaaaacttactgttggtcaatatttgtataaacaattagaggctaatccgaacaccagtttaaagaaacaaatattttaccgtcaggattttttagatgagtttaataccatttgggatatacaagccaagtatcataatgcactaacacctgaattaaagtctaaaataagagatgttattattttctatcaacgtaaactaaaatctcaaaaaggattaataagtttttgtgaatttgaaagccaacaaattgaagtgattgttgatggtaaaacaaaaattaaaacgagaggaatgagggttattccaaaatcatctcccctttttcaagagtttaaaatttggcaaattttaaataacattgaagttgtaaatactaaaactaaaataaaagaaccaagagaactttcggaagatgaaaaaaatattcttttcgaagagttaaatattaaaccgaaaatttcaaagaaagatgctctgaaactcctttttgacaagccaactgattatgatttgaactacaaagatattgaaggcaataaaaccaatgcagctttgtatgaagcgtatcaaaaaattgtttttcaagaaggacacgaagaaaaagattgcacaaaaataaaatcaagtgaagcaaaagattacataaaacaaatatttactgccctcgaaataaatacagaaattcttgaatttgattcatccattgaaggtaataacattgaaaaacaattacattttcaattatggcatttgctttattcgtatgaaggagacaataccaacaccggaaatgaaaaattaatacttgcccttcaaacaaaatttggctttaaaaaagaatacgctcaaataatagccaatgttgcattgcctgatgattacggaagtttaagcgcaaaagcaattcgtaaaatattgccacacttaaaagatggattttcgtatggtggaagaaaaaataaacccacagaaccaagtgctgttgaatatgcaggatatgggaaacattctaaatcatcactaaccacagtcgaaatagaaaacaaagcgtacaaaaataaattagatgtactacccaaaaacagtttacggaatcctattgtagaaaaaattctaaatcaaatggtaaatgtggttaattctgcaattgaggaatatggaaagcccgatgaaataagaatagagcttgctcgtgaattaaaaaagagtgcggaagaaagaaaggaaatgacggaagcaattactaaatctactgccgaccatgaaaaatatcgtaagatattgcaatctgaatttggattaaaacacgtaagcaggaatgatttgattcgctataaattatatttagaattaaaaagaactggatataaaacgctttactccaatacctacatagcgcctaacaagctattttctaaagaatttgacattgaacatattttaccaaaagcaaaattatttgatgattcattttctaataaaacgttggaattacaatcggttaatgttgaaaaagcggatatgactgcttacgattttgtaaaagtaaaatatggtgaagctgaactcataaaatatgagcaacgagttgaagatttatatgtattcagaaaaaacaatgatgaaaataatgcatccgaaggcaaaagcgctgatattaaaataagcaaaaccaaacggaataaattgctaatgcctgaaagtgaaataccaagtggctttattgacagagaactgcgcgacacgcaatatattgctaaaaaagcaaaagctatgatggaagaggtttgtaaagtagttacaaccacaacaggaagtgttacggataggttgagagaagattggcagttaatagatataatgcaagaattaaactgggaaaagtatcacgcattaggattgactcatgaatttacaaaccgagatggtaatgtaataaaacgaattacagattggacaaaacgaaatgaccacagacaccacgcaatggatgctattacagtagcttttacaaaacgaagccatgttcagtatttgaataacttaaatgcacgtagtgacaaaagtggaagcatatacggtattgaacaaaaagaattatacagagataaaactaacagattaagatttaaacctccaatccccattgataattttagagcagaggcaaaaaagcaattagagaatactttaatttcttttaaagcaaacaataaagttgttactaaaaacaaaaacacatttaaagtaaaaggtggagtaaaaactaaaatagaactaacgcccagaggacaattgcatttagaaactgtttatggtagcattaaacgatatgaaacagcggatgtaaaaataaatgcattacttgatattgaaaccataaataaagttgctaaaaaaaatatcaaagaagccttattaaaaaggttagcggaatttgataacgattctaaaaaagcatttacaggaaaaaacactttagaaaaaaatccaatttatattgacaaggaacagtcatacaaaataccggaaaaagtaaaaatagtttgggaggaaactctgtatactattcgcaaagatattacgcctgatttgaaaacggataaaataattgactctaaaacaaaagtaattttagaagctcgtttaatagaatataaaaatgatgcgaaattagctttctcaaatcttgctgaaaatccaatttggttaaataaagaaaaaggtattttaattaaacgagtaactatatcagggattagtaatgccgtttctttaagagataaaaaagaccataacggtaatatagttttggataatgaaggcaagaatatagccgttgattttgttaatacaggaaataatcatcacgttgctatctataaagatgaggcaggaaatttacaagaaaaggttatatcgttttacgaagcagtagaaagagtaaatcaaggattatcagttattgacaaaacatataatcaagaaataacttggcaattcttgtttacgatgaaacaaaacgaatgctttgttttccctaatgataagacagaatttaatccgaatgaagttgatctattagatgctactaattattatttgattagtcctaatttgtttagggtgcaaaaaattgcaacgaaagattatactttccgtcatcatttagaaacaacgattgaaattaaaaatgaaactaaaaatataacttggaaacgattaggaataaacggaatagaaaatattgtaaaagttagaataaatcatttaggtaaaatcgtaaaaattggggaatgataaaacgcacactctactttgggaacccatcctatttgagcctaaaaaaaatacaactaaaacttaatattataatatatattatatttgtattttataaatataaaacacatgacaacttttacaagtaccctcccaaacgccttgcttgaattgctgagcaaaaaagcaaaagagctgaatatgcctaaaaacaagttaattgaaaaggcattacagatttatttaacgcaactaaacaaagccgaatacatccgctcctataaaaaaatggctgccgatgctgatatcctacaaattgctgaggaaggaatgagcgattaccttactcaactaaatacagacaaggtatgaaacaaggagagatatggtatgccaaccttaatcccataaaaggacaagaacagcagggcatccgacccgtagttattattagcgggaatttactaaactcacacctgaacattgttatttgttgtccgcttactaccaaaattaaaaattacaagggcaatgtgttacttcagccaagcactaaaaacaaactaaaacaaacttccgaaatccttacatttcatatacgctccatcagcaaagaacgcttaacaaaaaaaatcggagaaattactactgaagagatcaataaaataaaacaaactatgaatgaaattatggattattaaatactaaatggtgttggttaaatctaaaacgtaagtcacatgattaaacgtacgctatactttggcaatccttcttatttgagccttacaaatgctcaattagttttacgtttgccggaagtagaaaaaaacgatacagtacctgaacacttcaaaaaagaagcatcggcaagtattccagtagaagatattggcattgtgatactcgaccataaacaaataaccattacacaagcattaatagaagccttgcttgataataatgttgcccttattacttgcgatagcacccatcaccctacggggttgatgcttcctttatgtggcaacaccatacaaaatgaacgttttcgcgcacaattggatgcaaccgaaccattgaaaaaacaattgtgggcgcaaactatttcgcaaaaaataaaaaatcaagctgcgatgttcggcagcagaaacattgataatagttacctgattccactttaccgcaatgtaaaaagcggtgatatcgacaattgtgaagccacagcagcagcgcattattggggaaatatatttaacaatcttcccgaagtaagttcttttaaacgtttcagggagggactgcctcccaacaactatttaaactacggctatgctttattgcgtgctactatggcacgtagtattgtaggcgcaggtttgcttcctacacttggtattttccatcacaaccgctacaatgcgtattgccttgctgatgatttaatggaaccttaccgcccctgcatagataaagtagtctatactattattgaagagaagggaatcaacgaagatattccgaaggaaataaaaacaatgttattgcagattccggcaatggatgtgctgatgaatggtgaaaaaagtccattgatgaacgcaacgcagcgcacggctgtaagtttggtaaagtgttttgccggagaacaacgtaaactggtgtatcccgaatttatataaattcattttaaaaatgtcaataagtgccgaccgtttaaacgcatacagaattatgtggacacttgtaatgtatgacctgccgaccgaaacgaaaaaggaacgcaaagtggcttcccgtttccgcaaggaattacagaaagacggattcagtatgtttcagtttagtatgtatgtgcgccatagctccagttccgaaaatgctaccgtacacagcaaaagagttaaaaaaaatttacctgaacacggaaaaataggaatcttacaaattacagataaacagttcggtgaaatggaattattttacggttcaaaaccagtagaattaccaaatgttccgcaacaattagagttattttaatccaatttagaaacaaaaatccgggtcatacccggatttttgtttaataaacacctccgttttttattgataaaaatcacttgcaaccattgattttgttggactttttgacctatatggtgtttatcaataagtcaaagatacattttgaaagcaaatcacaacagcttcagtgtcacaacacaatttacctctggtgtttatcaataagtcaaagatacattttgaaagcaaatcacaacattacgatttgtttgtcgcctgcggctat

SEQ ID NO: 2470 - DNA, 6889 bp, synthetic construct
  variation 6346..6507: note = n is a, c, g, or t
  source 1..6889: mol_type = other DNA
  variation 1557..1707: note = n is a, c, g, or t
  misc_feature 1..6889: note = Synthetic
ggataatcataatcccctaatttactgatttatttaatatgtcttatgtgcataccccacttaaaattttatagtaataatttttgtaatggatcaactggtttctatactgcattagatataactaatattacgggttcaatatatacttggtcaggtacaaaccttaccgttaatgggacaaataatactgcttatgctacatcaacaaatcaaggtaatggcgcagttactgttagtatttatagccctaaatctaagacaactataatttccaaaaaaaatgtttgtataggagccccaagccagccttatgatataagtggcttccccaatgatggcttgcaatttccctcaaactcatacttcaactttattgcctggacgcagccatatgaacagggtgcaaattcttgtgaatggtatgtaatcggtggaacaatattaagtggacaatcaaccccacaaatagatgtgttaacggataacgctaccaacggtaataatattgcttttgttgttggtgctaggtttggcaattcatgtggttggagcccctggctttctcgttcgggtgttgtatatgacaacggaggtggtggaggttcgacctactcagtttatcccaatcccgtatcaacagaagttactgtgagtgtccttgaatcaggagcaaaaaacaatgacaaagatatcgatgattgtgtaataaggactattaggatatttgacaaaacaggattgtgctccactagaaaaataacttgatccaaattaacttgattcggttttttttctatctttattcaaaagtttggggcatataaaaaaaaatgccccccacttaatggcggaggggctaaccagatgttttcacaacggaataatccttattgtgaattgcttcagtatgtaatacaaatatagtgatttaattataaaaagtcaacatattatgaaaaaaattttaggactcgatctaggagtcaacagtattggctgggcgttggttgaagaagctgacaatgagaacgaaaaatcttcaataataaaactgggtgtaagggtaaaccctttgacaaccgacgaattgacaaatttcgagaagggaaaaagcattactacaactgccgatagaacacttaagcgcagtgcgaggagaaacctgcaacgatataaatcgcggagggaaaatcttattaaagtgttaaaggataataagtttattaccgaagaaacgctcctttctgaaaatggaaataaaagcactttcgaaacctataacgcgcgcgctagcgcggcgggcgagattatcgagttggatcagtttgcccgcgttttgttgatgattaacaaaaagcgcggttacaagagcagccgtaaagctaataataatgacgaaggccagttgattgacgggatggagattgccaaaaaattatacaacgataatattaccccgggagaacttgttttgcaaatatttaaagcaggtaaaaaatatataccagatttttacagatcagatttacaggcagaatttgataagatatgggnnnnnnnnnnnnnnnnnnnnnnnnnnnnnnnnnnnnnnnnnnnnnnnnnnnnnnnnnnnnnnnnnnnnnnnnnnnnnnnnnnnnnnnnnnnnnnnnnnnnnnnnnnnnnnnnnnnnnnnnnnnnnnnnnnnnnnnnnnnnnnnnnnnnnnnatgtcaaaaacaattttaccccgagattttaactgacgattttaaatcccagatttcgggaaaggggaaacaaattacttctaaaattttccttgccaaacacggtatatatacagccgacaacaaaggaactgataaaaaaatacaggcctaccagtggcgtgttgatgcacttaataaacaaattgaaaaagaagtacttgcatttgttgtaagcgatataaatggaaatattaacgccacgagcgggtatttaggcgctataagcgacaggagcaaggagttgtatcttaataagctaacagtagggcagtaccagatagcccagttaaaagcaaacccgcatgtgcctttaaaaaaccaggttttttaccggcaggattatctagatgagtttgatacaatttgggaaaggcaagctctgtatcataaagaacttaatccagaactcaaggctgaaataagagatatagttattttttatcaaagacgattgaaaagccagaaagggcttgttagtttttgtgaattcgagagcaggcaaattgaagttgaaattgatgggaagaaaaaatctaagcgtgtagggtcaaaagtatgtcccaggtcatcaccaatttaccatgaatttacaatttggcaaacgctcaataatttagaactgagcaataaaaatattagaggcaagagatcgttaactcaggacgaaaaagagttgctttttaacgagttgagtttgaagagcaagctttccaaggagggagctttaaaactattattcgagaattacaaagagcttgatttaaacttcaaggagatcaagggaaacgctacccaggctgcactatttgaagcttaccgcaaaattattgaattaagcgggcatggcgaccatgatttttcaaaaataccctcctcagaaattttgacaatggtaaaaaatatttttgaaggattaaactattccaccgaaattttaacatttgattcaggcctcgagggaaaagaatttgaaaagcaagccatgtaccggttatggcatttattgtattcgttcgagggagatgattcaaaaatcgggaacgagaaattaattaataaaatttcttccctgttcggattcgggaaagagtatgctgcaataattgccaatgttgcaatgccgcgcgattacggtagtttaagcctgaaagcggttcgtaaaatacttccttttcttaaagagggcaatgtatatagtgaagcatgcggttatgcaggttacaggcattcaaaaaactcattaaccaaaccggagattgaaaataaagtgttgaaggagaggctggatattttacctaagaatagtttacgcaatccggtggtggagaaaatattgaatcaaatgattaatttaataaacactcttgttgatacttacggtaaacccgatgaaatacgtgttgaattggcccgcgagctaaaaaagagtgccaaagaaagggaggaattaactgctgctattgcaaaaacaactaaagaacatgaggattaccgtgctattttagaaaccgattttggaataaagcatgtaagtcgcaacgatattattcgctataaactttacctggagttagccaacagggggtataaaacactttattcaaacacgtatgtgccccagcataaattatttagcaaagagtttgatattgaacatattatcccgcagtcgaggatgtttgatgactcgttttcgaataaaactcttgaatcccgaagtgtaaatattgaaaaaggcaatgacacagctctcgattatgtttctgcaaagttcgggcaggccggccttaccgattacttgatgagcatagaggagctatataaaaataaaacaatcacaaaagcaaaattccttaaactaaaaatgaaggccgatgaaatacccgacgactttattaaccgcgatttagccgacagccggtatatagcaaaaaaggcaaaagccattttggaagatatggtaagggaggtggtttcaactaccggctcaataaccaaccgccttagagaagactggcagcttattgacgtgatgcaggagttaaactgggataaataccataaactgggattaaccgagattattgaaaaccgcgaaggacataaaataagacgaatcaaggactggacaaaacgaaacgaccaccgccaccatgccatggacgctttaaccgtggcctttacaaagcgaagctacatacagtacctcaataacctgaatgcccgtggcgaaaagagagacagtatttttggcaaagaatctaaagaactttaccgcaacgacagggaaaaaatgaaattcaaaccaccaatccccattgaacagttcagggccgaggcaaaaaaacacctcgagaacacccttgtttcaataaaggcaaaaaacaaagtaaccaccaccaatattaatactatagataaatccggtaacgagagattcaaaaaacgccagctcaccccgcgtgggcaattgcatttagaaactgtgtatgggagtattaaccagtacgttacgaaggaagaaaaagtgggagccaattttgatgaaaaattaattgcgagagtggctaaagttagctacaggcatgctttgttaaaccgtttaatggaaaatgggaatgaccctaaaaaggcctttaccgggaaaaacagccttgataaaaatcctctatatatcgacgatttaaaaacgcaaaaagtgcccgctaaagtaaaacttgttgatgttgaaacaatttataccatacgcaaagacattacccccgatttaaaactcgacaagattgttgatgcaaaaataaaaaccttgttacaagctcgcctcgaccagaataatggcgacagcaagaaagcattttcaaatctcgacgaaaacccgatttggctgaacgagaaaaaaggcatctccgtgaaaagggttactattatcggaattagcaatgcaattgcgctgcacgataaaaaagacaaggaaggaaagctaattcttgacaaggaaggcaaaacacaacccgttgattttgtaaacacgggcaacaatcaccacgtggctatttatcgcgaccagaacggaaatttacaggaaaatgtcgtctcgttttttgaggccacagttcgcaaaaataaccaactaccggttatcgacaaggattatcgaaaacaggatggctgggagttcctctttaccatgaaacaaaacgagtattttgttttccctgacgataaaacagggtttaatccccttgaaacagatttgcttaaccccgaaaactattccctaatcagctctaacctgttcagggtgcagaaaatttcgaccaataattatctttttaatcatcatttggaaacaaaggcggccagtggtgaattgctcaagtcaaaaaaggaacttaaaggtgtaacatacaatttaatacaaacgccttccaagcttgataaaataattaaagttcggattaatcacatgggtcaaattgtttcggtgggtgagtattaagaaggtgtttcacgataaatctttgattttaaatataaagcatgataaagcgcacgctgtactttggcaatccggcctaccttagccttaaagacaagcagatggttatagagctgccgattgaaaaaacagctcacgaattacagaaaactgctgttccaattgaagatattggaattgttatgcttgatacagccaggttaacaattacccagcctttattgaacgcgctgctcgataataatgtagcacttgtaacctgcaatgaaaaacacatgcccgcaggtttgtttttgccactcgagggcaataccctgcaaaccgagcggttcaaaaatcagatagaggcaagtcttccgttaaaaaagcagctatggcaacaaaccgtgcaaaaaaaaattgagaaccaggcttggctgcttaaaaaacagggggtaaacaccgaaccaatggagtactggcaaaaaagcacgcgtagcggcgacccggataattttgaggcccgggctgccgcctattactggaaacactttttcaccaatcacgggtgtgaggattttacccgcggacgctttgaagggggcttaaatgtttttcttaattacggctatgctgttttgagggcggttgttgcccgcagcctggttggaagcgggttgctgtccaccctgggtattcaccatcacaacaagtacaatgcctattgccttgccgacgatattatggaaccattccggccctttgtcgacaggctggtttacgatatagccggagaaaaacccttgcaacgggaactaactaaagatgttaaagcccggttactttcaataccggcactcgacgtgataattgatggcaagagaagtccgctgatggtagcctctaacagaaccaccgcctcgttaaacgattgctttgaagggagtggacgtaaaatattgtatccaagtttcgagagttattaataatgataattttttaccattgtaaggttaaattttataaaaccttaaagctttcaagtaaatatatgttagtagaagctcttttatccgcggcggttattgtttacttttttttgctgcagaaaaaaagtannnnnnnnnnnnnnnnnnnnnnnnnnnnnnnnnnnnnnnnnnnnnnnnnnnnnnnnnnnnnnnnnnnnnnnnnnnnnnnnnnnnnnnnnnnnnnnnnnnnnnnnnnnnnnnnnnnnnnnnnnnnnnnnnnnnnnnnnnnnnnnnnnnnnnnnnnnnnnnnnnacaaatagagaattttttgtcgggcactattgataattattcaataaaaagcaaatatagttgagcagaaccagtcggctaaaccaatacagggttatgtgggtactagtttttttcgaccttccaaccgaaaccaaaaaggacaggaagaaccatgccaaatttcggaaagatctgattaaagatggttttaccatgtttcagttttcaatttacacgcgctgttgccccagcagagaaaatgcaaatgtgcatatattaagggtaaaacgagcgcttcctaaaagaggctatatcggaatactgtgcataaccgacaagcagtttggcagcatggagttgttttattccaaaaaccctgttaaagtgtcgccagatgcac

SEQ ID NO: 2471 - DNA, 6880 bp, synthetic construct
  variation 1108..1109: note = n is a, c, g, or t
  source 1..6880: mol_type = other DNA
  misc_feature 1..6880: note = Synthetic
atacactgcacgctgcaaaacatccatagaaaaaaaaatgctacggttcttaaaaatgttttattcatataaacccggtttgcggcgattgatttttttatcggccattttctttttgctttcgagtcgcttaattttactggtaaagctgggtttgcttgcttttctttttttaggcactatcattgctttttgcagcagtgcgttcattttttttattactatttctttattggccaattgcgttcgggcttcgctgctttttaccagcagcataccatctgcattaatcctgttggccaattgaagaatgatgcgttctttttcttcggtagtaaacaatgaagaacttgcaatgttccaatacccttccaccatggtttctaccttgtttacattttgtccgcccttgcctccgcttcttgctgttttaaattttatttctgctactatattgtgcatagtttcaaaattaccctgaaaaacagacaatttgcagaaactgaacttattaaaagcgttaatatttcaaaaatcaggaaaaaatctacatttttgcatccaaccaaaccgccacattttgaaaggcatttattcatcaatactggaaaaaaagcaacagggcaaaaaaagctttgcagttcttattgatcccgataaggtgaatgagcaaagcttagatgcattaattgagctggcaaaagaagccagggttgattatttttttgtgggtggaagcctggtggtttccgataatatggatgaatgtattcagcaaataaaaagcagttgtgctataccggtaatactttttccgggaagccccagccaggtaagtaaatatgccgatgcccttttatatctctcattaattagtggccgaaatccggagttgctcataggccagcatgtggtaagtgctcctgtggtaaaaaagagcggactacccataatgcctaccggctatatggtaattgatggtggcgcacctacaaccgtttcatacataagcaatgctgctcccttaccaagcgacaaaaacgaaattgccatgtgcactgcaatggccggcgaaatgctgggcatgaaacttatttacatggatgcnngccggcgccgacattattgtagttggcaacgccattgaaaaagatgcaactcttataaaagaaattgctgctgctgtgcatagtgtagaggtggtgatgtaggagatgattagaaaattctgcttttattttgattgattaaatccgctattcaatactgttatatattgctgaaatagaaaaaattctgctcgctttcacttttataaaagtcatatattagctatacggtttaccttatgaataatcacatcattaaaggcaaacgataaagcccttttacaaaaatttcaataaaaaaaccccgcagataggcgaggcactaaatgttttcacaacggaaaaatccttattgtgaattgctttcaaagcataaatatataaaaaaccaaatgatatgaaaaaaaacattttgggattggatttaggaacaacctcaataggctttgctcatgtaattgaagatgagcagaacgaacaatcagaaattatacaaattggagtaagagttaatccgctaacaaccgatgaacaaactaattttgaaaaaggaaaaccagtatctgttaatgccgaccgaacatcaaaacgaggagccagaagaaacctggatcgttaccaagatagaagaagcaatcttattcatgcgctttcaaaagccaatattataagttccgacacaaaacttgctgaagacggtaaacaaagcacatttgaaacctggcaaattagatcaaaagctgttacagaaagaattgaaaaaaatgaattggccagagtttttcttaccattaataaaaagcgtggctataaaagtagtcgcaaagccaagaacgaggatgaaggacaagcaataaacggcatggaggctgccaaaagattgtatgaagaaaaccttacgccagggcaattagtttatcaattattaaacgaaggcaagaaaaacattcctgatttttacaggtcagatttacaagctgaatttgataccatttggaatttccaaaagcaatttcatgcccaaatacttaccgatgatttttataaagcgctacaaggaaaggggcaaaaagccagcagtgccttattttggacaacctatcaattcaatattgcggaatacaaatcaaaatcaagagatgaaaagaaactgattgcatataaatggcgaagcagtgcggtttcaacacaattaacaaaggaagaggtagcttttgtaattacagatataaataacaatttaaaaaattcgagtggctatttaggtgctatctccgacagaagcaaagaattgttttttaacaaactcaccgtagggcaatacctatatattcaactccagaaaaaccctcatacccgtttaaaaaaccaggttttctatcgtcaggattatatggatgagtttgaagccatttggaaagaacaatcaaaatatcatcccgaactaacacaagaactcaaaactgaaataagggatattacaattttttaccaacgcaaactaaaatcgcaaaaagggttaattagtttttgtgaattggaaagtaaagaaattaaactcgaaaagaatgctgaaaaagtaaaaaagaccattggtttaagagttgctccgaaatcgtctccattatttcaggagtttaaaatttggcaacggctgaatgatgttttaattagaaaaaaaggaagtaaaaaaagaactacgaaaaatgaaaacggcaaaatggaattgttcgatgtagaaaaagaaattttcgtattagataaagaaacaaaagaaaaactttttaaagaattaaatgtaaaaggcaatctgtctgcttcaaaaattatagaatatttgggacacaaaccttctgagtgggagctaaattttaatgagctagaaggcaaccgaactaaccaggctttatataatgcctatctcaaaattttagaattagaaggttataacgaagatttgctaaaactctcagagaaggatgacatcaatgtagcagaacttaaaacgtctgctaaagacattgagaaaatggtgcagcaaatttttgaagtactgggcatcaacactcgtattttaaatttcgatgcagagttggatggcaaagaatttgagcagcaggcctcctatcaattatggcatttgctttactcctacgaaggcgatgattcagccagcggaaatgaaaaattatatgaattgcttaaaacaaaatttgggtttaaaaaagagcatgctgttattcttgctaacgtagctttttcggatgattatggaaatttgagcagtagagctatgcgtagaatatattcctacctaaaagaaaacaagtatagtactgctgcagagcttgcagggtacaagcattcagcagcttcgttaaccaaagaagagattgaaaaccgaaaattagaaacccatttggagcttttgaagaaaaacagcctgcgaaatcctgttgttgaaaaaattcttaaccaaatggtaaacctcgttaatgcacttattgaaaaaaatagcgagaaggatgaggatggaaaaattatcaaccactttaagtttgatgaaatacgaattgagctatcccgtgagttaaaaaagaatgccaaagaaagggcagaaatgaccactaacatcaatgcatcaaaaattgcacacgaaaaaatttttaaattattaaccacagaatttggcgtaaagaatccaactagaacagacattattcgttacaaattatacgaagaattaaaaaacaatggctataaggatttatataccaatacttacattccaagagaaatattgttcagcaaacaaatagatattgaccatataattccacaagcaaaattatttgatgacagcttttccaacaagaccattgtttttaggaaggataatttagaaaaaggaaatagaaccgcctttgattttattcaaagtaaatatggtgaacccggcattgaggattacctgaaaagaattgaacatctttttgaactgggtaaaaaaagtaaagatgatacttccgcaggcattagtaaagccaaatatcaaaaactgcttaaaaaggaaactgaaattggagatggatttattgagcgggatttaagagatagccaatatattgccaaaaaagctaagaatatgctgttctccatttgccgaactgtggtggctacaaccggcagcattaccgaccgtttgcgtgaagactgggatttagtaaacattatgcaggaactcaattttgataaatttaaaaaattgggtttaacagaaatggtggaaaagaaagacggaacatttaaagaacgcataaaagactggagcaaacgcaatgatcaccggcaccatgcaatggatgcattaaccgtagcatttactaaacatagccatatccaatacctcaatcatttgaatgcccgtaaaaacgaagcagataaatggcacccggtaattagcggtattgaacataaagaaacagaaatggtactggatgatgaagggaatgcaaaacgaaaattcaaaaagccattaccaaattttcgccagctagccaaagagcatttagaaaaggttttagtgtcacataaagccaaaaataaagtagttaccaaaaacaagaataaaactaaatctaaaaccggggagaaagtaaaaattgaacttactccaagaggccagcttcataaagaaacagtttatggcaaatatcaatattatgaatcgaagcttgaaaaagtaagtgcaaaatttgatgaaactaccattgggttagtggccaatccatcttttaaaaaacttttgttacaacgtttgcaagaaaatggcaacgaccccaagaaagcttttactgggaagaatgcaatttcaaaaaatccaatttatttagataattctaaaacatcgcagcttccagaagccgtgaaattaatttggttggtaaatgatttttcaaccaggaaagatgtaacacctgagaattttaaagatgaaaaaacaattgataaaattttggataaaaaagtaaaagaaattttattaaacaggttaaaacaatttggcgatcctaaaaaagcattctccgatttggataaaaatccaatatggctaaatcaggaaaaaggtattgcaataaagcgtgttaccataagtggagtaaaaaatgcagagtttttacactataaaaaagatcattttggcaaagcaatcattgataaaaatggaaaacctattcctgttgattttgttagtaccggcaacaatcatcatgtagcaatttatagagatgaaaaaggtaatcttcaggaaaaggtagtatcgttatttgaagcagtgcaactagtaaatgccggagagccggttattgataaaacgtataaccagggtattggttggcagtttttatttacaatgaaacaaaatgaatattttgttttcccgaatgaacaaagtggttttaatcctaatgaaactgatttactcaacccggcaaacaaaaagttaattagccctaatttgtttagagtgcagaagcttgcatcgctacaatattggtttcgacaccaccttgaaacaactgttgatgtaaaacctgaattaaaaaatattgcttattatcctcaacttggattaaatggaataaaagaaattgtaaaagttcgtctcaatcacttaggtgatatagttaaagtaggagaatattaaaatacgattatatgataaaacgcaccctttattttggtaatccagcatacttaaaaaccctcaacgagcaattggttattacatatccaacagaaataatcaatggtcaacccttgcctgaacaaagcaaacaattacccattgaagatattggtgtggttatactagatcatcagcaaataaccattagccaggcattaattgctaaattattggctaataatgtagctctcatcacctgcgataatagccaccatcctaccgggcttttgctcaacctcgatggcaacaccttgcagagtgctaaatttcaggctcaaattgaagcttctttaccccttaaaaaacaactttggcaacaaaccgttgccgccaaaataagcaatcaggccaatgtgctggagagcaaaggaaccggtgccaaaaatttgcgtaattggagtatggaagtaaaaagtggcgatgcagataaccatgaagcaatggcagcagtttattattggaaaaacctttttgaaatcttccccgagtttaagagagagcgttttggtgagccgccaaacaatcttttaaattatggctatgccattttaagagcagtagttgcaagagccattgtaggtagtggcctcttacctactttgggcatttttcataaaaaccaatacaatgcatattgccttgccgacgatttaatggaaccttatcgtccttttgttgataaaacagtttggacaatagtgaggcaaaatggacgctaccttgagcttacgcccaatatgaaaaaagaacttttaaatattcctgcccaggatgttttaattaatggagaaaaaagtcctttgatgattgcagtgcaaaaaacaacatcatcggttgtcaaatgctttgaaggtaaacaaagaaaaattttataccctgaatttgtataagaaaggtagctgtctttccgagcgtagcaaggaatctgcccaatgactgttgtctttccgagcgaagtgaggaatctgccgaagattgattaaatgcctaacccaacagatccctcgttcctcgggaagac

SEQ ID NO: 2472 - DNA, 6839 bp, synthetic construct
  misc_feature 1..6839: note = Synthetic
  source 1..6839: mol_type = other DNA
tccgatctatgaccctgttccgtaagttccgttaaaaaaattgactctatggagaaatacgatgaataaaaataccgtcattgcggtaattctttccacactggttgtgattgcaactttttttatgcagacctatttactgccgaaaacttcagagccggcgggaaacgacacgacacagacgcagtcttctgaaatgcagtcggcttctgattcggagatgccggaaaataaaactttttttaccagcgaagaaaatgcaaatcttacggaagaagagatttctatcaaaacaaacaaagctgatattgttttaacgaacaaaggcggcgacataatcagctataagctttttaagcatattgacgttgaaacaaaagacggcgtgcaaagggcggtatgggtgtcgaagcctgttccgatttgccaggcttccaaagtggcatagtctgtggttcccaatcttcccactttttcgcccgtaaaggaaatcctgttgtagtcgcagacccgtcccgtcacgtcgtccgactggtaacggaacacatagcccggtgtctcattgatgaaaatattgttgtttacggtcaggttttggaagctcttttcaacgaacaggttggtggcgatgcctgtgcccgtcatttttaccgtgttgtgcgaaacgtacagatggctcgtttcatcatccttgacgtagatgcccatgctataattatcgttggaatgaatggaaatcatgttgttgcggacgatgatggggtgttcggcagaacccgttccgggacggaaaatgatgccttcggcgttcaccgtgttcaggtcggcatggatgacattgttctcaacgaccgttccataatagctcctgaacgcatcaatagcccagtattccttcacgtccttattgttctcgaaagtgttgttcctgactatcgcatcttcctgataggtaagataaatactcttgaaacgctggttggaaaacgtgcagttttcaatcagcagatgggtgtcgttaggtttttgccagcccggaccttgcatatagaaggcataatccccgtaggtaaaactgcaattcttaaactgcaaatcagaatccaggttaccgacatcttgcgatttatcgtagatgatattttgatttttgacataacctgaaccaccattcggattatcgtatccgacaaaacgcacattaatgaaatagtcgcttactacgcccttgtccaaatacaccacgttggcatagttggtggaggtggtctgtagggtcatgttctcgaaactgataaaatccgcgccatccaaagtgagggtgtttttctccaaataacccgcattgctggtcagcacgacttgctcattggtcgttcccatgcccctgaagatgatgcgttggttggcactcgcccctgcaatggaaggtatggtgagaaattcctcgtaggttccattggccacttcaaaaaccacttgtccgttgacccccgaagcactcaaggcttggacggcagccgtaaaggatgtgaaattaggcgattgaccggcatcggcattgatggtgtaagtgccagacatgccgccaccctgtgagaaagcagacatctgaaatgctaaaatagtcagcagcaataagtaaaaagttttccgcatgggacgtacttgtttaaatgacacaatgccgtatgccaaagggaagctttttccgattgcctcagtccgaaagtcgcttttgttcccgaaagcctacagttgaatacgacacaggcaggtcttctgacttactcacgccttgccgccttcccatccggatgagtcggacagtggcttgttgacaagtcatttgctgagcttacagcagcgggcactgttgccgatttgcacggcattcccttgacctatgacacggcaaaagtagtgctttttttcgttacggaagaaaaaaagttgccaactcggattggaggacttgcaatgacaaataaaccgaaacactttccctgaacggcttgatatgtcaaacaccaactactttgttccaatgaaaaagagcgagtttccccgctctaaatgttttcacaacggaataatccttattgtgatttgcttcaaaattgtcctgcaaaaataataaaaaaatgtttcctttatcatttctataggaagttttattaaatttggcatccatttatcaagacaaatcagattcatcatgaagagaatattaggcttagacttaggcaccaacagcattgggtgggcagttgtgaacgaggcggaaagcatggacgaaaaatcatccatcatcaaactgggagtacgcacaattagctatgataactttgtaagtaccgaaaccggcaaggagtgcatggatgccgacaaggatttcaggggtggaaaaagcatctcatgcaatgcgggtagaaccatgaaacgctccgcacgccgtaatttgcaacgctataaattgcgacgcaaaaatctattagacgtgctgatcaagaacaacatcattaccgatgactctgtgttggctgaaaatggcaacagaaccacgtttgagacctatcgacttcgtgcaaagtcggcaacggaagaggttacgttggaacaatttgcgagaatactgctgatgattaacaaaaaacgcggttacaaaagcagtcgaaaagcaaaatcgactgacgaggggcaattgattgatggaatggaagttgcaaaatacatttatgaaaacaatctcacccccggtcagtatgtattagaactattgaacaaaggcaaaaaatttattcccgatttttatcgttccgatttacaagatgagttcaacagggtttggaattttcagaaacaatactatccaactctgcttaccgatgagttgaaggaaaaactgcaaggcaaaaacgaaaaacagacttgggcgatttgtcaagagccttttaatttggtgggtattaagcgcgaaaccaaaggcgatgcgctgaaaaaagaaaactacgtttggcggtcaaaaagcctgtcggaacgaatggatttggagcggttaaccatcgttttacaaaaaataaattccaatattaacggctgcagcggctatttgggcaacataagcgaccgaagcaaagaactttacttcaaaaaactgaccgtagggcaatatttgatggataaattggataaaaatcccaattacagcctaaaaaatcaagttttttatcgccaagattatttagatgagtttgaaaccatttgggaaaaacaagctcaattccattcggaattgacccaaaacctgaaaaatgaaattcgagatgtcgtcattttctaccaacgtccgctaaaatcgcaaaaagggttgattagcatttgcgaacttgaaggaagaaaaatattgaaagaaacagatgggaaaaagaaagaaataactataggaccgcgtgtttgcccccaatcatcgcctctgtttcaggagttcaagatatggcagattttgaacaacattcaagtttccggaaaggtaattaaagatgctcaacaagatctttttggaaatgccacagactataaatttggcaaaaggtatctggaacaagaagaaaaagaaattttgtttgctgaactgaatgtcaaagaaaaactttcaaagaccgaagcattgcgcttgttgtttaagaacgcctctgaattggatttgaatttcaaaaccattgaaggcaacagaacgaacaccgaactattcaaagcctaccaaaccattattgccaagagcggacacggcgaatacgatttttcaaaaataccggctgcgaaatcaattgaaattgtggaaacggttttcaatggattaggtttcaataccgacattttacatttcaactcaaatctggaagggaaagagcttgagcaacagcctgcctatcggttttggcatttattgtattctgccgaagatgacgactcaaaaatggggaatgaaaaactcatcaacaaaattacggagttgtatggctttgataaagaatacgctacgatacttgctaacgttatcttccaatccgattatggtagtttaagcacaaaagccatgcgaaaaatcctaccccatttgaaagacggtttggaatacagtgtggcatgtgagtatgccggctataggcattcaaaaaaatcgcttaccaaagaaaaattggacaaaaaggagttgaaagaccgtttggatttattgcctccaaacactttgcgaaatcctgtggtagagaaaatcctcaaccaaatgacgaatgtggtgaatgccgtaattgacacctacggcaagcctgacgagattagaatagaattggcacgcgaattgaaaaaaagcggaaaagaacgtgccgaaatgaccgatgccatcaatcaatcgaccaaacaacatgaagaatatcgaaaaattctacaacaagattttggcatttcaaatgtcagccgcaacgatataataaggtataaactttacaaagaacttgaaagcaacggatataaaacgctatactcgaacacctatatcccgcaagaaaaattgtttagcaaagagtttgatattgagcatattataccacaagcaaaactatttgacgatggcttttccaataaaacaattgaggcacgccaagcgaatattgaaaaaagcaacgcaacggcttatgattttgtagaaagtaaatatggcaatacaggtgtggtagaatacaaaaatcgaattgataaactattcaaagacggcattatatccaaaaccaagcatgacaaactgctaatgaaagaagccgatattccaagcggatttatcgatagagatttacgtgattcacagtatattgcaaagaaagcgcgtgaaattttagaagaaatagtgaaatttgttgttccaaccacaggagccataaccgaccgcttgcgcgaagattggcaattggttgatgtgatgcaggaattgaattgggacaaatacaacaaattaggattgaccgaaattattgaagacaatgatgggcgcagaatccgccgcatcaaagattggacaaaacgcaacgaccaccgtcatcacgccatggatgctctgaccattgcgtttaccaagcgcagttatattcaatatcttaacaatctgaatgccagagtgcaaaagggagtggacgattatattgatttggaaatggtcgaacaaaaggatttggataaaaaagatcgcacttctgccgtttatggtatcgaaaagaaagaactgtacagagatacgcatggaaaactaaaattcaaaccgccgatgcctttggatgaatttcgcgccgaagcaaaacgacaattggaaaatacgctgatttcaataaaagcaagaaacaaggtcgtaacacgaaatgttaataaggcaaaaaacaacgcaagttctgaaattgtcacccaagatggtgaaataaaaaaggtaaaaggacaagttacggctacgccgcgcggacaattgcacaacgaaacggtttatggacgaatgaaacaatacgttactaaagttgaaaaagttggtgcaacctttgatgcggaaaaaattgctaccgtatcgtgcaagcgattccgtgaggcattgatggaaaggcttggtgagtcgggcaatgatcccaagaaagcatttacaggcaaaaacagtttgaataaacgccccctctacattgatgcagagcatatcaaaagtgttccgataaaggtaaaaacagttactttgcaagacatttttacaattcgcaaaccggtttcggccgacttgaaattggataaagtggttgatgtaaagattcgcaaagtccttgaaaacaggctacaagaatatggcggtgatgccaaaaaagccttttcaaaccttgaagaaaatccaatttggctcaacgaagaaaaaggcatatcaattaaacgcgtaaccataaccggagtgagcaatgccgaagcccttcacgacaagcacgaccactttggcaatcccattcttgacgaaaacgggaaaaatcaacctactgattttgtaagcaccagcaacaaccaccacgtagccatttatcgaaaacctgttttgaataaagatggtgttcagaaagaagatgaaaatggtgaaaagatgtgggaactggatgaacatgtggtttcgttttatgaagctacaacccgtgccaatagcgggcttcctattatagataaagaatacaacaaatctgaaaactgggtgttcttgttcacaatgaaacagaacgagtattttgtattcccaagatacgaaacccgaatggacgaaaacggaaaagaaaccaaagtgatgacctttgacccctctgctatagacctcaccaatcctgataactttgccttaattagtccgaatttgtttagagtgcaaaaattttcttataaaaactacgtgtttagacatcatctcgaaagttctattaatatgagttctgctgatttgaaaggatttacttggacagattttagaagttcaataggtttggataaaatcgtgaaagttcgaatcaatcatattggtcacattgtatcagtaggagaatattagattgttattttaaagccaaagtcatgatcaaacgcacactctgtttcagcaatccggcttatctgtcgcttaaagatgaacagatggtcatagtgctgcccgaacaggacaaccgcaaggtgacggcccctatcgaagacattggctatgtggttctcgaccataagcaaatcacaattacccaaggcttgttagagaaactattagaataaaactgcgctgtcattac

SEQ ID NO: 2473 - DNA, 6753 bp, synthetic construct
  source 1..6753: mol_type = other DNA
  misc_feature 1..6753: note = Synthetic
gccatcaaaataaacatttccacttcccgtgtatttaaaagcaataaaagcagtgccggcgtagtcagataaatttataaaagtagaatggtttaagtcttaaatatgaatagaaattctaaacaagaaaaagcgacattataattgctataatgccgctttaaatgttttcacaacggaataatccttattgtgaattgatttcaaattgttctcaaatatagataaaaattattgattaattttacctaccttcatttaaaattgctttaataatccttgctaaacgaaattaaaaacctgtctagcacagggtaaaacacgtgttgctatgaaaaaaatattaggtctcgatctagggactacttccattggatgggctttagtaaatgaagctgaaaacaaaaacgaacagtcagaaatcattaaactaggtgtaagagtaaatccactttcggtagacgagaaaacaaactttgataaaggaaaaccaatttctacaaacacagatagaactttaaataggggtgcgaggagaaatttgcaacgttataaacaaaggcgagaaaacttatttgacatactatttgagaataagctaattgaaaaagaaacacccctcacagaaactggtaaaaaaactacctatgaaactttaaaattaagagctaaggcacctaatgagaaaataaaattaaatgaactagcaagagtattatttgctatcaataaaaaaagaggatataatagtagtcgaaaagcaaaatctgaggatgaaggaaatattattgatggaatgtctattgcaaaagaattatatgaagataatattacacctgggcaatatgtacatgagttactcttaaaaggtaaaaaacacatcccagacttttatcgctctgacctaaaaaatgagtttaatgcgatttgggagtatcaaaaacaattttatgccgatattttaaatgatgaaatgtataagaaactcgatggacaaggacaacaaagttctaaaaaacgatttcttgcaattcacggaatttatacagcagaaaataaaggaaaaaaagatgcaataaaactaaagcattataaatggagaactgaagcaattacaaaaaaactaacgatagctcaagttgcttatgttttagtagaaataaataataatttaaataaatctagcggttacctcggtgctattagcgacagaagtaaagagttatattttaaaaatgaaacagttggggaaaacctatacagacaaattattgcagataaacatacttctttaagaaatcaagttttctacagacaagattatttagatgagtttgaaaaagtctgggaaagacaagccaagtattacccaaaattaacagcaaagttgaaaagtgaaattcgtgatgttattattttttatcagcgaaaattaaaatctcaaaagcatttaatatctaactgtcagtttgaaaaacagcataaagcagctccaaaatcctcgcttttatttcaagagtttaaaatttggcaaaacttaaataatatagaatttaaaaactctaaaactaaagaaataaagatacttagtgatgatttaagaatatctctttttgaagaattaaatttaagaggaaatctaactgaaaaagcaatattaattttttgtgatttaagttctagttggaaaagtaatttttccaagggtctagaaggtaataatacaaataaagtactctataatatttaccaacatattgcaacagaagaggggtatggatttaattgggaaaagaaaactgcaaaagaaataaaagaagaattaaaatctattttacccctaattaatattgatgctaatattttaaattttgaaacgagtattgaaggtgaattttttgataaacaaacaagttatcaattatggcatttattatattcagcagaagatgatacaaaaatatcagaggaagatagattactttatggtaatactaatgttgctttaaaaaagaaactatacggtaaatatggcttcaaaccagtgtatgctggcatgatagcgaatgcctctttacaagatgattatggtagtttgtctgcaaaagcaattcgtaaaatcattccttttttacaggatggcaccgagtactcaaaggcatgtactttagctggttacaaccacgctaacagtctaacaaaagaacaattagaaaagcgcattcttaaaccaagactagaaatattagaaaaaaatagtttaagaaatcctgttgtagaaaaaatattgaatcaaatggtaaatgtgataaaccaaattattgatgaatatggaaagcctgacgaaatacgaattgaactagccagagatttaaaaaaatcttcaaaagaaagagaagaaactacaaaatttataaactctgctactaaagtaaatgatgatataaaggctctaattctaaaagaattcggttttactgctacaaaaaatgacgtagtgcgctataaactatggttagagttaaaaaataacgggtacaagagtttatttacgaataaattcataccaaaagaaaaaattttctctaaagatattgatatcgaacacatcattccaaaagctattttgtttgatgattcattttcaaataaaacactcgcatacagatctgtaaaccttaaaaaagcagatagaacagcgattgattttatagagcaagatttcagtaatgaagaagttaataactataaattaagagtagaaagtctcttcaaaagtggggaaattaaaaaaggaaaatacaagaaactactaatgggtttgactaatttacctacagattttattgcacgagatttagtaaatacacaatatatttctaaaaaagctaagagtatgttgtttgaagtatttgataatgtaatttcaacatctggtagaattacagataagttacgcaaggattgggatttgataaatgtaatgaaggaacttaatttacccaaatataaactattaggtcttacagaaactcagataaggaaaaacaatataaaaattgaaataataaaagattggacaaaaaggaatgatcataggcatcatgcaatggatgctcttacggttgcttttacaacttacaatcatattaattatataaataacctaaatgcttcaagaataaaagaaagtgaactatatggggttagaaatacaataactaaagtctatgaaaatgctactggaaataaaaaaagaaaatttattcctccaattgaaagctttaggattcaagctaaaaaacatattgggtctattttaatttcctttaaaaataaaaataaggttgttacaaaaaacattaataaatctaaacttaaaggaaaagaacaatttaatataaaaacacagcttacacccagaggacagttacacaaggaaacggtatatggaacgtctaaaagaaaaatgaaaacacagattaaattaaacaaaaaatttgatttagagaaactaaaattaattattgagccaaatgtaaaaaagcttttaataggccgtttaaatgtatatagtaataagccagaaattgcttttgatgccaaaacaataaaaaaagatcctattatttataaaaatttgccgttaacaaaagttttttgttttgaagaaatatatacgataagaaagattatttctcctgacaattttaaaacggaaaaagatttaaataaagtaatagataaaaaaataagagaaattttaaaatatagactttctgaatatgatggaaaatctaaagaagctttttcggatttagacaaaaacccaatttggttaaataaagaaagaggtatcagtattaagcgtgttactataactggtgtagcaaatgcagaacctttacattataagaaagatcattttgggaatgagattttagatgaaaaaggaaataaacaagctattgattttgttagtacagggagtaaccatcatgtagcaatttataaagatgaaaaaggtaaactacaagaaaaagtggtgtcgttctatgaggccgtagctagagtaaatgaaaaactacccatagtagacaaagaatataaaacaagtttgggttgggaatttatatttacaatgaagcagaatgaaatgtttgtatttccgaatgatgatttcaatcctagtgaaattgaccttttaaatgaaaaaaatgcaactttaattagtgctaatttgttcagagtgcagaaacttggcagtaaagattataattttaggcatcatttagaaacaactgtaaccaataatattaaatttacttttaaaagaattaacaattgtaatgcattaggggaactaattaaggttagaattaaccacctaggattgattgtgcaaaaaggtgaatactaaaatcatgataaaaagaacgatttacataggcaatccatcttatctaaagataaatcaaaaacaattagttgtgcaagaaccagtaacgagagaaataaaaggcacgataccaattgaagagattgcaatattgatgctagaccattatcaaataacaatttctaatcagcttttaataaaattacaaggcaataatgcagctataattagttgcgatgagaatcatttacctcttggcatgatgctacccatgcatgggcatacagaatattcagaaagaataaaacaccaattagcagtatcagaacctttgaaaaaacaattatggaaacaaactgttaagcaaaaaataaaaaaccaaaaggctgttttagatttgaatcaaaaagtttctgaacctttagaagaatactggttaactgtaaaaagtggcgatgctgcaaatagagaagggttagccgcacaatattattggaaacatttgtttgaaaatttctcgagagaacgttttggagaagcaccaaatagtttattgaattttggctacgccgttttacgaagtattgttgctagagcacttataagcagcggtctactgcctgttctaggaatttttcataagaacaaatacaatccgtattgcctggcagatgatatcatggagccttataggccttttgtagataagcttgtttataactatattctaggcagtaacaacgctgaacttacgaaaaatgcaaaggccactatcttaacaattgcgacacaagatgtttatattgacggtctggtaagacccttatttattgcaattactactacaactgctagtttatataaatgttatacaggagagctaaggcagataaaatatccagaactagattaaatgtcaactaatagatatagcgcttatagaattatgtgggtattcgttttttttgatttgccaaccgaaactaaaaaggaacgaaaagctgctggcttatttcgtaaaaaattaatagctgacggttttacgatgtttcagttttcgatatacctaaggcattgcccaagtagagaaaattcaaaagtacataccaaaagagtaaagttaagtttaccaaaacacggaaaagtgtgtattttagaaattacagacaaacaatttggcaacatagaattatttcatggaattaaggaaatagctttaccaaaaccaagtcaacagctgcagttattttaaatagaatagaaaaaacggaagtaatggttattttaattctcctaaaaataagttttataaatccaaaaaagaatcccaatccattgagtttcctcaataaatcaggattgaccttgtgattgctcacgtaaaaatacaatttgaaatcaattcacaactaatcattccagagatatcaactctttttacttgtgattgctcacgtaaaaatacaatttgaaatcaattcacaacccgctggcgaggtcttttctaaatctgaaacttgtgattgctcacgtaaaaatacaatttgaaatcaattcacaacttcttttgatcagcttagtttcttaagtgacttgtgattgctcacgtaaaaatacaatttgaaatcaattcaaaacccccgaagtctgcgtagtaattgtttgaatcttgtgattgctcacgtaaaaatacaatttgaaatcaattcacaaccgatgcgtctttacagtacgcacaaattgacttgtgattgctcacgtaaaaatacaatttgaaatcaattcacaacttggttggctaatgttatcatagtttatgacttgtgattgctcacgtaaaaatacaatttgaaatcaattcacaacaccaataaatctatataatcaatatcaaaacttgtgattgctcacgtaaaaatacaatttgaaatcaattcacaacccacttacttcaatcgtaattaaatatctacttgtgattgctcacgtaaaaatacaatttgaaatcaattcacaaccccaattcctttgattgaataatcaaacgtcttgtgattgctcacgtaaaaatacaatttgaaatcaattcacaactattagtatcatagtgttataacataagtacttgtgattgctcacgtaaaaatacaatttgaaatcaattcacaactaaatatgtcacgaaaattctaaataggtccttgtgattgctcacgtaaaaatacaatttgaaatcaattcacaaaaacctttgagtaattaaatgattaaaaaaagaaaaatgtagggaaaaatgatctttacaatccctatgaaaacatgtacagaaaaggttttaacaccttagcatatcg

SEQ ID NO: 2474 - DNA, 6628 bp, synthetic construct
  misc_feature 1..6628: note = Synthetic
  source 1..6628: mol_type = other DNA
gatttgcttcattttagtatgacaaatatatgaaatggaatgcttgcgtgcaagtgtttctgaaataaaatttttatatttgggaaaatgtaaagataacatactatgaaaaggattttaggcttggatttagggacaaatagtatagggtgggcgttggtgaacgaagctgaaacagatgaggaagtctcgtcaatcatccgattaggtgtgagagtaaatcctttgacagtagatgaaacgcagaactttgaaaaagggaaaagtatcactacaaatgcggaaagaactcttaaaagaagtatgcgccgtaatttgcagcgatataaattacgtcgtgatgcgttggttgaatttttgaaagagctgggttttattaccgacgaaactatcctttcggaacaaggaaacagaactacgtttgaaacctgtcgtttacgggctaaagctgctgaagaagagatttctttagaggaactatcccgtgtcttattgatgattaataaaaaacgtggatataaaagtagtcgaaaggtaaaaaaggaagaagatggagttttgattgatggaatggagattgctaaaaagctgtatgaggaggatttgactccggggcaactttgttcgcagttacttgaatcgggcaagaaagttttgccagacttttaccgttctgatttgcaagaagagttggatagaatatggagtgttcaaaagcaatttcatcctgatgttttctgtgatgccgccaaagaagaaatcaaaggaaaaaacagaagccagacatgggctatcttggctaactattttgtttggaaagaagaagtggttggctggaatgacagagaagcaaagaatgaaacgatagaaaaagaatgtaaacttgtcggtcttaaacggacgactaaggggtatgaactgaaaaaggaaaattatcgttggcgtgcgcaagctcttactgaacaattaggtttggaagagatagccgtagtcttgcaagagatcaatggtcagataaatgcgtctagtggttatttgggagccattagtgataggagcaaagtgttatactttaatcatcaaacggtcggacagtatcagatggctgagttagacaagaatccccatgcaagtttgcgcaatatggtattctatcggcaggattatttggatgaatttgatagaatttgggaaaagcaggcagaatttcataaggaattgacagctgaattgaaaaaagagattcgcgatatgatcatcttttaccaacgacgtctgaaaagtcagaaaggcttgattagtttctgtgagtttgaaaggttggagattgtagtagaaaaggatggaaagaaacagaccaaagtcataggatgcaaggtgatacctcgttcgcatccattgtttcaggaatttaaggtatggcagacattgaatgacataaaggtattgggaagagagaagaaaagaaatgctttgtcggcaagcgaaagtagggctttgtatccagaagaaaaagaaatactggcaagagaacttgcgataaaagaaaacatgaagaaagcagatgtgttgaagctcttatttgaaattggatttgaacttcaaacaaatagatggaaatcgtactgggttttctctcttttctgcctatagcaaaatgatagaaaagtatggctacgaaccgttggattttaagaaaccagcagatgagataatcggacagctaagaactatctttaccgatttaggttggaatacgaatctgtttaccattgacttaaccaaagaggggaaagagctcgagatgcaaccttatttcagactttggcatctgttgtattcttttgaaggagataatacgtcgaccggtaacggcaaactgattgaaaagatcatgcaactttgcggagttgagaaagaatatgctgtagagctagccagtctttcgtttcaagatgattacggaagtttgagcgcgaaagccatcaaaaggattttaccctatttgaaagagggtaatctgtatgatgtggcttgtgaatatgccggttatcgtcattccaaatcttcactgactaaggaggagatagaaaataaggttttaaagggcaagctggaggttcttcctaaaaacagtctccgaaatccggtggttgaaaagattttgagtcagatggtgaatgtaatcaatacaatcattgatacgtatggaaaacctgatgaaatccgagtggaattggctcgtgaattaaagaagagtgccaaagaacgtgaggaactgacgaaagctatcgcaaagagtacccgtgagcatgaggagatccgtaaattgttgcaagatgaatttggtatgatgaacgtgagccgcaatgatattatccgttacaaactttatgaagagttgaaagataatggttataaaaccttgtattctaatacctatattcccaaagaaaaattgttcagtaaggattttgatattgagcatattattccacaggctcgtttgtttgatgattctttctctaacaaaacattggaagtgaaaagtataaatattgagaaaggaagtaaaactgcttatgattttgtggaggagaaatatggcgaacaaggtttgcaggaatatttaaatcgttgcgaggtactgttcagggataagaaaactaaacttagaaaattgaaaatgcaggagagtgaaatccctgaaggatttattgatagggatttacggaatacacagtacattgcaaagaaagctctttctatgttgaatgaaatttgtcgtcgagtggttgctactactggggcgattactgatgaattgcgtgaagattggcaacttgttgatgttatgaaagaattgaattgggaaaaatataaagtactgggattagtcgaatattttgaagataatgatggaaggttgataggtaggattaaagattggactaagcgtaacgatcaccgccatcatgcaatggatgctttgacagtagcatttactaaagatgtatttatccagtattttaataataagaatgctagtcttaagcctgatacgaatgaagctgcaataagaaataagtattttcaaaatggaaaggctattcctcccatgtctttagatgaatttcgtgctgaggcaaagaagcatttaaatgatacgctaatctctattaagaccaagaataaggtagttacaattaatctcaatagaacaaaaaagaaaaatggaataaacaaaaagcagcaacaaactccacgagggcaattgcatttggaaactgtttacggtagtcataaacagtatgtggttaaagaggagaaagtgaatgcctcgtttgatgcagctaagatagccactgtaaataaacctgcttatagagatgcattattgaggcgtttgcaagaaaatggcaatgattcgaagaaagcttttactggtaagaattcattggacaagcaacctgtttggttagatgctaagcagaacgagtgtgttccggaaaaggttaaaacagtaatgcttgaaacggtttatacggtacgaaaacctattgatgaaaaattgaatgtagataaagttgtagatgcgagaattcgtaaacttttgcaggatcgcataaaagaatacggtaatgcgaagagtgcatttgccaatctggatgaaaacccgatatggctcaataaagagaaaggtataactataaagcgagtgagtgtttttggtatcagtaaagcgcaatcacttcatgaaaagaaggataaggatggtaattttattttagataaagacagtcggaggattccggttgattttgttaatacaggtaataatcatcatgtcgcaatttatcgtaaaccagttttagacaaaaagggacaggctgtatttgatgaaaatggtgaattgaagtttgaacttgaagaggttgtagtttctttctttgatgcagtgacgcgggtaaatcttagtcaacctattattgataaagattataagagaagtgaaggttggaagtttctttttagtatgaagcaaaacgagtattttgtgttcccaaatgagaagactggctttgaccctaaagaaattgatttgctgaatcctgagaattatgctttaataagtccaaacttgtttagagtgcaaaaaatagcctctaaagattatgtgtttaggcatcatttagaaacagttgttgcagataggaaagaattgcaggagattacctggaaacgaatttcttctctaagtatattgaacagaattattaaagtccgagtcaatcatattggtcaaattgttatgataggggaatattgagatggagaataaattgaaattgtttcaaggcaagagtattcgttccgcctggaatgaagaagaacaacaatggtatttttctattttagatgttgttcaggttttgacagataatgcaatgctaagcaatatacaaagcgaatgtgttcaagagatgaaatgttgaatttgaactggggtacaaattgtaccccagttcaaatgactgctgaagatggtaaaagaaggaaaatccaagcggcaaatataaaaggactttttcgtatcattcagtctattccttctcccaaagcagagctttttaaactgtgatcagcccagattggctatgatcgtgtacaagaaattgagaccccagaattagctcaagagtgaatgaaagaactttatgaacagaaagggtgtctcctcagttaccgtttgaagaaggtgatgaataatattcactaaaattgaagtactatgattaagaaaacactctattttggaaatccaatttatttatctttaaagaatgcacagttagtaataaaactaccggaagtagtgaaaaatgaaactttaacgggaggatttaaacaaaaggcagaagtgacaaaaccaatagaagatattggtgtagttgtattggataataagcaaattacgattacctcaggagtactggaagctctacttgaaaataattgcgctatcataacctgcgatagtaaaagtatgcccgttggcctgatgcttcctttgtatggcaatacaactcagaatgaacgttttcgtcaacaattaggtgcttctcttccattgatgaaacaattgtggcaacaaaccattaagcaaaagatagagaatcaggcagctgtgttgaaaaaatgtgcaggggaagaaataagatgcatgaaagcatgggctgctgatgtgaagagtggggattctgataatctggaagctcgggctgcagcttactattggaaaaacctatttaaaatagatggtttcacgagagatagagagggcattccacctaataatttgttgaattatggggtatgcgatattgcgtgctgttgtggcacgtgggttggtatcgagtggacttttgcctacgttaggcattcatcatcataatcgttataatgcgtattgcttggctgatgatataatggaaccttatcgtccgtatgtggatgaactggtttgtgatattatgaaaaaaggaggagattatgggatgttgacaaaggaactgaaaggacagcttttgacgattccgtcgttagatgttattatttcaggtaagcgtagtccgctaatgatagcagtgggacaaacaacagcttctctttataaatgttttaatggagagttgcgtaaaataacatatccggaaatgtaatggaccgttttagtgaatatcgcattatgtgggtactggtgttatttgatttgcctactgataccaagaaggataagaaggcgtatgcagacttccggaagaacctgcagaaggatggatttactatgtttcagttttccatctacgtacgacattgtgccagcagtgaaaatgcagatgtgcacataaaaagagttaaatctttcttaccggagtttggacaggtgggaattatatgtattacggacaaacaatttggtaatattgagctcttttatgggaaaaaagttcaagatgtgaatacaccggggcaacagttggagttattctaaaagtaaaaatcccacttgttggtgggatttttagtggaaaactgtttgctttttgtgattcaaattgattgtttaaccatttgattattagattataatgaatagtctactgtttccaatggttcaaagatactaaaatgaaagcaaatcacaaccaaccagcaagaacttattgacaagtataaactgtttccaatggttcaaagatactaaaatgaaagcaaatcacaacgtccttttccccgttcttccgcaaaatatactgtttccaatggttcaaagatactaaaatgaaagcaaatcacaacgagggagcgctgacgtaggtaccggtattaactgtttccaatggttcaaagatactaaaatgaaagcaaatcacaactctgtgaggtaattaccatcaagcaacacactgtttccaatggttcaaagatactaaaatgaaagcaaatcacaacagtttctgcaggacggtctgaattctttccactgtttccaatggttcaaagatactaaaatgaaagcaaatcacaacgtgtgtgcgtgtctgtgtgtatttgttttccaaag

SEQ ID NO: 2475 - DNA, 6593 bp, synthetic construct
  source 1..6593: mol_type = other DNA
  misc_feature 1..6593: note = Synthetic
aatcagtaaattataggtggtttaaggagagaccaactaaccctagcacctccagctcccgaatctgtcacgctgagcctgtcgaagcatctcaaccacgccttgaatgttttagctaataaattttttattttattataattgaaactcgtgaaacattgagcaatagaaaataaaaatgccccgaagatagtcgaggcgctaaatgtttttagaaaaaatagagttatatgaatattttttaaaaactttctataaagtccataaatttatctatctttgacaagattaatcttcaaagatacagtttttggactttgtagagttgtgaattgctttcacttaagaatgataacctctagattaagagatggattaaatgaaaaatcccttaatgctccaacattaaaggattgtacttagatttaattgttaaccttaaaattaacccaatgaaaggtaaattaatttgcttcaggtctttcaaacattggagaagcaaaaagatagttcatctgtctaagccattttgtttttattgtaaaaaatgcaaataaaatcaattaataattcggcagtctttgactgtcgaattttatttctgcaaatatattaaaaagttaaataagaaaaatagttgcgaaatattgaaataaaaatgccccgaagatagtcgaggcgctaaatgttctcacaacggaataatccttattgtgaattgctttcggtttcaaagataaagaatatttattttctacaattacggaaaaccgtaaacatgatattttttttcttattaaatttaaagaatctatgtaaaactaataattatgactaaaaatatacttggattggacttgggaaccacaagcatcggattcgctcatgtcatcgaaggagattctcccgaacaatcttccattaaaaaaattggagttcgtgtaaatcctttaacaacagatgaacaaacaaatttcgaaaaaggaaagtcggtttctgtaaacgctgacagaacgctgaaacgcggagcaaggcgaaatctcgaccgttaccaagacagaagaaaagatttgatagatgctttattgaaagccaatattattacaaacgatactgttttagccgaaaacggaaaaaatacaacacattcaacctattctttcagagctaaatctgcggtagaaaaaattgagaaagaagaattggcaagagtttttttagctatcaataaaaaaagagggtataaaagcagccggaaagctaaaaatgaggacgaaggtcaaatcgtcgatggaatggcagttgcgaaaagattgtacgaagaaaatcttactcctggtcaattggcatatcagttattaaaagacgggaaaaagtatctgcctgatttttatcgttcagatttgcagtcggaatttgataaggtctggaattttcagaaacaattttatactgaaattttgacggatgagttttataaagaattaaaaggaaaaggacagcgtgcaacttctgcaatgttctggtcaaaatatggtttcaattctgccgaaaataaagcaaaatcgagagaagaaaaaaaactacaagcctatttgtggagaagtgaagcggttgataaacaattagaaaaagaggaagtggcttttgtgattactgaaatcaataataatctcaataattccagcggatatttgggtgcaattagtgacagaagcaaagaactgtattttaacaatcaaacggttgggcaatatctatatgagcaattaaaggaaaatccgcatacaagattaaaaaatcaggttttttatcgtcaggattatttggatgaatttgagaaaatctgggaaacacaaacgaaatttcattcggaattaacagaaaaactaaagaaggaaatcagggatattatcattttttatcagcgaaaactaaaatctcagaaaggtttagtcagtttttgtgaatttgaaagccaggaaaaaatcatcaacggacacaagaaaacgataggcttaaaagcggcaccgaaatcttcgcctctatttcaggaatttaaaatctggcaggttttgaataatgttttagtcagaaaaaaaggaagtaaaaaaagagttgcaaaagaaacttcgccaactttatttgacgaagagaagcaaatttttgttttcgatctggagactaaacagaaattatttgatgaattaaatataaaaggaaatcttaaatcagcaaaaattattgaacttttaggctataaacctatagattgggaaatgaactattccgaattggaagggaacagaacgaacaaagttttgtatgatgcctatctgaaaattctggaattcgaaggctatgatgaagatttattgaaacttcaggggaaagatgatattgatgtttctgaactgaaagcaccggcttcggaaatcaaagatatggtaaaacgcatttttgaagtactgaacatcaatactgaaattctcgaattcgatgcggaattagacggaaaggagttcgaaaagcagccttcttatcagctttggcatttgttgtattcttatcaggaagacgattccaaaacaggaaatgatacattgtttcgtcttttagaagaaaaatttggcttcaaaaaagaacattctcagattttggctaatgtggcgttttctgatgattacgggaatttgagtagtaaagcgatgcgaaaaatttatccacatattaaagaattatcgtatgataaagcctgtttacaggcagattataaacattccgcatcatctttaaccaaagaagaaatcgcaacccgtccgttaaaaaatcaattggaactgctcaagaaaaacagtctgagaaaccctgttgttgaaaaaattctgaatcagttggtcaatgttatcaatactattattgaaaccaatagcgaaaaagatgaagatggaaaaataattgagtattttaaatttgatgaaattcgggtagaattatctcgtgatttaaagaaaaatgcggaagagagaagagaaatgacgaccaatattaatgcgtcgaaaattgctcacgaaaagatttttaagctgcttcaaaatgaatttcacatcaaaaacccaacaagaaacgacataatccgttaccgtttgtatgaagaattaaaaaacaacggctacaaagatttgtattccaatacttatattcctagagagattttgttcagcaaacagattgatattgaccatcttattccgcaatcaaaaatgtttgatgacagtttttctaataaaacagtggtttttagaaaagataatctaaagaaaggaaacagaaccactttcgattatatctctgaagaatttggagaaaaaggtgttgaagatttcaaattaagaatcgaaatgctttttgagcagggaaagaaaaataaagaagaaggaatttccaaagctaaatatcaaaaattactaaaacaggagtccgaaatcggtgatggttttatcgaacgagatttgcgtgatagtcaatacatcgctaaaaaagcgagaaatattttgtatgaaatttgcagggttgtgacgccaactacaggaagtgttaccgccagattacgtgaagattgggatttagtcaatattatgcaggagctcaattttgaaaagtttaaagcgttaggattgaccgaaatggttgagaaaaaggatggaactttcaaagaaagaattgtgggctggagcaaaagaaacgaccatcgtcatcacgcaatggatgcgttgacggtggcttttacaaaacacagtcatattcaatacctcaattttcttaatgccagaaaaaatgtgcatcacaaagagcataatgcaattgtcgggattgaggataaagaaacgacttggaaatacgacgatgaagggaacaaaaaaagagttttcaaattacctgtaccaaattttagagaacaagccaaagaacatttggaaaacgttttagtttctcacaaagcgaaaaataaaattgttaccaaaaataagaataaaaccaaatctaaaaacggtgaaaaagccaaagttgaattaacaccaagagggcagctgcataaagaaaccgtttatgggaaataccaatattacgtcagtaaagaggaaaaagtaagtgggaaattcaatgaagaaacaatcaataaagtttcaaatccaatttatagaaaacttttatcgcaacgcttgtctgaaaatagaaacgacccgaaaaaagcattcgcaggaaaaaatgttttaagcaaaaatccaatttatctcaacgaagaaaaaacagaaactcttcctgaaattgtaaaattaacctggcttgaagaagattattccattaggaaggacatcacacctgagaattttaaagatttaaaaaccatcgaaaaaattttggacgaaggcgttaaaagaattttgctcaaccgtttaaaagactttgacggagatcctaaaaaagcatttgcagatttagagaaaaacccgatttggctcaatcaatcaaaagggatttctatcaaaagagtgacgatttccggggttaaaaacgctgagtttttgcattacaaaaaagaccatttaggaaacgaaattttagataaaaacggaaacaaaattccggtagattttgtaagtactggaaataatcatcacgttgcaatataccgagatgaaaaaggaaatttgcaagataaaattgtatcattgtttgatgctgttcagttggttaatgctggagaaccggtaattgataaatcatataatcaagggttaggatggcaatttttatttacaatgaaacaaaatgaatattttgtattcccaaatgaaacaggttttaatcctaaagaaatagatttattagattcaaaaaataaaaaactcattagtccaaatttatttagagttcagaaattatcgagggtagaatatggtaattatgccgtaagagaatatgtgttcaggcatcatttggaaacaagcgttgatgaaaagaaagaattaaaagaaatagcttttaagaatattaaaagtttaggctatttcgaaaatattatcaaagtccgcctcaatcatttgggcgatattgcaagtgttggagaatattaaaaataatcaacaatgatcacccgctccatctacatcggcaatcccgcctatctcaagctcaaagacgggcaaatgtatattctttgtccggaaactaaagagatgaaaggcaaagttcctgtggaagatttgggattgctgatgttggaccattcccagattaccatttcccatcagctcattcagaaaatgatggggaacaatgtggtagtcgtgagctgtgatgaccaccatttaccgcacgggataatgctgccattgtatgggcacaccgaacattctgaccgggtaaaagaccaattagaagccagcgaaccgctcaaaaaacaactctggaaacaaaccgtagaatgcaagattgaaaatcaaaaagaagttctcagaagattggggaattattacgaacatatgattgaatatcaaaaaaatgttaagtccggcgatatcaccaatatggaaggtattgcagcgcagcattactggaaatatctcatcagtctggatttcctcaggcagcgcttcggggattcacccaatcagtttttcaactttggatatgccgttcttaggagcattgtcgcaagggcaattgtagaaacaggattgctgcccgtgttagggatctttcataaaaataaatataatccttactgccttgcagatgatctgatggagccctaccgcccctttgtagatttattggtaatgcaatggctgaaaatcaatcctgataccgaagaattgactaaagaatttaaagcccacatcttgcaaatcgcaaccaaagatgtgctgatagacacgaaaacaagacctttgttagtagctgtaaaaatgacagcttcttcgctttacaaatgttacactggagaaaaacgattgatttcctatccggaactgatgtaatgaagggagcaacattatactctatacattttacaaataaaatatgaatgccgaaaggtttaatgcataccgaattatgtgggtcttagtgctatacgacttaccgacagagaccaaagccaatatgaaggatgccagccgctttcgtaaaggtttgatggatgatggttttaccttgtttcagttttcgatgtatgtacggcattgcccgagccgtgaaaatgctgaggtccatatcaagcgtgtcaagtttatgcttcccaaagccgggaaagtggctataatgtgcatcaccgacaaacagtttggtgatatagaaattttctttgcaaggaacagagaagaaccaccaccaactttccagcagctggaacttttttagtaaccgcgtcactgcgaggaacgaagcagtttcatcatcagaaaatgaaaatcaaagtcatatttaaatactaatatcaaaaagagatatttttacaattctaaaacaacaacaaaccctctgaaaaacagatggttaaactttgagggttgtgttgtatctcaaag

SEQ ID NO: 2476 - DNA, 6518 bp, synthetic construct
  misc_feature 1..6518: note = Synthetic
  source 1..6518: mol_type = other DNA
atgtatacacagcatatcacaacctttggcacgtagaacgggctttccgtatagccaaatcaaagatagagatacgacccatgtttcactttacacgcaaacgcatcgaggctcatatatgcatctgctttgtggctttgaaagtatacaaggaattggagcgcatgctgaaagtctcagagattaaaatgagcgtagacaaggtgcttgcattggctaagacaatcacaaccatacaaattaagctacctttgaacaaggaggtttatacccaaacaatgctgatggcaagacatcagaaaatagcaaaactctttgacgaagatttttgggtgacacgatgacgaagtcaggaaaaagcccaccgttaaggacgatgggcgaacctaatgttttcacaacggaataatccttattgtgatttgctcagatttatatggcaaagatacataaaagaagattatcaaccaaacattttaatagaaatgtttgtctaatcgtttttttatgtatatatttgccaatagcattttatttttagatatttaataacctaaacctttaatatagcaataaatcatgaagaaaatattaggccttgatttaggaacgacaagtataggttgggctcttgtcaaggaagcagaaatcgaagaagagaaatcgtcaattataaaactcggtgtacgtgtaaatcctttgacggtagacgaacaatcgaactttgaaaaaggcaaagccattacaacaaatgcagaccgcactcttaaacgtacggcacgacgtaatttgcagcgttacaaattgcgccgtgagaatctgttgtctgtattaaaagagaatggctttattgccgacgactccgttctatgtgaacaaggaaaccgaacaactttcgagacccgtttactaagatctaaagccgctacagagaaaatctcgttagatgaacttgcacgtgtgctcataatgattaacaagaagcgtggttataaaagtagtcgaaaagttaattctggtgaagaaggcagtcttattgatggtatggctgttgctcgaaaactctatgacgagcaccttacaccaggacaatatgtctatcagctgctatgtagaggaaagaaatatattcccgacttttatccttcagacctaaatgcagagtttgaagcggtgtggaattgccagaagcagttctatgcagatatattcacggatgaattgcgtgaagctttgcgtagcaagaacgaaaagcagacatgggcaatatgtgcagaacctttaggtctgaaaggcatcaagcgcaacggaagtactgcagatcagcgtgtagagaattatcgttggcgtacagaagctatcagcaaacagatgccacttgagcaagttgctgttgtgcttcagaagataaatagtcagattgcaggaacaagcggataccttggcgcaataagcgaccgtagcaaggagttgtacttcaatcatcagactgtcggacaatttcagatgaagcaattgagcgataatccgaatataagtctgaagaatcaggcgttctatcgtcaggattatctcgatgaatttgaacgtatctgggagacgcaagccaagtatcacagccagcttactgcagaactgaagcatgaattgcgcgatattgttattttctatcagcgtcctttgaaatcgcagaagggacttataagctattgtgagtttgagagcagacagaaagaaatggttgtagacggcaagaagaaaaccataacaatcggtttgcgcgtttgtccgaagtcatctccgttgttccagtgttttaaaatttggcagacgataaacaatctgcaagttacgggagaggttgtccccaaggcacaactcgacctttttggtgacacaaccgaatgtgagcacggaacacgcacgctaacagaagaagagaagtgcgacttgtatcgtgaactgagcataaaagagagtctctctgaaactgagattttaaagttgttgtttggcagcaagaaaggattgagccttaacttccgcaaagttgaaggcaatcgaacaatggctttatttgtcagggcttgccagaccgtgcttgctatcaacggatacaacgattacgatttctcaaagatgtcttatgacaaggcaatgccaatcattacacaagtatttgaagctttaggtttcaacacaagtttcttgacattcgacccaactcttgatggcaaggactttgagcgccaggctgcttatcagctttggcatttattgtactcgtattcaggcgacaattcggcaaccggcaacaaaaagcttattgaaagactctgcgccattcttaatatggacagagattcggctgccgtatttgcatcgataactttcgagcctgactatggtagtcttagtgctaaggctatgcgtaggatattgcctcacatgatggacgggttggaatatagtgtggcttgcgagtatgctggctatcgtcactctcgccgttcgctcacaaaagaagagatagctgcaaagcctctcgttgagaccattccactgctgccacgcaacagtttgcgcaaccccgtggtggagaagattctcaaccaaatgataaatgtggtgaatgcagtcagcaacagatacggcaagcccgacgagatacgtattgagatggctcgcgaactaaagaagaatgctaaggaacgcgagcagatgacgcgcgacatagcacgggcaaatgctgaaaacgagaaataccgaaagattttgcaggagaagttcaacaaaccgaatgtgagtcgtaacgatatcatacgttatcgtctatatctcgaacttgaggcaaacggcttcaagaccttgtatactcagacatatataccacgcgagaaacttttcagcaaggaatttgacatcgagcacataataccacaggctcgtctgtttgacgactcgttctctaataagactcttgaggcacgcagtgcgaatattgagaaaggcagcacgactgcctacgactatgtgcttacaaaatacggtgagcaaggggacaatggctccgttaaatacaaggaacgcatagacagtctttataaggagggtgtgataagcaagacaaagcacgataagctgctgatgaccacagcagaaatacctaacggctttatcaaccgcgacttgcgcgacacacaatatattgcacgtaaagcacgcgagatattggagagtgcggtacgtgtggtagtcccgacaactggtgctgtaaccgaccgattgcgtgaagactggcagcttgtagatgttatgaaagagctcaactgggacaaatacgaccagctcggactaacagaaatctataaagaccctgacggacgccagatacgacgcataaaggattggaccaagcgcaacgaccatcgccatcatgccatggatgcgcttacgatagccttcacacgtcatagcttcatacagtatctgaacaatctgaatgcccgtagcgacaaggcaggcagtatatatgctatagagaaaaaagaactataccgcgacaacaacaataagttgcgctttgtccctcccatgccgcttggtgagttcagagccgaggctcgtcgccatttgaaagatgtgttcgtgtctataaaggctaaaaacaaagtcgtaacacgcaatgtaaacatcactcgtggtgctgacggcaagaagcatcgtacagtgcagcttaccccgcgctgtcagctacacaacgaaactatatacggtagtcgacgccgatacgtagtgaagcaagaaaaagtgagcagcgcatttaacgaggaaaaaatcagcactataggcaatccacagatacgagaagcattgttacgtcggctttctgaatttggcggcgatgcaaagaaagcattcaccggcaagaacagtcttgaaaaaatcctatctatctcgatgatagccacacgaagcaagtgcctcagaaggttaaaacggtaacgttagaagaggtgtttacaatccgtaagccgatagacaaagacctcaatgtagagaaagttgtagacctgcgtgtacgaaagcttcttcaagaacgcctcgcagaatatggaggtgacgccaagaaagcgtttgcaaaccttgacgagaacccgatatggctcaatcgcgaacgtggaattgccattaagcgtgtaacgatatacggcgtaagcaacgctactgcattacacgacaagcgagacatgcatggaaagaagatgcttaatagtaatggcatatccataccggtagactatgtgagcaccagcaacaaccatcatgtagctatattccgagacaaagatggcaatctgcaggagcatgtagtatccttctttgaggcaacggaacgggcacaacagcagttgccgattgtcgactacgaatacaacaagcatcttggatggcagttcttgtttacaatgaagcgcaacgaatacttcgtgttcccgaacgagaagacaggtttcgacccgaacgaggttgacttgcttgacccaaaaaatgctgaggagataagcaagaacctgtttagagtgcagaaattagctactaagaattattgtttcagacatcatttggaaacttcatcagaaactccgaaagagttgtcgggtattacatacaagtggcaacttggcctaaaaggtattgttggcatcgtgaaggtccgtgtcaaccaccttggagaaattgttgcagtgggcgaatactaactgcattgtcacgctaaacgaacagagcatagcaaacatggttttgtttctgttcgtttggcgagactataatctatacaatactaacaataaactaacaccctatgattaagaagactctttattttggcaacccagcgtatctttcattacgaatggggcaaatggtcataaaactgccagaagtggaaaccgacagcaatttgcccgaccaaataaaaaaacaggcagaaataacaaagcccatagaagatattggagtcgttgtgcttgacaaccgacgcatcacaatcactcaagggctacttgagtctctgctcgaaaacaactgtgccgtcatcacctgcgattcgcatagtctgcccgtaggtcttatgcttccactttatggcaactccacacaaaacgagcgtttccgtgaccagttggatgcttctcagccattgaagaaacaactttggcagcagacgataaaaatgaaaatcagcaatcaggctgctgcccttgctacatgcactggcaaaaactcaccaacaatgctacgttgggctgacgatgtgcgcagtggagatcctgataatgtcgaagggcgtgccgcagcatattattggaagaacctatttgccggtattgatggtttggaagactttacgcgaagtagagaaggcgaagcaccaaacaatctactgaattacggatatgccatactgcgtgctattgttgcacgtgcattggtgtcaagcggaatgttaccgaccctcggcatccaccaccataatcgctataacgcctattgcctcgctgacgatattatggaaccctatcgtccttatgtagacgaactcgtatactctatagtaaaagacaaggggataaacaatctcgacttgtctaaagagataaaagccctgttgctctcaatacctacattagatgtcgtgattggtggcaagcgcagcccgctaatggtggctgttacccaaaccacagcatctctatacaaatgctttacgggtgaattgcgacgcatcgcataccctgtacgctaaactaaactatattttgcaatgaatcgttttagtgaatatcgagttatgtggatacttgttttttttgatttgccaacagaaacaaagaaagacataaaagaatacaccatgttcagaaagcggttgcaacaagatggcttcaccatgtttcagttctccatttatgtacgccattgcgcaagtatggagaatgcagaagtccacatgaagcgtgtcaactcttttcttcctgaatatggaaaggtcggaataatgtgcatcactgacaagcagtttggaaacattaagcttttttatgggaagaagccacaaactccgaatgctccaggtcaacaattagagcttttctaactatcgttctttgttaaaaataccaagcgtcatattaaatagaaaaagaggtcttcttaaaatttgaagaagacctctttctaacaccaactttttataattctaagaactatgctaattcgcttatttacaagtaaatgcgcattctatgttggtgattctaccgcaaaggtagttaattctgagcaaatcacaacaatagttgaatattccataagtatataatgttggtgattctaccgcaaaggtagttaattctgagcaaatcacaacaatagttgaatattccataagtatataatgttggtgattctaccgcaaaggtagttaattctgagcaaatcacaacaatagt

SEQ ID NO: 2477 - DNA, 6452 bp, synthetic construct
  source 1..6452: mol_type = other DNA
  misc_feature 1..6452: note = Synthetic
ataaaaacagagctacaaatttcagtctttgagcgcttgttcgagattatcgataatctttttgttgactttgcgcgggtttttggctttaaattttttgagcgcttccagagtcaatttaccgtattggtaaaggccttccgggtttttatcaaagtcgtagctgccgatgcagtagtcgagcttggctcgcaggtcggcatgggcggccaggttaagtttggccatcgcttctgaagcgtcggcacatgcatttctaaggttttcactgttcataatagcgttttttttaagatttgattttcaggggcaaagatagcctaaaaataaaaatgcaaaatttggtgtattaagaatttcttaagaaaaacttcctacttttatcccgtcaaaaaaaagcgacctttttaggggccgctttcaatgttttcacaacggaataatccttattgtgaattgcttcagattgtgattgcaaaaatagaaaattattaacaactaaaataaaatagtgatgaaaaaaattttaggattggatttgggaaccacctcaataggatgggcattggttaatgaagcggagacagacaatgaacagtcatcgattatcaaacttggagtacgtatttctcagttggataattttgaaaaggttgataaaactggtaaagttacagaatcaaaaaatcctattgaagactttgcaagtggtaaggggttatcaccgaatgcaggacgaacccaaaagagaggcgcacgcagaaacctgcaacggtacaaactacgcagaaggaatttaattgacgttttgacaaatcatggaataatcaattctgaatctgttttgacagaagatggggaaaacacaacatttgaaaccttagccttaagatctaaagcagcaaaggaaaaaattcaaaaagatcagctcgcacgagttttaatttcgataaataaaaaacgtggatacaaaagtagtcgtaaagctcacaatgaagatgaaggacaagctattgatgggatggcagtagcaataaaactttatgaggaaagaataaccccaggttgctattgttatcaactactccagaaagggcgaaagattatgcctgatttttatcgttcggatttgataaatgaatttgatagagtttggaattttcaaaagcaacattattctgatattctcgatgacgaattgtacaaagcgattgaagggcaagggcaacaaaacacaaggaaacgttttttggcaattaaagggatttatactgcagaaaacaaagggaagaagaaagataaaacattgaatgcctatttgtggagaagtaaggctatttctgaacggcttgaaattgatcagcttgcttttgtactggcagaaatcaataataacttaaatagtacaagtggatatctcggagcgattagtgatcggagtaaaatcttgtatttaagtaaacagacagtaggagagtatctttatgagcaaatttcaaaagaccgacatacacgtctgaaaggacaagcattttaccggcaggattattttgacgaatttgagcaaatatgggaaactcaaaagttgtttcatcctgagttaagtgataagttaaaagatgaattgcgtgatattataattttttaccagagacggcttaaatcacaaaaacggcttattagttattgtgaatttgaaagcaaaccatggattgaagtaattgatggtaagaacaaagttaaaattacaggatccagagtgagtccaagatcatcaccactctttcaggaattcaaaatttggcaaaatctgtcgaatctcgaatttaaaaacaaaaaaacaaaacatattgaaaagtttgtagaacatgacattgagacaaaacagttgctgtttaatgaattgaatatcaaaggtaatctaaaaaagaatgatgtcctgaggctatttgaactaaatccgaacgaatggactatgaattatctggaattgcaaggcaatacaactaacaaaatattctatgaagcattccaaaaaattgttttccatgaagggcatgagattgatttcagtaaatcaactgccaatgaaattaaagaatcaatcagtgccatatttgaaatgttaggaataaacactgacatcttattttttaatgcggaaaaggaagggactgaatttgaaaaacaaaaaagctttcagctttggcacttgctctattcttacgaagctgataattcaaaatccgggaacgaagcaatttataaagctttgaatgcgaaatttggcttgaaaaaggagcatgcacaatatttaataaatttaaatttccaagatgactatgggagtttaagcactaaagcaattcggaaaatactcccttttatcaaggacagcaattatagcaaagcttgtgaacttgccggctataatcattcacattctgttacaaaggaggaaaatgaaaaaagaatattaaaagaccgggtaaaaattatacctaaaaatagtctgcgcaatcccgtcgtcgaaaagatattaaaccaaatggttaatgttgttaattccattctggataattctgaacttggaaagcctgatgaaataaggattgagctggcacgtgagcttaagaaatcagcaaaagagcgagcggaaatgactcaaaatattaatagtgcaaaagcattacacgatgagtaccgtaatattttgatggaggatttttacatccttaacccaaccagaaaagatattattcgatacaaactttatttagagctaaaagctaatggatttaaaaccctctattctgaccaatacatttctcaggaaaaattattttcaaaagaaattgacatcgaacatataattccaaagacacgtctttttgatgatagcttttcaaataaaacattagaatttcgacacatcaacatcgataaaggaaatgaaacagcatttgatttcatgaaaaattcctttggcatggacaaattgaatttgtacaaaaccagaattgaaaggctctacaaggaaggcgttttaagtaaggcaaaatacaagaaactgctaatggaaggtcgtgatatcggggaaggatttattgagcgagaccttcgcgaaagccaatacatcgctaaaaaagcaaaagaaatgctacttgaggttttccggaatgttgtttcaacaactggtagtattacagataccttgcgcgaagattggggtctcataaatactttgcaggagctgaatattgataaatatcgcgcattggggttaaccaaatttgaagaaagaaaggatggtcacgtagtagaaaaaattattgattggacaaaacgtaatgatcatcgccaccatgcaatggatgccttaaccgttgcattcacaaagcatagccacattcaatatctaaacaacctaaatgcacgaagaaacacagaagataaaaaacacaagattatcatagccatagaaaacaaggaagtgatgagggatgaaaataacaagcggaaatttaagcctccaattccaaactttagattggaggcaaaaagagagcttgaaaaaattttgatttcccacaaggcaaaaaacaaagtagttacactaaataaatataaaatacagggtcatccagaacctcagtcttccctaactcctcgtgggcaattacataaagaaactgtttatgggaaatcgaagtattacgaaagtaaaatggtaaaggtgggcactagtttgaatttgacaatgataaatcaggttgcaaatcctaagtttagagaggccatactaagaaggtttgcggaaaatgctaatgatactgtgaaagcatttggcggaaaaaacagccctatgaaaaatccgatattcacaattgataacaaaccactaccggaaaaagtgaaagtggtttggatggcggatcgttacactatccaaaaagacgttgccccagatttaaaacttgataaagttgtggataaagggatccaaaggattttacaaagacggctcgaggaatatggtaataaccctaaggaagcttttgtaaacctcaatgagaatccaatttggctaaataaagaaagcggcattgcaattaaaagagtgaccattagaggagtaagtaatgcagaggcgctgcataccaagaaagatcattttggaaatgaaatcctggataaaaatggcaaaccgctacctgttgactttgtgagtacgggcaataatcatcatgtggccatttataaagatgaaaatggcaaacttcaggatgaggtagtttctttttatgaagcagttgctcgcgtacaacaaggcttgccaataattaaaaaacaacatgaattgggatgggaatttcaatttaccatgaagcaaaacgaaatgtttgttttccccacagatgattttgacccttccgaaattgatttacttaatcctgaaaacaacagattgattagctctcatttgtttagagttcaaaagttctcaaaagctgaatacggtaataatgctgtacgagattatgtctttcgacatcatcttgaaacagagttaatagataaaaaagaaacgagagaaataacttataaagttgccaaaagcttaccgaaactggaaggaatcataaaggttagaatcaatcatattggacaaatcgttggcattggtgaatactaaagtgaccgaaatgatcaaaagaaccctctatttcggcaacccgtgctacctgagaaaaaagcaggatcagttggtggtttcgtttcctgacgaaggattggaatcaaaatcagttcccatcgaagatattggcatcgttattctcgacaatccacaaatcaccatcacacagggtttgcttgcggcagtttccgaaaacaatgccgtgattatcaactgcgatgcaaggcatttgccctttgccttgatgctgccaatggcttcacattcggcatacaccgaaaagctgcgttaccaattagagtcgtcggtgcccttgcgcaaaaatctgtggcagcaaaccgtttcggcaaaaataaaaaaccaggctgctttgcttcaaagctgtggaatggaaaccgaaaatatgctctattgggcgcggcaggtaaaaagtggtgacccagaaaatatggaagcacgcgctgccgcattttattggagtaagtacctcgaaggttttaaacggcaccgttttggagagccacccaataatctgctcaactatggctatgctattttgcgtgccgtggttgcgcggtcgctggttgccagtggcatgctgcccgctttgggtattcatcaccgcaacaaatacaatccctattgtctggccgatgatatcatggaacctttccggccgtgggttgacaagttggtgatggaaatttgcgaagaacatgaggatatcgaagagttgacgcccgatctgaagcgggcattgctttccatcccggttttggatatttttatcgacaaccaaaaaagcccgttgatggtgggtgtgcagcgcactactgcctcgctgatgcaatgctttgaggggacaatacgaaaaatcgtttttcctgaatttgagataactacatgaccggattagaaagtttaaatcaatatcgaattttgtgggtatttgtcttttacgatttgccaaccgatactaaaaaagaccggaaagatattgcacttttccgaaaacgcttgcagcacgatggttttgcaatgctgcaatattccatttacatccgccattgcaacagccgcgaaaatgcggaagttcatatcaatcgtgttaaaagcatgttgccgcccaggggcgaggtcattatttttacgctcaccgataagcaatttgggatgatggaatttttccggtcggccaaaacttccaaaaagccgggaactccgcagcaactggagctgttttaaaaacaaaaaaaccagaactccaaaggagtactggttttatttgattgaatttttcttttgaaatattgcgcttaacgtattgaaaacatgtcggttaaagccgggtctgctgttttcaacatttcaaagatacaatctgaaagcaattcacaactttttgtcgcttacatcccaccggcgaaaagctgttttcaacatttcaaagatacaatctgaaagcaattcacaaccagattatcgtttccaactccgggaatttgctgttttcaacatttcaaagatacaatctgaaagcaattcacaactgtggataaggcggtggctgcaactatgcgctgttttcaacatttcaaagatacaatctgaaagcaattcacaactgtgattgtttcgccttgaattatcaaagtgctgttttcaacatttcaaagatacaatctgaaagcaattcacaaccagttgagccggttgtggttacgatccacggctgttttcaacatttcaaaga

SEQ ID NO: 2478 - DNA, 6442 bp, synthetic construct
  source 1..6442: mol_type = other DNA
  misc_feature 1..6442: note = Synthetic
agagtatacaatgttagagattaattgataacatatgtagtggctgtttaaaaaaaagaaggcgacttgcgccgccttaaatgttttcacaacggaataatccttattgtgaattgctttcagattagcaataatataaactcaaaaaataaaaaagtcaaatatttttaaagcttttatgaaaatgacaaattatgtcataaatatgaatttattttaaataaaatccgtaaatgggtgatttttttgaggctaaataaaaaagctatatgggtttagaaaggactattgaatagttttttatttaaattcattgtgatttaactaggagttttcatgaaaaaaatacttggacttgatttggggacaaatagcattggctgggctgtggtgaatgaagctgaaaaagagggtgagaaatcttcaataatgaagttgggggtgcgtgtaaatccattaacagttgatgaaaaaagtaattttgaaaaaggtaaaagtataacgaccaatgcagatcgtacgcttaaaagaagtgcacgtcgaaatctccaacgatataaattacgtcgagaaaatctcattgaaatattaaaggaaaataagtttatttcggatgattctattctttctgaatatggtaataaaactacatttgaaacgtaccgattgagagcaaaagcggcaaaaaatgaagtatcattagaagaattggctcgtgtgcttttaatgattaataagaaacgtggctataaaagcagtagaaaggcaaaatctaatgatgaaggccagttgatcgacgggatggatgtcgctaaaaaattgtatgaaaaagacttaactccagggcaatatgtttttgatttattaaaatcggggaaaaagtatactcctgatttttacagatcggatttagaagccgaatttgatagagtttttgataagcagatgtcgttttatcctgaatttctttcattggaattgaaagaagaattacgtggaaaaaagcgcgatgctgtttgggctatatgtgcaaaacactttaaagaaaaaggatatgatcttgttggtgtaaaaaaacaaaaggcagcagagcaaaaaatagagaattatagttggcgagcaaaggcactctccgaaaaaatggatttggaacaatttgtcattattattcagcaaattaatattgaactgaataaatctagtggttatttaggagccattagtgatcgaagtaaagagttgttttttaatcaccaaacggtaggtgaatatttaatggcaggtttgtcaaaagatcctcactatagtttaagaaataaagtcttttatcggcaggattatttagacgaatttgaaacaatatggcaaattcaagctaaataccacaaagaactaacttcagaattaaaaaaagaattacgtgatgtgattattttttaccaaagacccttaaaatctcaaaaaggcttaattagtttttgtgaatttgaaaatcgaaaaattgaagtagaaatagaaggggtaaagaaaataaaaacagtagggctacgtgtatgtccaaaatcttctcctgtttttcaagaatttagaatttggcaaaatcttaacaatttacgtgtaattaataaaaatacaaatgaatcattccctatagatgaagaatgtaaaaaagtcctttttgctgaactcaatttaaaagaaaaactttcaaaaacagaagtgttaaaacttctaaatacccctaaaaatcatgatttgaactataaagaagttgaaggaaatcgaacacaagcaaagctttttaaggaatatgaacgcattattgaaatgactggccatggtgaacccgatttttcaaaaatgaaagcgtcaaaaataatagaaatgacaacatcagtttttgaagctcttggatataaaacagattttttagcgtttaattctcatttagaggggaaagaatttgaaaaacagccttattatgctttatggcatttactttattcttttgaaggtgatgattctaaaacaggaaacgaaaaattaattcaaaaaatttctgatttatgtggttttgaaaaaaactatgcttcaatgcttgcgggagtaacttttgaagatgattatggaagtttaagtacaaaagcgattcgaaagatattgcctcatttaaaagatggcttggaatatagtgttgcttgtgaatatgctggttatcgccattctaagcgttccttaactaaagaagaactagaaaagaaagagtataaagataagttgaatcttttacctcgtaatagcttgcgtaatcctgtggtagaaaaaatattgaatcagatgataaatgtggtaaatacagttgtagatacttatggaaaaccagatgaaattcgtattgaattagctcgtgaattaaagaaaagtgcaaaagaacgcgaagaaatgactaagaacatttctaaaacaacggctgatcatgaaggctatcgcaaaattttacaagaaaaatttggccttataaatccaagtaggaatgaccttgttcgttataaattgtatttagaattaagtgaaaatggttataaaacactatattctaatacttatattcctcaagaaaagttgtttagtaaagaatttgacattgaacacattattccccaagcaaaaatctttgacgattctttttcaaataaaactattgaagtgcgtcaagtcaatattgagaaaagcaacagtactgcttatgattttgttaaagaaaaatacggcgaagaggaagcaattgcttatactaatcgtattgaagaccttttaaaaaaaggcgttttatcgaaaacaaagtacagaaaacttttaatgaaagagtcagaaatcccaagtggctttattgaacgtgatttacgtgattctcagtatattgctaaaaaagcacgtgaaatattagaagatttagtgaaatttgttgtacctacaacaggttccattaccgatcgtttaagagaagattggcagttaatagatgtaatgcaagaattaaattgggataaatatgagaaattagggttaactgaagtttataaagataaagatgggcgttccattcgtcgtattaaagattggacaaagcgaaatgaccatcgccatcatgccatggatgctcttacgattgcttttacaaaacgtagctttattcaatatttaaataacttaaatgctcgaattggaaaatcggttgatgaaaacattgatttggctaactatgatttacgaaatattaatcctaaagacagaacaagtgttatttatgcaatagaaaaattagaactatatcgtgatcgaaatggtcatttacgatttaatcctcctattcctttggatgaatttagagcagaagctaagcagcaattagaaaacactttaatttcaattaaagctaaaaataaagtcgtaacaagaaatatcaatattactaaaggtaaaaatggaagtttaaacaaaaaaatccaattaacaccacgagggcaattgcataatgaaaccatttatggttctatgcaaaggcctgtttctaaagaagaaaaagtggactcaaagttcaccatagaaaaaatagctacggttacaagtccaaaatatagagatgctttattggctcgtttatctcaatttgagggggattctaaaaaagcatttacaggaaagaatagtttagaaaaaaatcctatctatttaaacgaattgcatacagaacaagtgcccttaaaagtgaaaacaatgacttatgaaacgatctatacaattcgtaaagcagttgctcctgatttaagtttagaaaaagtaatagatgaaaacattcgtaaggttttagaaaaacgtttaatagaatatggtaatgaccccaaaaaagcctttgtgaatttagacgaaaaaccaatttggctaaatgaagaaaaaggaatagctattaaacgagtaaccatcacaggcgtaagtaatgcgattgctttacacaagaagagtgatcaaaatggtaagtcacaacctgttgattttgtaagcacagctaataatcaccatgtagccatttatcgtgataaagatggcaatttacaagaaaatgtgatttcattctttgaggccacaacacgagtaaacttaggccttccgattattgataaggattacagaagcgcagacggctggacattcttatttactatgaaacaaaacgaatattttgtgtttcctaataaagaaacaggatttgatccaaatgaaattgatttactagatccaaataattattcgttgattagtccgaatttgtttcgggtgcaaaaatttactattaaagattatgtctttcgtcatcatttagaaacaatgattgatgataaaaataatttgaaaggaataacttggaagcgaggtggtttatctagtattactgagattgtaaaagttcgtacaaatcatattggtcaaattgtatccgttggagaatattaaaagaattatgagcaaaagtaatttattgaatactcctcataagaacaaagaggattaaatgtagatataggctcttatgattaaacgaacactctattttggaaatcccacatacctgtcattaaaagatgaacagttatctattcgattaccacaaacagagagttataaaacaattccaatagaagacattggttttgttatattagataaccgccaaataacaattactcaagggctcttagatcgcttactcgaaaataattgtgccgtgattacttgcgataaatctcatttacccacagggttaatgctaccgctttctggaaatacaatacagacggaacgattccgtgctcaaattgaggcctctttacctctaaaaaaacaactctggcaacaaacaatccaacaaaaaatattgaatcaagccaaagtactacaacaagaacgtagtaatgacgcaaaaaacatggttgcatgggcttcttctgttaaaagtggagatgcagataatagagaagcggtagcagcagtctattattggaaagaattgttccctgatatagacgattttactcgagatcgttatggagttcctccaaataacttattgaattatggctatgctatattacgtgccattgtagctcgtgccttagtttcaagtggattaatgcctactttagggattcatcatcataatcgctataatgcatattgccttgctgatgatattatggaaccttacaggcctattgtagataaattaattgtatctattttagataaatcagaagaatatccaaataatctatctgtagaattaaaaacacagttacttcaaattcctgttttagatgttaaaattgatggcatacgtcgccctttaatgaatgcggtagcgacaacaacagcatcactttataaatgttttgcaggggagtcacgtcgtttgctttatccagaggtataggatggagcgttttagtgagtatcgaattatgtgggtgctggtattttttgatttacctacagaaacgaaaatagaacggcgtcgtcatagtcaattccgaaaaaatttgttaaaagatgggtttactcgttttcaactatccatttacattcgtcattgtgctagtgttgaaaatgcaaaagtccatattcaaagaataaaaggctttatgcctcccaaagggacggtcagtattctttgtataacagacaaacaatttggtaaaattgaggttttttatggtagaaaagaacatcctccaccgcctatttcgcctcaattagaaatgttttagaatctaaaatctggagaaaaacaaaaaaaatcggccttataagggtcgattttttttataagtaagacaatagctaagtcattgccattattctaattacagtagatcagttgtaatcactgattctataatagaaaaatctgaaagcaattcacaactgctccgtctacgtcctctccacaagctgagttgtaatcactgattctataatagaaaaatctgaaagcaattcacaacgaacgagctgtcgctgatgctgatgtcacagttgtaatcactgattctataatagaaaaatctgaaagcaattcacaacggttgatgttcagcaaactttaagagatatgttgtaatcactgattctataatagaaaaatctgaaagcaattcacaacttatttcgccttccatatactccaaagtacgttgtaatcactgattctataatagaaaaatctgaaagcaattcacaacccttcagtggtggtcaaaaacttggcggtcgttgtaatcactgattctataatagaaaaatctgaaagcaattcacaacctgtatagttatcattgaagtataggtcttgttgtaatcactgattctataatagaaaaatctgaaa

SEQ ID NO: 2479 - DNA, 6361 bp, synthetic construct
  source 1..6361: mol_type = other DNA
  misc_feature 1..6361: note = Synthetic
cttttacacaaccggcagacgtacttatcggccaagaagattttgatgcatcaggccaaaatcaattcaggctctctcccgaagcaaatacacttaattggacgtatgacacctgtttttacaaagacggaattttagtaaatgacaccggaaatagccgtattttaggctttgaaaaacttccgataacaaataataaaaaagcagatttccttatcggaagaccaaattttaacaccggtagcgaatacaaagaaaatatgataggtacacaaagtgctatctattggccattttcaattaccactcacaaagacacattgtttatagcagataccggaaaccaccgattggtaatttgtaacttaaaaacttgaatagagccaatacaatcctatcacaatggcaaacaaaccaccggcaaacctgatgcctttaaaaaataccgaattgtgttcttgtttagtataagtagcaattttgccgagtaatagggcataggcagtcatggcaataacggtaccgatggcaaaaccggctacgtattgaaccccgccagagctgtttttaaaactcaaggccggcagcagtaataaaaaatgtgacacacctgccaatccgtgtaaaaaaccaatccctaaagaagacaacaaattttgtttgatggccttttgatgtgtgtgttggtgtgcgtcattatggtggtgttcgtgcttgtggatatgcacatacggctctttgtcagcatgtatatgcggatgctggtgtgtggcactttcgtggaatattctgtaaaaagcccaaataccaacgccaattaagacaatggcaaccaattgttcactatggttagaaatactttcaacaggaatatattctttgaatattaaaaataaaacgccaatcaataacattcctaaaagatggcctaatccccacataaaacccactttccaagcctttttttttgattctactaccaaaggggtaacggcagctaagtgatcgggccctgaaataacgtgtagcatagaggcgagggtaccggctaataacggaaaatgtatcatataggtttaggcttgtaaataagtttgccaatttcaaaaatagtaaaaactgcttagagaacacattaaaatttagattctatgtcaaaagtaatgggttaaatttataatatcaattttcaaaacacaaaatctagataactatcgcgattggttttttgaatattttattttcatacccactcaaatcaacatagagccaatttttattaagaaattccatgagttgacaggcctactttttttaaaaacaggaaaacccccctgttaaaaaggggaaaaaccccctagggtacattaatagttgttttgtaattttatatagccaatttgtaaatttcaaaattagtcaataaaaaaaactgaaaattatcgaggtattaaatgttttagctcgcaagttgatgatttaataaggtgttagtaaaacatttgggcataaaaaaacctcctgattatggacaagaggcaacccaaatgttttcacaacggaataatccttattgtgaattgctttcagttttgtaaagatacaaaaattattaaaatggaaaatgtggaaaaccgtaattaatattataaaaaataaataacttttgcttttaaaataattatttatgaaacgaattttaggattggatttagggacaacaagtataggcttcgcatatataaaagaggcagaaaatgagagaggacagtcatcgattgagaaaataggtgtgcgcgttaatccattgactacagacgaacaaaccgattttgaaaggggaaaacccttaacaacaaatgctagcagaacgttaaaacgaggagcgagacggaaccttgatcgttatcagttacgtagagatagtttaatcgaagtcctgaaaaataccaagctaatttctgataaaactattttggcagaaaacggaaaaaatacaacacatgaaacttggaggttacgatcaaaagccgcaaccgaaaaaattgaaaaaaaagaattggctagggtattattagcaattaataaaaagcgcggttataaaagtagtagaaaagcaaaaaatgaagaagaagggcaagttattgatgggatgggaatcgcaaaacgcctttatgaagaaaatttaacgcccgggcaattggcattccaatttttaaaaactggtaaaaatgtacttcctgatttctaccgttctgatttacaggccgaatttgacaaggtttggaattgccaaaaacagttttatcccaagattttttcagatgaattttacaaagaacttcaaggaaaagggcaacgagcaaccgctgctttgttttggaacacatatcaatttaatattgccgaaataaaagatttagaagagagattaaagactgaaaaaacaatcaaacttagtaaaaggcaacaaaagaaattgcaagcatataagtggagaagtgatgggatttcgaaacaattaacaaaagaagccgctgcttatgtaattactgaaatcaataatgatttgaataaatcgagcggttatctgggggcaatttcagacagaagtaaagaactgtattttaataaagaaacggttggtcaatatttatacaaacaattacaacataatctccataatcgattaaaaaaccaagtgttttatcgtcaggattatttggatgagtttgaagccatttgggaaacgcaggcaaaattccatcatgaactgactcaagaattaaaagaagaaattcgggatataatcattttctatcaacgaaaactaaaatcacaaaaagggcttattagtttttgcgaatttgaaagcaaagaaattgaagttgaaaagaatggaaaaaaagtaaagaaaacaattggattgcgtgttgcacccaaatcttcacctatatttcaggaatttaaaatttggcaaaatttaaacaatctagagtttagaaataaagaaaccaaagaaaaattaaaacctgatttagaagccaaaaaaacattatttgaagaactgaatttgaaaggtaatttatcggcaaataagattgtggaattattaggttataaatcaataaattgggaggttaattacaaaactgtagaaggcaatcgaacaaataagtctttatatgaagcctatttgaaaattttggagatagaaggctatgatgtaaaagatttgttcaaggtaaaatctaataaagatgaagtagaattagatgatttgaaagtttccgcttctgaaattaaagacatggttaaaaagatttttgatgcattggaaataaatactaaaatcattgattttaatgctgaattggatggaaacaattttgaaaaacaagcctcttatcaattatggcatttgttgtattctgccgaagatgataacaaaaaatatagtgaagatgatattttcatttacggtaatgaacatataggccttaaaaagcaactggttaccaaatttggctttaagccagaacatgcaaaagtcctcgtaaatgtttctttgtctgatgattatgggaatatcagcactaaagcaatgcgaaaaatttatccgtatattaaagagcaccaatattcagaagcatgtgaacaggctggctacaggcactctaaacattctcttaccaaagaagaaattgaaaaccgcgaattgaaatcacgattagagttattaaaaaagaatagtttacgaaatccggtagttgagaaaatcctcaatcaaatggttaatgtgataaatactcttattgatacagaaaggaaaaaggaaccaaattttcattttgatgaaattcgtattgaattagcccgtgagctgaaaaagaatgctgaagaacgttctgaaatgacatccaatatcaattcagcaaaattacgtcacgaaaaaattattaaacttttacggacagaatttggagtacaaaacccgacccgaaatgatataatccgttataaattatatgaggagttaaaaaacaatggctataaagatttatatactaacagatatattccgagagaaaaattgtttaccaaagaaattgatattgaacacataattccacagtcaaaagcctttgatgacagtttctccaacaaaacactttcttttcgacaagataatttagataaggggaatcaaactgcgattgattacattgagagtaggtttgggaatgaaaagttgaaggaatatttaaaccgaattactcaattgaataaaacttggtcaaaagacaaacccgaagaaggtattactaaagccaaatttctaaaactacaaaaaagagaagccgatatcggtgaaggatttgcagaaagggatttacgggatagccaatacattgctaaaaaagcaaaaagtatgttgtttgatataacgcgttctgtggtttcaacttcaggaaacattacagggcgtttgcgtgatgattgggatttaattaatgtgatgaaagagctcaatttgcctaaatacagggctttaggacttaccgaaatgcaggaacgtaagtttggtaaaaaagtagaaataatttcagattggacaaaacggaatgatcatcgccaccacgctatggatgccttaacagttgcttttactaagcacaaccatattcagtatttgaattatttaaacgctcgaaaaaatgaaaatcacaaatggcatagaagtattattgccattgaaacaaaagaaacagaattagttatagatgataatggcaataaaaaaagaaagtttattaaaccaattcctaattttaggcaagtagctaaagaacatttagaaagtgttctggtttcttacaaagcaaaaaataaagttgtaacaaaaaacaagaatagaatcaagacaaaaaatggagaaagagtaaaaattgaacgtacaccaagagggaaattacataaagaaactgtttatggaaaaataaaacaacctgttgtaaaggaagaaagaataggtacaaagttcaattctgaaattgttaaaaaagtgactaatccggtatatagggcggttttagaacagcgcttagccgataataacaataacccaaaaaaggcttttggcggaaaaaatgccttgtctaaaaatcctatttatttaagtgcagctaaaacgaagtttttacctgaaaaagtaaaaacaatctcttatgtagacaattttaccattaggaaagatatatcaccggataattttaaaacaattaaaaatattgaaaaaataattgatgaaggagtaaagcgggctttaatagaaaggttaaatcaatacaaaggcaatgcaaaggatgctttttcaggccttgataaaaatccgattctgcttaaaaatggtgtttctattaaaagggcaactatcagtggtattagtaatgccgaacctttacatcataaaaaagactatttaggagaatttattttaaatgagaaagggcaaaaaatcccaactgattatgtcagtacaggcaataatcatcatgtagcaatttatcgagatgaaaaagggaatttacaagaaaatgtcatttctttttttgaggctgttgaaagaattaatcaaaaagaaccagttattgacaaaaactttaataatcaattaggatggcaatttttatttacaatgaaacaaaatgaaatgtttgttttccctaatgaaaaaacaggttttaatccaaaagaaatagatttattagaccctaaaaataaaaagttgattagctccaatttatttagagtacaaaagatagcaactaaaaattatatgtttaccaatcatttggaaacacaagcaacgaacagtgacgatttaaaaaatagaaaacacctaaagggttataaatattattttatacaggctccaagtcatttaaatgaaattgtcaaaatccgtatcaaccacattggcgatatcgtaagtgtaggagagtattaaaagaaaaccaaatgataaaacgcaccctttttttcggcaaccctgcttatttaagtaccaaaaatgaacaactggtggtcaactttccggataaagaaaaaaaagaagccactatccccattgaagatttaggatatgtagtcttagaagatcctcaaattaccattaccaatggcttgttacgaaaactggtacagcataaaacagccgtgataacctgcgatagcaaacacctgccctgtggctttttacagcctttggttgggcatacagagcaaagtgagcggataaggcatcagttaaatgccagtgtgcccttaaaaaaacaactgtggcaacaaaccgtaacgg

SEQ ID NO: 2480 - DNA, 6348 bp, synthetic construct
  misc_feature 1..6348: note = Synthetic
  source 1..6348: mol_type = other DNA
attgtttcattaaaggggtttcttttatggtctttttcgccaaacttcctccgttttttttgtggggtaaaaataggtattttgaatgggattgacaatagggtgaaaagaaaagaatttttatagtgttttgttaaagatgcaagtattttatttaattttagggttttgggaggcgttgctattttgataagacagaagggcttgttttttcaaaaaaaaagcgatttcacaacggaataatccttattgtgaattgcttcgttttgtggaacaaaaataagaaaatatttaaaacaaaacacatcactatgaaaaaaattttaggattagatttgggaacaacctctataggctgggcctatgtgaatgaagcagaaacgaatgaggaaaaatcttcgatagttaaattaggggttagggtcattccattatcctccgatgaggaaactgattttatgaaagggaaggcgacttctataaatgctgacagaacattaaagagaggagctaggaggaatttagatagatatcaggaaagacgagatgctttaatcgaaatattaaaagataatggttttatttcagatgacattttgttgaatgaagatggcaaaaacacaacttttaatacatatgagtccagagcaaaagccgctaaaaagataattagtaaagaggaatttgccaaagttcttttgatgataaataagaaacggggttataaaagtagtagaaaagctaaatcagaagaagaaggatcggcaatagacggaatgcttgttgctaaatatatttatgataatggtttgactcctgggcaatatgtctatcaattattaagagacaaaaagaaatatattccagatttttatcgctccgatttgcaatctgaactatcacagatttgggaatttcagaagcaatttcatgcaaacattttaaccgaagaatttttcgaacaaatttccggaaaagggaaaatggcaacatcaaaaatctttttgggtaaatatgagatatatacagctgaaaataaaggaaaaagagatgatgttaaattacaatcatataaatggagagctgaagccactactatagaattatctcgagaagagttagcttatgttgtagttgaaataaacaataatatcaacgcatcgagtggttatttgggagctattagtgataggagtaaagaactttattttaataaacaaaccgttggtgagtatttttatagtcaactagaagaaaatccacatgcgagattaaagaatcaagttttttatcgccaagattatttggatgaatttgaagctgtttgggaaatgcaaagaagcttaagagctcaatccaacttagatacagaccttgatttatttaatgctgagcttaaaaaagaaatcagagatgtgattattttctatcagaggaggcttaaatcccagaaacatcttataagtaattgtgaatttgagaaatatcataaagttattccgaaatcatccccattatttcaggaatttaaaatttggcaaattatcaataatatagagttgaaagatattaataccagaacagtttataaaaatgagagtattgagcaagaagtaaaagataacttatttcaagagcttaacattagagtaaaaatgactgataaagagattttaaagatattagttgaaaatccggatgattttaagcttaattataaagagttggaaggtaatagaactaatgctgctttatatgaggcttaccagaaaattcttgaatttgaaggtgaagaactcagtttttctaaaatgagtgctgatgaaattaatgatagaattagtagtaaattcttagatttaggaataaatgttgacattttaattttcaatgctgatcttaaagaaaatgaatatcataaacaagatatactacaactatggcatttattgtattcttttgaaggtgataatactaaaacaggtgatgagaaattaataaaagcattaaatactaagtatggatttaagcccgaatacgcaagacttatagctaatgctatattacaaggcgattatggaagtttgtcttctaaggctattcgcaaaataatgccttacttaaaggaaggaaatagatttgatattgcttgtggctatgcaaaatataatcactcatcatctttaacaaaagaggaaagagcaacgcgagttttaaaagatgcgatgaatttgctgcctaaaaattcattaagaaaccctgtggttgagaaaatattaaatcaattagttaatgtggtgaatgctataattattgatgaaaatcttggaaagccagatgaaattagaatagaattagctcgtgagcttaaaaaatcggctaaagaacgagaagatatgacacgtaacataaataaagcaacagcagatcacgagaaaataagagtattgttacaaaacgattttggaataactaaagtaactagaaacgatattattagatataaattatggagagaattagaatgtaatggattcaaaacaatttatactaatgcctatgtttcaaaagagaaactcttttctaaagaatttgatattgagcatattataccaaaagctaggttattcgacgattcgttttcaaataaaaccattacgataaggcaagtgaatattgataaaagtaacgaaacggcttacgattacttaaaagaaacacagaatgaggcagattttaatcaatatttagctcgcatagagaagttgtataaatctaaaaacattagcaaaaccaaatataataagctaatgatgaaactctccgaaatacctgaaggttttattgagcgagatttgcgaaacagtcaatatattgcaaaaaaagccaaagaaatgcttgaggaggtggtgagaacagtaaatacaagcacaggcataattaccgaccgtttgcgtagcgattggcaacttattaatataatgaaggagttaaatttgcctaaatatgaaaaattaggtttattggaaaccattgaaggtaaaaatggaaagcctgaaactcgaataaaagattggacaaagagaaatgatcatagacatcatgccatggatgctttaacagtggctttcacttcctatagccatgtgcagtatttgaataatttgcacgcaagaacggataagaagagtagcatctttgctatagagaataaatatttacatagaaatgagaaaaataaattggtctttaatgcaccaatgcctttacatgaatttagaatagaatctaaaaagcatttagaaaatatactaatctcctttaaggctaaaaacaaagttgttacacgtaataagaataaatcaaaattaaaaggaaaagataactacaatacaaaaattgaattaacgcctagagggcaattacacaaagaaactgtttatggaaagattgagagatataaaactaagccagaaaaagtaggttctaaatttgatttgactaagattaaacaagtagcaaaacaatcttatagagaagctttattaacacgattaatagaattcggtagcgacccaaagaaggcttttgcggggaaaaatgcaccatctaagaatccggtttttgtagatgaagctaaaacaatagaattaccagagaaagtaaaattagtttggaaagaaacggattataccaaaagagttgagataaattcagataactttaaaacggaaaagaatattgaaaaagttattgatgtaggtataaagagtattttattaaatagactagcggaatataatggagattcaaagaaagcttttgttaacttagaagaaaatccaatttggcttaacaaagacaaaggcataagtataaagcgagtaactatatctggtgtaagcaatgctgaagccctacatcataaaaaagatcataatggcacacttattcttgatgctaaaggtaataaacagccaacagattttgtgagcacgggaaacaaccatcatgtagctatttatagagacgcaaaaggtaaattgcaagaagaagtagtttcgttttacgaggcagtacatagggtaaatgaaggtataccaataataaataaaaataaagaaggtttagaattcttgtttactatgaagcaaaatgagtattttgtttttccttccgacaattttaaacccaatgaaatagatatgcttaatcctaagaatacgaatttaataagtccatatttgtttagggtgcaaaagatagctactacgaattatatgtttcgccaccatttggaaactacagttgaagataaaaaagagcttaaagatgtttcatataagaatattcgtagtgctaatggtgttcaggatataataaaagtgcgaataaatcacttaggacaaattgtaaaaatcggagagtaattaattaaactccgtgtgtctttaagacacgcggagtttgtaagacttaaaaaatgcaattcgaaaaaggctatatatatcatatatacaatcaaggaaacaatagagaaaaactcttttataatagagcgcattatctgttctttctacggaaagtcaacacctatattttaccttatgccgatgttttggcttggtgcttaatgcccaatcattttcatttaatggttttagttcgagaagtggagctggttaacggtagactcggtgtgtctcaaagacacgccgagtctcaacagaccattaaacccagaaccttcaacaaatccattggcataatgataatggcatacgcaaaagcatattcatcaaaaccctgtgaaagccaaattggtaagtaaaaacaccgattgggaattctcttcggcactagattatgctaatcttcgtcaaggaaagttgattagtaaaaaggtggcaatgaaatatgtagatattaattagcggaaagtataatgtttaaagtggagtgctgacttcaaaataatttaatattatgataaaacgaacgctttattttggtagtgatgcctatttgcataccaaacaaaatcaattggtagtaaaatttcctgattctaatcgtgaagatgccacggtgccaattgaagatattggtgttattattctagacgcttttcgattaagtatttcacagaatctaatcaccaaattaatacataataatgtggcattaataagttgtgacgagcgccatatgcctcaaggtttaatgctaaacttggatggtaatacactacaacaagagcggtttaagattcagttagaggtttcgttacctctaaaaaaacaattatggcaacaaaccataaaagcaaaaatcggaaatcagttgggcttgttgttaaagttaaagcaaactcagagtgtggctttgagttcaaataaagacactttgcccgattttgaaaatatgagatactggcaaaggtcggtgcgttcgggtgatcccgataattacgaagcgcgtgcagcagctttttattgggcccgtatttttactcaagaaattgatgattttaaaagggggcgtttcgaagctagtaaaagaaatggtggagaaatattatccattagtagcgcagggcgaagagctggagctaatgccagagattaaaaaagaattattgcaaataccagcaattgatgtaattattgatgaagagaaaagtccgttaatgattgctatgcagcgtacaacggctagtttgtttcaatgttttgcaggcaatagccgtaaaattttatatccggttattggttgttagatatggatgcttagactcggtgtgtctcaaagacacgccgagtctgtgaccattgccaccctaaaagaaaaacatgagtttagattgtttaaataaatacaaaataatgtgggttttagtattcttcgacttaccaacagagaccaagaaagatcgtaaaaatgcatcaaggtttcgcaaacaacttatagatgatggttttagtatgttccagttttccatttatatgcggcattgtgccagcagagaaaatgcgcaagtgcatattaagcgtgtaaaatctattttgcctccttttggacatgtggctattttgaatattacagataagcaatttggcatgatagaactttttataggtaaaaaagaagtggaaaaaccagatatgccacagcaattagagcttttttaaactacaaaaagagctcgttcccttatggaagacctctttttgtaggcagtttttttaacgtctaaaaagcatttaaataattgtgaatcaaaacattaagagcaggcctactgcattcaatatttcaaagatacaaaacgaaagcaattcacaacac

SEQ ID NO: 2481 - DNA, 6010 bp, synthetic construct
  misc_feature 1..6010: note = Synthetic
  source 1..6010: mol_type = other DNA
  variation 4675..4681: note = n is a, c, g, or t
gaaagtttctatactagaatgtaaaatacacataaatgtgtatatggctgtcaaaagttgtcaaaaccgctctgtatctttgcatcgtaaaaaaatgacacgaggattatgcgacagataactaaattattcgaaagtatttacgacatatttaccgaagctttttgtttttcataactatataattttttaaatgtattccagagcgaggatgtagagagaggctgaattgttttgtttaagttaagtttgtttttaacctccctatagaaaaatcgatagggaggttattaaaaaaacaggcgacccgaaggccgccttaaagtgtttacacaacggaataatccttattgtgaattgctataaacttttgcaaatttatggaaaagtttattaaatgcaatactttttattatttttgtaagaacataactgataatcaatagtaaaatgaaaaagatacttggattggatctgggcgttagctccataggatgggcattggttaatgaatctgaaaagccagaggaaaaatcatcaatcattaagttgggtgtaagggtaaatcctttgactgtagatgagaatactgattttgaaaaaggtaagagtataacgaccaatgctaatcgtaccttaaaacgtggaatgcgaagaaatcttcaaagatataagcttcgcagagataatcttattaaagtgcttaaagataatggtttcattgatgaagagactatactggcagagaatggtaactttacaacatttcaaaccttgcgtttacgtgccaaggccgcttcgcaggaggtgagcttggaagaattagcaagagttcttttgaatataaataagaaacgcggatataaaagtaatcgtaaatgtaagtcaagcgaggaagatggacaggtggtggatagtatttctatcgctaaagatttatatgataataatatgactcctggagaatatgtcagttctgtgatatttggttctggtagaaagtctattccatcattttatcgttccgacttgcaagaggagtttgatagggtttggcttaaacagtccgagtattatcatgaactaactcctgaacttaaagaagaattaaatgggaagaataaatctcaaacatgggctatattggccaaatcgttagggcttgtaggaaaaaagcgcgatgtcaaaagattcgatttgataaaggaaaattacgggcttagagttaaaggattgaaagagaagttggatccagaagatttagccattgctcttcaagaaattaatggtaatataaaagatgctggcggttacttgggaaacattagcgatcggagtaaatgtcttgcttttgcaaatatgactgtgggtcagtatatgatgagtgaacttgacaagaattccaattatagttttagaaatcaagtcttctaccgttccgattatatggatgaatttgatagaatatgggaggttcagtcaaaatatcatccagaactcactgcagaattaaagcatgaggtaagggatatcgttatcttttatcaaaggccacttaaaagtcagaaaggtctgattagttattgtgaatttgagcaaaaaaggagagtgtgccctaagtcttctcctatttatcaggaatttagaacttggcaggaattgaacaatctgactatcggaggaaagactttaagtcttgctgacagacaaatcgtggctaaggagttgctgattcgagagtctttgagcgcaacagagatatgttctcttttaggtaagcctaagaatttgaaagtcaactttaagaaaattgatggtaataggacgcagtccacactttttagtgcttatgagaagatagttgaggaaagtggtaatggagaatttgattttggtaaaatgccattttcggaagcaaataagatcgttactgacgtatttttagcattaggagctaaaacggatttccttactacagatatttctgaagattccgcgttctttagattatggcatctgctctattcatatcaaggggatagttccaaatcaggtcagcagagtcttgtcgagaaaatatctgagatggctggattgccaattgagtattcaagtttgattgcgaatgtcacctttgaagatgattatggtaatttgagtgccaaggcgttaaagaaaaaacatccttttatgaaagagggcgatgagtatagtgtggcttgtgaaaaggctggctatagacattcaaaaaagtctctaacaaaagaagaaattgattcaaaagaatataaagataagttagaactgctgccgaagaatagtctgcggaatcctgtcgtggagaagattctaaatcagatggttaatgtcgtaaatgcagttattgatgaatatggcaagccagatgagattaggatagaattggcccgagaactaaagaagagtgcaaaagagcgagaggagttaacagatgctattaataaggggaataaaaggaatgatgaggttattaaaatattgaaatcaaagtttggtatcgcttctccttccaaaaatgacattacaaggtatagactttacgaggaattggattcaaatggacataaaacgctgtattctggaacatatattcctgaggaaaagattttttctaaagagtttgatatagaacatattatacctcagtcgcgcttgttcgacgattcgttttcgaataaaacacttgaacttaagagtattaacattgaaaaagggaatagcacggcgagagattatgttttaagtaaatatggtgagaatggtttatcaagttataaatcgaacatagagcgattactgaaagaaaaagcctttagtcgcacaaagtataaacatcttcttatgaaagaatcggagattccagctgattttattgatcgtgatttgcgtgattcccagtatatcgctaaaaaagcgaaggagatgcttgaagatgtggtaaagtatgtagtaacgaccacaggttcggttacggcgagactccgtgaggattggcagttagtaaatgttatgcaagagttaaattggaataagtatgataaacttggcttgactgaatatgagcagagacgagatggacagagagtaaggaaaattaaagactggaccaagcgtaatgatcataggcatcatgctatggatgcattgacgattgcatttacaaaacgctcatatattcagtatcttaataaccttaatgctcgattagagaaaactacaacggatgggacgctatttgatttgtctgattatgagatggatgacttaaatcgaaaagatgtaacaagagtcgttcgtgctattcaagataaggaattatatagagattctgataataaattaagatttaatcctcctatccctcttgatgaattccgcgctgaagctaaacgtcaacttgaagatgttttggtctctattaaggctaaaaacaaggtagttactaagaatgaaaatagatataaagtagctggaggagaagtcaaaaaggtacaattaactccacgaggagaacttcatgaagatactttttatgggaaaatatcgcgatatgttacaaaggaagagaatgtgggttcgatatttaatgaagaaaagattaaaactgtcgcttgtaaggcatatcgtgaagctttgatgcagcgtctatctaaagctggtggagaccctaaaaaagcattttgtgggacgaatagtctggagaaaaagccattatttttaaatacacctaatacagaacatgtgcctagtcgcgtaaagacagtatcttttgaagaaatctatactattcgaaagcctattgagccgggacttataattgaaaaggtgatagatataggtgtaaggaaaatcttggagcagcgtctctcagaatatggtgatgatgctaaaaaggcattttctaacctagatgaaaatcctatctggttgaataaggagaaaagcattgtgataaagagggtaacgatggaagctagggttgatagagttgaacctttgcattataaaaaggataatttggggaatgttatccttgattctgctaataggcgggttccatctgattatgtgaaatatggaagtaatcatcacgtcgctatttatgaagatgcatcaggtcacttgcaagaacaagtcgtatcattttatgaggctacttcgagagcttcaatgggtatgccaattgtggatacctcatataagaaagaagaaggatggaagtttttattctctatgaaacaaaacgagtatttcgtattcccgaataaagagaccggatttgacccatctgaagttgatttgatgaatcctatgaattacgcagaagtgagtagaaatttgtttagggtgcaaactatttcatcaaaggattacaggtttagacatcatttggaaacaaaagtagaagacaaaaaccttaagactaaagatattgtttggaaacgaatcacttctattgataatctcaaagatgtgtttaaagtgcgtattaatcacattggtaaaatcgttcaagtgggggagtattagtatggtaaaacgtactttatatttcgggaatccggcgtatctttcgttacgattaggacaacttgtcgtgaggatgccttcccctgaaccaactatcagtaaaggnnnnnnntagttttgaagttaagaacattccggtagaagatatcggaatggtcgttttagataataaacagattactataactcagggactactcgaagcactgcttgaaaataattgtgcagtgcttacctgtgattcatctcgtcttcctgtgggcttaatgctcccattatgtggacatactcttcaaaacgaaaggtttagagatcaaatagagtcctcgcttcctttgaaaaaacagatttggcaacagaccataaggcagaagattttaaatcaggcatctgtattatattatgcaacgggtgaaaagcataataatatgcttgtgtgggcagaagatgttcgaagtggggatactggtaatttggaagcaagagctgctgcatattattggaagactatattcaaagatcctttttttgtgcgtggaagggaagaagcaccgccaaataatcttttgaactatggttatgctattcttagagctgtggttgcaagaggtttagtttgtagcgggttgcttcctacgcttggagttcatcaccataatagatataatgcgtattgcttagctgatgatattatggagccgtatcgtccttatgtggataggatggtttgtgatatgatttcatccgattgttctatgattctaactcctgaagtaaaaaaacagtttttgtccattcctgtgctcgatgtatttatagacgggcataaaagtcctttaatggtagctgtcactttaacaacggcgtctcttgcaaagtgtttcagtggggagtcacgtaaagtaatttatccggagatgtagttttttcatgactgataggttcagcgcatatagagttatgtgggtattggtctttttcgatttacctacggatacaaaaaagtagagaaaagcagcaagtgattttcgtaaaaagcttgtgtccgacgggtttaagatgtttcagttttctatttatatgcgtcattgcccaagtgcggagaatgctgctgtgcatgtgaagcgcgtgaaattaaatcttccggatgtgggtcatgtgggaattcttaccattactgataagcagtttggggctatggaattatttcatgagaaaaaagaagaagctccgccgattggttatatacaattagaattgttttagtataaaaataatttgggaaagtcttgtgaaaaattacattcttaataatatagaaaactttctaatattaaaaatctcggccattgtaagccgagattttaatttctggaaatgctttgtaaaatattgtgttttaattttttacctatagtctgctgtttccagtaagacaaag

SEQ ID NO: 2482 - DNA, 5844 bp, synthetic construct
  misc_feature 1..5844: note = Synthetic
  source 1..5844: mol_type = other DNA
taggtcttcagagtctaacgactttggagacctttttttgtgtccataggaggtactacctttaataacaataatataatgatatgacagtggaaaatcagtatgttaaacagtatcccgaccttatgtcgggcaagaagataatataggcaaaaaaagcccaccgttaaggacgatgggcgaacctaatgttttcacaacggaataatccttattgtgatttgctcagatttaggtggcaaagatacataaaagaagattatcaaccaaatattttattagaaatgtttgcctaattgttttttaatgtttaaatttgcttaataacattttatgcttagatatttaataacctaaaccttttaatatagcaataaattatgaagaaaatattaggccttgatttaggaactacaagtataggttgggctcttgtcaatgaagctgaaatcgctgaggagaaatcgtcaattataaaactcggtgtacgtgtaaaccctttgactgtcgacgagcaatcgaactttgaaaagggaaaagcaataactacaaatgctgatcgtacccttaagcgtaccgctcgacgcaacttacatcgttacaaattgcgtcgtgagaatctgttatccgtattaaaggataacggatttatcacagacgactctattctttgcgaaaagggaaaccgcacaactttcgagacacgcctgttacgtgctaaagctgctaccgatgagattacgttggaacaacttgctcgtgtacttgtaatgattaacaagaaacgtggctacaagagctgtagaaagactaatgctggcgaggaaggtagccttattgatggtatgacagtggctcgaaaactctatgacgaacacctcactcctggtcaatatgtttaccaattattatgcaaaggcaagaaatacattcccgacttctatccttctgacctcaatgccgagtttgatgcagtgtagcattgtcagaagcaattctatgcagatatattcacggatgaattgcgtgaagcgttgcgtggcaagaacgagaagcagacttggggagtttgttctgaacctttgggattgaaaggaatcaaacgccacggctctgctgcagaccagcgtgtggaaaattatcgttggcgcaccgaagcaatcagcaaacagatgtcacttgagcaggtagctattgtgcttcagaaaataaatggtcagattgctggaacaagcggataccttggcgcaataagcgaccgtagcaaagaattgtacttcaatcaccagactgtcggacaatttcagatgaagcaattaagcgatgatccgaatacaagtctgaagaatcaggtgttctatcgtcaggattatctcgatgaatttgaacgtatctgggagacacaagccaagtatcatagccagctcacagcagaactgaagcatgaattgcgcgatattgttatcttctatcagcgtcctttgaaatcgcagaagcgacttgtaagttattgtgagtttgagagcagacagaaggatattgttgtagacggcaagaagaaaaccataacaatcggtttgcgtgtttgtccgaagtcatctccgttgttccagtgtttcaagatatggcaaacaataaacaatctgcaagtaactggtgatgttgtacccaaggcgcagatcgatctatttggcaattctaccgattgtgagtacggaacacgcacgctaacagaagaagaaaagtgcgacttgtatcgtgaactgagcataaaagagagtctgtctgaaacagagattttaaagttgttgtttggtagcaagaaaggattgaaccttaacttccgcaaggttgagggcaatcttaccatgtccttgcttgtcaaggcttgccaaaccgttcttgctatcaatggatacaacgattacgatttctcaaagatgccttatgacaaggcaatgctaatcattacaaaagtatttgatgttttaggtttcaacacaagtttcttgacattcgacccaacgcttgatggcaaggactttgaacgtcaaaccgcttatcagctctggcatctgctttactcgtactctggcgacagctcggcaacaggcaacgagaaactcattgagcgacttcgcaatcttctgaatatggacagagactcggctgctgtgtttgtgtcgataccattagaacctgattatggaagtcttagcgcaaaggcaatgcgccgaatattgcctcacatgatggatgggttggaatatagtgtggcttgcgagtatgtaggctatcatcactctcgccgttcgctcacaaaagaagagatagctgcaaagcctctcgttgacaccattccactcctgccacgcaacagtttgcgcaatcccgtagtggagaaaattctaaaccaaatgataaatgtggtgaatgctgttagcgacagatacggcaagccagatgagatacgtattgaaatggctcgcgaactgaagaagaatgttaaggaacgcgaacaaatgacgcgcgacatagcacgagcaaatgccgaaaacgataaataccgaaagattttgcaggaagagttcggcaaacagaatgtcagtcgtaacgacataatacgctatcgtctatatctcgaacttgaggcaaacggcttcaagaccttgtatactcagacatatataccacgcgagaaacttttcagcaaggaatttgacatcgaacacataattccacaggctcgtctgtttgacgactcgttctctaacaagactcttgaggcacgcagtgcgaatatagagaaaggcagcacgactgcctacgactatgtgcttgcaaaatacggtgagcaaggagacaatggatccgttaaatacaaggaacgcatagacagtctttataaggagggtgtgataagcaaaacaaagcacgacaagctgctgatgaccacagccgaaatacctgacggctttatcaaccgcgacttgtgcgaaacacaatatatagcacgtaaggcacgcgagatattagagagtgcggtgcgtgtggtagttccgacaacaggggctgtaaccgaccgattgcgtgaagactggcagcttgtggatgttatgaaagaactcaactgggacaaatacgaccagctcggactaacagaaacatataaagaccctgacggacgccagatacgacgcataaaggattggactaaacgcaacgaccatcgccatcatgctatggatgcgcttacgatagccttcacacgtcatagcttcatacaatatctgaacaatctgaatgctcgtagcgacaaggctggtagcatatatgctattgagaagaaggaactctatcgcgacaacaataataagttgcgttttattcctccaatgccacttggcgagttcagagccgaggctcgtcgccatttggaagatgtgttagtgtcgattaaggcgaaaaacaaagtagttacacgcaatgtgaacatcacccttggtgctgatggcaagaaacatcatgttgtgcagcttaccccacgtggtcagcttcataacgaaactgtatatggtagccgccgtcgatatattgtaaagtatgagaaggttggcggtgcctttaacgaggaaaagatcaatacagtcggcagtccgcgaattcgtgaagccctgttacaacgcttggagatgttcggtggcgatgcaaagaaggcatttaccagcaagaatagtcttgagaaaacccctatctaccttgacgacaaccacacgaagcaagtgccgcagaaggttaaaacggtaacattagaagaggtgttcacaattcgtaagccgatagacaaagacctcaatgtagagaaggtagtagaccagcgtgtacgaaagttgctgcaagaacgcctcgcagaatacggaggagacgctaagaaagcgtttgcaaaccttgacgagaatccagtatggctcaaccgcgaacgtggaatagccataaaacgtgtaacaatatatggtgttagtaacgctactgcattgcacgacaagcatgatatgtatggaaaaaagatgctcaacagcaatggcatatccataccggctgattatgtaagcacgagcaacaatcaccatgtagccgtattccgtgacaacgatggcaatctgcaggaacatctcgtgtccttctttgaggcaacagagcgggcacaacagcatttgcccatcattgaccacggatataacaagcacctcggatggcagttcttattcacaatgaaacgcaacgaatactttgtgttcccgaacgagaagacaggctttgaccctaacgagattgacttgcttgacccaaaaaatgcagtggagataagcaagaatctgtttagagtgcagaagttagctactaagaattactgcttcaggcatcatttggaaacttcatcagaaattccaaaagagttgtcgggtattacatacaagtggcaacttggtctaaaaggtattgctggtatcgtgaaggtccgtgtcaaccaccttggagaaattgttgcagtgggcgaatactaataaaaaattaacaccctatgattaagaagactctttattttggcaacccggcatatctttcattacgaatggggcaaatggtcattaaactgccggaagtggaaaccgatagcaaattgcccgaccaaataaaaaaacaggcagaaataacaaagcccatagaagatattggagtcgttgtgcttgacaaccgacgcatcacaatcactcaagggctacttgagtctctgctcgaaaacaactgtgccgtcatcacctgcgattcgcatagtctgcccgtaggtcttatgcttccactttatggcaactccacacaaaacgagcgtttccgtgaccagttggatgcttctctgccattgaagaaacaactttggcagcagacaataaaaatgaaaatcagcaatcaggcagctgtccttgctacatgtactggcaaaaactcacctacaatgctacgttgggctgacgatgtgcgcagtggagaccccgataacgtcgaagggcgtgccgcagcatattattggaagaatctatttgccggtattgatggtttggaagactttacacgaagtagagaaggcgaagcaccaaacaatcttctgaattacggatatgccatactgcgtgctattgttgcacgtgcattggtgtcaagcggaatgttaccgaccctcggcatccaccaccataatcgctacaatgcctattgcctcgctgacgatataatggaaccctatcgtccttatgtagacgaattcgtattctctatagtaaaagacaaggggataaacaatctcgacttgtctaaagagataaaagccctgttgctctcaataccaacattagatgtcgtgataggtggcaagcgcagcccgctaatggtggctgttacccaaaccacagcatctctatacaaatgctttacgggtgaattgcgacgcatcgcatacccagtacgctaaactaaattataattttgcaatgaatcgttttagcgaatatcgagttatgtggatacttgtgttttttgatttgcctacagaaacaaagaaagacataaaagaatacaccatgttcagaaagcggttgcagcaagatggcttcaccatgtttcagttctctatatatgtacgtcattgcgcaagcatggagaatgcagaagtccacatgaagcgtgtcaactcttttcttcctgaatatggaaaggtcggaataatgtgcatcactgacaagcagtttggaaacattaagcttttttatgggaagaagccacaaactc

SEQ ID NO: 2483 - DNA, 5733 bp, synthetic construct
  variation 3122..3138: note = n is a, c, g, or t
  misc_feature 1..5733: note = Synthetic
  source 1..5733: mol_type = other DNA
cacggatccggggatttttcttaccccataaaacaaaaaagcgagtccaaagacccgctctaaatgtttgcacaacggaataatccttattgtgaattgcttcgttattgtaaccgcaaagttaatcaattatatctttcatgcaaatatttacgaaaaattatttgtccattaaagaattaagtgtaacttaggtgagaattaatacaataacagccatataatgaaaaagatactaggacttgatctgggaaccaccagcataggctgggcaatggtaaaccaagcggaaaataacgaagagagatcatccatcatcaaagccggagtaagagtcaatcctttgacgaccgatgagaaagacgccttcgagaaaggcaaggccgtcaccacgaacacagaccgtcggctgaaacgctcaatgcgccggaatcttcagcggtacaaactaagaagaaatgagttgatctccatcttaaaggaacttggctggattgacgactcgaccatattggcggaacatggcaacaaatcaactttcgaaacttacatgctgcgctcgaaagcatgcacggagatgatatctctgtcagaattgtcccgcgtcctgctgatgatcaacaagaagcgtggctacaaaagcaacaggaagctgaatgccgacgaggacgggcatcttgttgacggtatggcggtcgcgaagatgctatacgatgaggacaaaactcccggacagtattgctacgagcttgtcagaaaagggaataacgcactgcctgaattctacgcctcggatctggtggcggaattcaggaaagtctggaagacgcagtcatcttactatccggaatacctgacagatgagttctggcaacaggccgaaggaaagagcaaatcatcgttgtcgaagctattcttcgccaagtacaagatcacaaccgccgacaacaagggcaaggacaaaaaggtcaaagcctacgaatggcgttcatcggctattgagagacaactccctatggatcaggtggcttacgtgctttgcgaaatagccggcaacatcgggtcctcaagcggttaccttgggaatataagtgaccgcagcaaggagctgtacttcaacaagcagactgtcggacagttcctatactcgaatattcagaaagacccgcacttcagcacgaaaaaaaaagtcttctaccgacaggattaccttgatgagttcgaggtcatctgggaaaagcaagcctccttccatccggaaatgactgccgatcttaagaaggaaatcaaggacgttgtgatattcttccaaagaagactcaaatcccaaaagggattgataggttattgtgagctggagagccggaaggttgacgttgtcgtcaatggaaagacggtccggaaaatccgtggatgcaaggtcgcgcctgtgtcttcaccgctgtttcaggagttcagaatgtggcagaagatcaataatgtcatagtcacaaacaaggcaaccggcgaacagcgtccattggagcaagaggaaaaggaaaggctcgccgaagcgcttcatgtcaaagacagaatgtcatcaaatgacattctgaaacttttgttcaagaagccaaaggagctggaaatgaacttcaatgccattgaaggcaacgaaaccctgtcaaaattatattcaaaattcctcgaaatcatctcaatgaccgatggaatggattatgaatattccaaaatgcgcccggaggagcttatacatacgttaaaggtcggattcgacaagaatcatttcaattccgaagtccttgaatatgacgcacttctttcgaaggaggaatatgagcggcagcctcttttcaaactatggcatctgttatattcatacgaaggggataactcgcagactggtaatgagagtctggtcaagaagatcggtgaactctgcgctatgccggatgatcttgccaagatggcagcgtcgatatccttcaaacaggattacgcctccctgagccacaaggcgatgcggaatattcttccatacatgatggatggcaatgaatatagtgtcgcctgcatctgcgccggctacaatcattccaaacagtccttgacaaaggaacagattgacaacaaaatccttaaggaacgccttgatgagataccgaagaactccctcaggaatccggttgtggaaaagattctcaaccagatggtcaatgtgatcaatgctgtcggtgataggtacggcaagccggacgagattcacattgagttggcacgcgagcttaaatcttcccaggaagaaagggcgaaggcaactgaatcgatcgcgtcaaacaacaaggagaacgagcggatcaaaacaattcttgaagacaggtttcacctaacctatgtgagcaggaacgacattctgaaatacaaattgtacgaagaacttaagaacaacggctataaaacattgtattccaaccaatatgttccggaggagaagttgttcagcagagagattgacattgaacatatcataccacaggcggtgctgttcaacgactccctttccaacaagactctggaatacagggacataaaccttgaaaaggggaaggatacagcctacgattatgtcaagaacaagtatggagaaaccggtcttgaagattacaggctgcgcgttcagaaactatttgagtcaggcggcatctcacggacaaagcgggacaacctgcttcgcgacgcctcaaacattcccgagggctttgttgaacgcgatttgagggacacacagtacatcgccaagaaggctcgcgagatacttcttgaatatgtacgcgtggtggtaagcaccactggttccattactgacagactgcgggaggaatggggcttggtaaatgtcatgaaggaactgaatatgccgaagttcgaagccgccgggcttgtagagacgatcacatcgtccgacggtaaggatattcgtaagataaaggattggacgaaaagaaatgaccatagacaccacgctatggatgcgatcaccatagcgttcacaaaactcgcacatattcagtacttgaacaacctgaacgccaagagtgacaagtcttcctccatatacgggnnnnnnnnnnnnnnnnnatgatgaaagagacttatctttccggttctaagagattgatagttccgccgatgcctctcgaccagatgaggcgggccgttcgtgaacagcttggaagcattcttgtgtcgatcaaggctaagaacaaagtgatgaccgagaactataaccggatcaagacaaaggaggaagtcaaggtaactaaatgcctgacaccacgtggtcttctgcacaaggagcaggtttacgggcagaggagacgctatgaggcgtattttgtgaaagtcaacgcgaagatggacgaggatcagattgcatctgttgcatccagtgagatcaaggcgacgttgttattgaggttgtcgcagttcaatggcgatccgaagaaggctttctccggtgtcaattctttggacaagaatcctatatggctggacgacaatcattcgagaaaggtccctgaaaaagttaaatgcgtccggttcgtgaatgtatactccatcagaaaaccgatcgatccaaacctgagcgttgagaaagtgatggacggcaaggttcagagaatattaagggcacgtttggccgagttcggaaatgacccgaagaaagcgtttgtaaatctggacgaaaatccgatctggttcgataaggagaaagggattgtgctgagaagcgtgaccatagcggagaggtttgatcttgatcctatcagaatcaagagggataactttggccgtgagattcttgatcgcgagggtaatcctattccgtctgatttcgtgaatttcagaaacaatcatcacgcagctatattcgaagatgcggatgggaatattcaaggacatatagtgccattctatgaagctgtcagaaggaaagcatcagggctgtcaataatagataagaagtataactctgacaaaggctggaagtttttgtttacaatgaaaagcaacgagatgttcgtatttcctaatgaaaagactggctttgatcccaagaaagtcaaccttatggatccaggcaattattcaataatcagtccgaatttgtttaggctacaaaagatgagtaataagaaggtttgccaagagtattattttaggcatcatctagaaacaacattaggatatgacttgtcgttaaaggatattacatggaagtgtgtgcaatcactgaatatattatcgggcattgtcaaagtccgcatcaatcacataggagaaatagtctcagtaggcgaatatgattaagagaacattatatttcggaaaccccgcctatctgtcctataggatgaagcagctggtcatccgtcttgtggcggatgatccggatgagtattctgaacaggtacgcacgattcccgtcgaggacatcggtgtaattgttgttgacaaccagcaggtgacatttacttccgggctgatgtccgcgctgttggaggagaatgtggccttggtcacgtgcgattccaaacacatgcctactggcttgatgctgacgcttcaaggccattcctcacaaaacgagcgtttcaggaaccagcttgacgcttccctgcctctcaaaaagcaattatggcaacaaaccgtcgagtgcaagatccgcaatcaggcggccgttctgaaatatgtctccggagaggaagccagaaatatgctcgcttgggccgcttcggtcaaaagtggagactcggaaaatctggaggggcgcgcagcggcttattactggaaaaatgtgttcgagacccgttttatccggaaccagttcggtgaatacccgaacaatcttctgaattatggttatgccattctccgtgccattgtcgccagagccttggtagccagcgggatgctaccgctgcttggaatccatcaccacaacaagtacaacgactattgccttgccgatgacatcatggagccatacagaccatttgtggacaggctggttcttcgaacgatggacgaatttcctgacgacaaggaattgagcaagagcattaaagcgaggctcttgaccattcctgtccttgatgtgaacatagacggacacaagagtcctttgatggtcgctgtgtccactaccacagcctcattgtacaaatgttttagtggagtatgccggaagatagtttttccctcaatgtagaaaccagatacagtaaatatcgggctatgtgggttctcgtcttgtttgatttgcctgtcgcgacaaagaaagacatgaaagccgcctcggctttcaggaagagtctcattgaatatggcttcacgatgttccagttttcaatctacctaagacattgcccctcaaaagaaagtgctgatgtttatatcctacgtgtaaagcgcatactacccccaaaaggaaacatcggtatcctatacatcaccgacaaacagttcggcagcatggagttgttcatcggaaaagattcctcccctcttccccaagtagagcagcagctcgaactcttctgacagaatctccaaacccttgataaacaaagaaatcccggtctgaaaagaccaggatttccgctttctatcacagttcataaccctctgaccaacaacatcttgcagagattgagctgtaaattcacccaa

SEQ ID NO: 2484 - DNA, 5523 bp, synthetic construct
  misc_feature 1..5523: note = Synthetic
  source 1..5523: mol_type = other DNA
tcgcgctccatggcgttgtaattttgccctaaacaggtttccatgcttcctgtgcgtaggatcccatactgagcactactccaaaaacaatagaaagaaaaggcttcataatgatcgctttgagtgtgaagtttacaatattctgcaataataggaataaccgggcgatctacagcaggagttgccgcaactgtgcggcgggcgcctgcgcaacaggcgggagcgaggaggggaggggataaacatagtggtagcgggataatgcctgttattgcagttgagccggctgtatagctgctatgcaacaaccgttgcgacgctccgttcagggcctggagcactattccgcatgagaaggagagaaaaatccaggtatgtagcgcattaccgggcaaatcttacagcgcactaaaaaatttaaacagtaaaataaaaagccgctgcaaaattcatccaaagttcgtacattaacaactcaacccggttgcctgcattacctgcaatatcacttcatgaacccttgtttgtgatttcaagtatagcgcttcgggaataaaaaagccccgtagatagacgaggcgctaaatgttttcacaacggaataatccttattgtgaattgctttcacagcaataataagaaaatttgagcacaaattattattaccagtatcatttttttaaaataaaaaaaggagaaaatgtttctaaaaacgatcctgggacttgacctaggcactacttccatcggatttgccaaagtgattgaagatgataattaccaaaattcatctgttgagctaatcggcgttcgtgttaatcctctgaccaccgatgagcaaaccaattttgaaaaagggaagcccgtttctgtaaatgccggccgtacgctgaaacgtggtatgcggcgcaaccttgaccgctaccaactacggagaaaaaacctgattgaagttttacgaaagaataggataattaataatgaaacaaagttagctgaagacggaaagggcacaacgcactctacttatgccttacgtgcacaggctgtaacaaatgagatttcgctggaagcatttacaagagtgcttttggctattaacaaaaaacgtggttacaaaagcagcagaaaagctaaaagtgaagatgaaggacagattattgatggtatggccgtagctaaaaggttatatgaagaaaaccttacgcccggacaattagcggacaagcttataaaagagggaagaaagcatatacctgatttttaccgctctgatttgactacagaactaaataagatctgggattttcaaaagcaattctatcctgaaatactcactgatgagttcagaaaacatattgaaggaaaagggcaaagggctacatccgccgctttttggggcaaatatgaatttaatacagctgataacaaaggcgccagggatgaaaaaaaactacgaacctaccaatggagaagcgatgcggtttcaaaacaattatccaaagaagaagtagcatatgtaattacagaaataaataatgatttaaataaatcaagcggttacctcggtgcaatttccgacagaagcaaagaacttttttttaataaacaaaccgttgggcaatatctctatcaactattaaagcaaaatccacacacacgtctaaaaggccaggtattttaccggcaggattacctggacgagtttgaagtcatttgggaaacgcaggcaaaatttcatccacaacttactccaaacttaaaagaggaagttcgggatattataattttttatcagcgtaaattaaaatctcaaaaggggctgatcagcttctgtgaatttgaaagtaaagaattggaaattgaaaaaaatggacaaaagacaaaaaagagaataggcttacgtgttgctccaaaatcttcacctttgtttcaggaatttaaaatctggcaggtcttaaacaaccttgagtttaagaataaaaccacaaaagagattttcattccggatttgccggcaaagcaacaactgtttgatgaacttaacattaaagggaatctctcagcaaacgaggctataaaaatattaggttataaaaccagggattgggaagcaaattattctgttctggaaggtaaccggtcccataaatccttatacgacgcttacttgaaaatactagagatagagggttgtgatgaagatatattaaagctaacggacagcgatgatatagatgtgtccaaaattgaaagacccgcatcagaaataaaaaaaatggttctttctgttttggaggtactggatattgacacatctattttgaactttgatgcagaacttgaaggcaaagattttgagcaacaagcgtcatatcagctatggcatttgctttattcggctgaagacgatagtaagaaatattcccagcaggatattcttacttatggcaatgacaatatagggctgaaaaaaaatctatataaaaaatttggcttcaagccggagcatgcgaaaattttagcaagagtggtttttagtgaggattatggcaatttaagcactaaagctatgcgtaatatctacccctatattaaagagctaacgtacgacaaagcttgcttgcaagcagggtacaggcattcggcttcttctcttactaaagaagaaattgaaaatcgtcccttggaaaagagattagagttactaaagaaaaatgacctgcgaagccctgtagttgaaaagattctcaaccaaatggtcaatgtagttaactctctcattgatgaggaaaatgcaaaacgcaagatgcaaggattaccgaaggattttcattttgacgaaataagaattgagttatcccgggaactgaagaagaacgcaaaagagcgggcagagatgacaagcaatatcaatgcagccaaacagcagcatgagaaaattgtgaagatccttcaacccgaatttggagtacctaacccaacccggaatgatattatccgcttcaaattatatgaagaattaaagaacaacggatataaagacctgtacaccaatacctatattcctcgtgacatcctttttagtaagcaggttgatatagatcatattattccacaaatgagtttgtttgacgacagcttttctaacaaaacggttatattcagaaaggacaatcaggacaaaggcaataaaacagcatatgattatattttgaacaaatacggtgacaatacggcaaaagagttcgtaaatcgtatcacacatttatttgaattggggaaaaagaacaaggaagaaggtataagcaaagcgaaatttcaaaagctgcaaaagcgtatcacagaaataggcgacggatttattgaaagggatttgcgggaaagtcaatatatcgctaaaaaagcaaaaagtatgctctatactatttgccgaagtgttgtttcaactagcggggaaattaccgcgaggttacgtgaagattggggattaataaatgtaatgcaggaaatcaatatgcctaagtttcgggctttaggacttaccgaaatgatagagaaaaaggacggacaacaaaaagagcgtataacagattggagtaaacggaatgatcatcgccatcatgctatggatgctttaacaattgcatttaccaggcacaatcatatacaatacctcaactacctgaacgcacgcaaagacgaaactcataaaatgcatgggaatgttatagctattgaaaacaaagaaacagaattagtatttgacgatttgggcaaccgcagaaggaaatttaagtcgccgattgctaactttcgcgaaatcgtaaaagagcatctggaatatgtattggtttcccacaaggcaaaaaataaggttgttacaaaaaataaaaacaaaataaaaacagccaaaggtgagaaaataaaaacagagctcacgccgaggggacaactgcataaagaaaccgtgtatggcaagtaccgttactatcaacacaaagaggagaaggtaggcgttaagtttgatgaagccacaatacgaatggtggctaatcctttatacaaaaagcttttgctggaacgctttactatgaataataatgaccccaggaaagcttttggaggaaagaatgccttgagtaagaatccaatttatatagacggaagtaaacaagaaatgctcccggaaaaaattaagctaatatggctggaagatgattattccatacgaaaagacgtgacaccagaaaacctgaaagatgtaaagactattgaaaaagtactggatgatggagtaaaaaaagttttattgaaacgcctctctgattttggagacgaccccaaaaaggcttttagcgatttggacaaaaatccaatctggcttaatgaatccaggggaattagcatcaaacgcgtaacaattagcggggtaaaaaataccgaagcattacactttaaaaaagaccatttcggtaataatattttggataaagagggaaaaagaatccggagttcttttgttagtaccggcaacaatcaccatgtggctatttaccgagatgcagaagggaatatacaggaaagggctgtatctttttttgatgcagttgagttagtaaacgcgaagttgcctgtgattatcacaaaccctaaaaaggcttgggatgatattttagaaaaaggaattgaacatcgactaattgatcagttccctcctgaaaattggaaatttctgttcactatgaagcaaaacgaaatgtttgtattcccaaatgaaaagacaggatttgacccaaaagaaatcaacttgctggaccccgggaatagaaatttagttagtccgaatttatttagagttcagaagttagcaacaaggaactacttttttagacatcatttagaaaccacagtagaagagaaaaaagagttaaagggcattgcgtataagcctcaactagggttgattggcatcaaagatattgtcaaagttcgcattaaccatatcgggcaaatagtgagcataggagaatactaacttctaatacatgattatgtaacccaacaataaacaatctgtaattgagatacataacagtggtgaaattatcaatgtgattagtgtcgttgcattcaatttactattgatagaatgaaagataaaattggaaggacaaataaatgcaaaaaaaataataaattagaggtatatgagttattaatataggttcacgctccggcaagccccttatagaaaactgcaagctaacctccggtaaatgtaaagcggcaataaccctgctaccataaaccctgcttccatgatcaaacgaaccctttatttcggcaatcctgcctatctcaaaaccagtaatgagcaactgatcatagagatgcacgacgatggtgaaaccaaatcggcgccgatcgaagatatcgggttgttgatactggatcaccagcagatcaccatcacacaggcattgctggctaaattattataccacaatacggcagtgatca

SEQ ID NO: 2485 - DNA, 5353 bp, synthetic construct
  source 1..5353: mol_type = other DNA
  misc_feature 1..5353: note = Synthetic
tgcaatagaactctaaggcttttggtgatttttagaagaatgagacatcactttgttacgttttttctcttcaccatataatagtatgctgatcattagacaggatcttcctaattattcttctgtagataaatagaacttcttttaaagcgatgtaagcattcaatctgccttagtatattaaagcaatagggggaatgcacaattagagtttcaaaaaacatcgtttaaagaattgctttgagccggaaaaatacacctgaacacaaacggtattattcaactaaatgcattcaaatttttaatagccctataaacgtaaatgcccacaggttttaataaaatatgtatgctattatatgctaaaaatcattctgcaataaaacatttggtgtgtaagacaatgtttggatatctgataataacgcttagttttagtctcccccaaagaatgagtgttagaaatagtggaataaaaaaagcgacttgcgccgctttaaataatattaataaaaatgcccccgttaaagtcgagggcaacttaatgtttacacaacggaataatccttattgcgatttgcttcaaaacaaatgtaattgataaactgaaactaattaataatgagcaaaaagattttaggcctcgatcttggaacgacttctattggatgggcgtttgtgacggaagcacaaaacgaaaatgagcattcaaccattgaaaggattggtgttcgggtaaatccgctaacaacagatgaacaaacagactttgaaaagggaaaaccaatatctgttaatgcggatcgcactttaaagagaggtgccagacgtaaccttgaccgatacaaacaacggcgacaaaatttaataaatacgttggtaaataatggcatcatttcacccgatgccatacttgcggaaaaggataaagccacaacgcacagcacctacaagtttagatctctggctgcaagtgaagaaattacgaaggaggaatttggacgtgttctattaatgatcaataaaaaacgtggttataaaagtagtcgtaaagcaaagaatgaagatgaagggcaagcaatagatggaatggcgatggcaaaaagattgtacgatgagcaacttactccggggcaattatgcttgcaactattggctgaaggaaaaaagtatttacctgatttttatcgttctgatttgcaagcagagtttaacaagatttgggaagtgcaaaagaaatttcatcctgatgtactaacggaggagtttaaaaaagaaattgccggcaagggacaaagagctacgtctgccatattttggaacacctacaatttcaacaccgcagaaaacaaaggcacccgcgacgaaaaaaagttacaggcatacgagtggaggacaaatgcgttgcatactcaattagccaaagaagaagtcgcctatgtaattactgaaatcaacaataatctaaatagcgcaagcggatacttaggtgccatcagcgaccgaagtaaagagctttactttaaaaagataacagtaggacaatacctgtacaaacaattgcaggatgatccgcacacacaaatgaaaaatcaggtattttaccggcaggattattttgatgaattcgaaaccatctgggaaaagcaaacaacgtttcataaggaactgaccccgactcttaaagaagaaatcagagataccatcattttttatcaaagaaaactaaagtcgcagaaaggattggtgagcgtttgtgaatttgaaagtaaggaagtagagattaatgtagatggaaaaaaaatcaggaaaaccattggctatagagtagcgcctaagtcttctcctttattccaggaatttaaaatatggcaaaacctaaacaaccttttagcacaaaacaagcacaccaaagaaatagttccgttttcacaagaggctaaagaattaatctttgaggaattaaacgtaaaggggaacttatcgaaagaggatgcccttaaaattttagtagataagccaaaggaatgggatttaaattttaaagtccttgaaggaaatcggaccaacgaagctttgtatgccgcatttttcaaaatgatggaaaagaatgatcatgaggatttggaatggaaaacattgccaatatctgaaattagaaatggaatactttctttttttgaaactgaaaaaatagatacttctttacttcattttaacgcagaacttactggaaaatcgttagaacaacaatcatcctataaactgtggcatttgttgtatagctacgaaggcgataattcaaatacaggtaacgagcaactttatgcaatcttattagacaagtttggtttcaaaaaagagtatgcacagattctcgccaacataaaactgcaaacagactattgtagccttagtgcaaaagctatccgcaatatcctcccctttttaaaagcaggtcatccgttttcaaaaaaagataaagatgaaaaagtagccagcgcaaccgcattagctggttacaatcattcatcatccatcaccaaagaagaaaatgaaacaagagtactaaaagataaacttgacttgttacctaaaaatagtctgcgcaatcctgtggttgaaaagatacttaaccaaatggtgaatgtgataaatgcaataattgcagacccaacattaggtaagccagatgagatacggattgaacttgccagggaattaaaaaagaatgcaaaggagcgtgaagaaatgaccgcccaaataaataaatcaacaacagagcacgataaaataagagccactttaataaaggaagatggcattaagaaccctagccgaaacgacatcattcgatataagttatatgaagaattgaaaacaaatggttacaaaacattgtactcaaacacatacatttctcgcgaaaggctattctctaaagaatttgatatagaacacatcattcctaaggctttattatttgatgatagcttttcaaacaaaaccatttgtgtgcgacaggaaaacctggataaagccaatgtgtgtgcaatggattttatcggcccctactttggagaagacaagataatggactatgtagacagggtagaaatgatgcataaagtaaaagaaggtggaatcagcaaagccaaatacaaaaagcttttaatgaaagtggaaagcattggcgaaggttttattgaacgtgatttgagagatacacaatacatagctaaaaaggcaaaacaaatgcttcatcaattatgtaaaacagttgtatctactacaggaagtattactgataaattgcgcgaagattgggaccttataaatgtaatgcaggagctaaacattgataaataccgcaagcttggacttacagaaatgatagaaaagaaagatggcagttttaaagaacgaataaccaattggacaaaacgtaacgaccacaggcaccacgcgatggacgcattgaccgttgcctttaccaagcacaaccacatacagtacctaaacaacctaagtgcaagaagtaataaggatggaattatttacgccatcgaacaaaaagaaacgttcttgtttggtgtaaatggtagccggaaaagaaaatttaaagaaccgctgccaaactttagagaagaagcaaagaaacacttagagaatgtattgatctcgtttaaagcaaaaaataaagtagttactaaaaacaagaataaaaccaaaacagctacaggcgataaagtaaaagtagaacttacaccaagggggccaatgcataagcagactgtatacggaaaattgaaccaatatgccaccaaagaagaaaggatcagtgcaaagtttgatgctgacaccattaataaggtggcttcatttccatttcgagttgccttgttaaagcgtttacaggaaaacaacaatgatcccaaggcagcatttactggaaagaacagccctgcaaagaacccgatttatgttgatttgcaaaaaacaatggttgtgccagaaaaggtaaagctggtttggctggaagcagattacaccatccgtaaagatgtaacacctgacaattttaaagagcagaaaaacttagataaaatagtagacgtaggtacaaagaagatcttggaaaagagattagcacattacaatggaaacgctaaagaagcattttcaaatcttgagaagaaccctatttggcaaaatcaggaaaaaggtattgccataaagcgtgtaaccattagcggcgttaaaaatgcagaagcactgcattctaaaaaagatcatctgggaaaagatattcttgacagcaatggcaataaactacctgttgattttgtaagtacaggcaacaaccatcatgtagccatatataaagatgcagaaggcaacctacaggagaacgttatttcattttacgaagcagtagaaagagtaaaccagggattgccggttattgataaaaccttaaaacaggatgagggatggcagtttctgtttaccatgaaacagaacgaatactttgtttttccgtccgagggatttgaacctgctgaaattgatttgacaaattcagcaaactataagttgattagcaaaaaccttttcagggtgcagaagattgctactaaaaactatgttttcaatcaccattttgagacgcaagcaatcgatggagacactcttaaaaataagaagatgttatctgagataacatataggtttattcaaacccctttcaaacttaagaacataattaaagttcgtatcaaccatattggacaaatagtaaaagtcggggaatattaaagtgttaacctatgattaaacgcaccatctgcatttccaccccttgcctgcttcgctgccaggatgagcaattgctggtacaatacgatcatgtaaaaggatacgagaatgtatccgctaaaaaagttccaattgaagatattggggtattggtattggagcatcagcagatcattattacgcattacctgttggataaactggtgcaaaacaatacagcagtgattacctgcaatgctatgatgcacccaagcggcatgctgctaaacctggaaggtaataccgtgcagagcgaaaggttccgagcacaaatacaggccaccgaaccgctgaagaaacaactctggcaacaaacggtacaagccaaaatagctaaccagtcggcagttttgcaacaatggaacatccattacacttacctgagtaatttacaaaagcaggtaaaaagcggcgacactaccaatacggaagcaacagctgccggttattattggcgcaacctgttgccggatgcatggcagttcttcaggcaccg

SEQ ID NO: 2486 - DNA, 5283 bp, synthetic construct
  misc_feature 1..5283: note = Synthetic
  source 1..5283: mol_type = other DNA
atgacttgttggggcaaacgattcgaggagtaaacgtcacccacaacgttaccaaactatggtaatcatgttaccagacctcggtaatcacgttacaaagcctctgtaatcatattaaaaggcttttacaagaattataggactatcagactctattccaaaacctgtataagcaagaataagaacaaaagaaatatcgttcaaaaaaaacaagaaaagaaacatgaaaatagtagtattagacggttatagcgcaaacccgggcgatctgcaatgggacgcgctgcaagaatacggcgaactaacagtttacgaccgcacttcgccaagccaactcatagaaagagccggagatgccgactgcattctgacaaacaaagtggcaataagaaaggagcagatagacgctctgccgaaactgaaatatatcggtgtgctcgccacgggatataatataatagatataatgtacgcgcgcgagcgtggtatcatcgttacaaacatcccggcatatagcaccgacagcgtggctcagttggtattcgcacatatactgaccgttgcaagccacgtagaacattacgccggtgaaacccgaaatggcaaatggtcggcttgtaaggacttctgctactgggatactccgcttatagagcttgccggaaagactatcggaattgtcggtttgggcaacatcggcatgaaagtggcgcaattagctcgtgcattcggtatggatgtatatgcttacacaagcaaaaacagctctgacctgcctcacgacatacacaaaaccactctcgatggacttctatcgataagcgatatcctatcattgcactgccctctcaacgattccacacgcgaaatgataaacgccacggctctgcaaaaaatcaaaaaaggcgcaatactcgtgaatacgggccgtggcccgctcataaacgaacatgatgtggccgccgcgctacaggacgggactctgaaagcctactgcgccgacgtattgagcaaggaaccgccattacccgacaatcctctgctgaaatgcgagaacgcatatatcactccacatattgcgtgggcaacaaaagaggcacgcacccgacttgtgcatacggccatagctaatataaaggcatttgttgagaatcatccacaaaacgttatatcataacagatagaacactatatcgcaacaaacaaaaagtaatataatgcttgtattcgacaccaagccgaacacaagcattattacattgcggcttacacaatgcacataaaacaccgccaaaaatctttacaaacgttaaaacaggccgtaaaaagcagtttttcgcaaaaaagtttcgcaatcatttggtggtatcacagaaaagttatacctttgcactcgcaattcagaaatgaataaagcacggctccgtagctcaactgaatagagcatctgactacggatcagaaggttccgggtttgaatcccagcggagtcactacaatgaagaagcgcatcgaatttcgatgcgcttcttccgtttatattgtcagtaaattacaaacgaaaaacaacgaatatttagaatcaccttttggagttagaatataaaaaagtccaccgttaaggacgatggacgaacctgaatgttttcacaacggaataatccttattgtgatttgctaaaaattcattgcaaatatagtgttttttcatgatataagtcttatttcctcattatttttttatatttttgcgatataattagaaacttaaatcggaaagccacgaattatgaaaaagatattaggtcttgacttggggacaagcagcatcggatgggcaatagtaaatgagaaagaaaatgaaggtgaacaatcttctattataaaacttggagtgagggtgaaccctcttaccgttgatgaacaacgcaattttgaggcgggaaagccgattaccacaaatgcggacagaaccctgaaacgcagcatgagacgtaatctgcaaaggtataagctaagacgtgaaagtttattggagatattaaaatccaatcatttcataacagatgaaaccatgctcgcggagaacggcaacagaacaacctttgagacctacaggctcagagcgaaggctgccgttgaagagatttcattggaggagttggcaagagtgctcctgatgataaacaaaaagcgcggatataagagcagccgcaaggtgaatgctgatgatgagggtaaaatcatagacggtatggatgttgcccgcaagctctatgatgagaatattaccccgggacaatatgtcttagacacaatgagaagaggcaagcgctatattccagacttttaccgttctgatttgattgcggaattcgacagaatatggaattttcagaaacagttctatcctgaaatcctcacggatgaattaagagaagaactgaaaaacaagaacaagaaacagacatgggcaatatgcgccaaatcattctcgctggtaggaataaaacgggagccaaaaggcaatgagctgaaaaaagagaactaccaatggcgtgtcgaaagtatctcaaaacaaacagaccttgaaaggctcactattatattacaagaaattaacggacagataagcagttcaagcggttatcttggcgaaatcagcgacaggagcaaagaactttatttcaaacgtcagaccataggacaatatcttttggaaagacttgatacaaatccgaactatagtcttaagaacaaagtcttttatagacaggactatttggacgagtttgagaaaatatgggaaacacaggccaaattccatgcggagcttacagacaagttaaagcgtgaaatacgcgatgttgtaatattctatcaacgtccgttgaagtcacagaaaggactgataagtttctgcgagtttgagaaccgacagatagaagtaaccgttgacggcaagaagaaactgaagacaataggaatgcgtgtgtgtccgaagtcctcaccattgttccaagagtttaagatttggcaaatacttaacaacatacaagtgtcgggaaaggttatccctgtgcaggacacagacctgttcggaacaacatcccgtatggaacaaggcaagcgttttctttatcaggacgagaaagagacgctgttctatgaattgaacatcaaagaaaagatgtcaaagaacgaggttcttaaactattgttcaagaaccacaaggagcttgaccttaactataaggatatagaaggcaaccggacaatggcggctttgataaaagcctgtcagacaataatagacatgagcggacatggagaatatgatttctccaagatgcaggcgaaagacgtgatgcatatcatagagactgtattccgcggtcttggattcaatacagacattctgcatttcgatgcttctgtcgaaggcaaggcgtttgacaaacaaccggcatatatgctttggcatctgctctattcttttgccggtgacaactctaaatccggaaacgagaaacttatcaataagatttctgaattatacggctttgataaagattacgcttcaataattgcaggaataaacctgcaacaggattatggcagtttgagttcaaaagctatgcgcaagatactgccacacatgaaggaaggacttgaatacagcgtggcctgcggatatgcaggataccgtcattcgagtgaatctctgacgagggaagaacttgacaataaggtcctgaaagaccgtttggggcttttgccacgtaacagcctgcgcaatcctgttgtggagaagattcttaatcagatgataaacgtggtgaactctgtagtcgaggaatatggtaaacccgatgaaatcagaatagaacttgcacgcgaactgaagaagagcgcaagtgaacgcgaggaacttaccaaagcaataaacaagaccacaaaagaacacgatgaatataagaaaatactacagacagaatttggtattgccaatgtaagccgtaatgacattatcagatataaactgtatatggaactaaaagataatggattcaaaacactatattccaacacttatattccacaggaaaaactgttcagcaaggagttcgatatagaacatatcattccacaggcaaaactgtttgacgattctttctcgaacaagacaatagaagcccgtgcaataaatatagaaaagagcaatgccaccgcttacgatttcgtttgtagtaaatatgattcagaggaaataaaaagatacgaagtgagaatagaagagctattccgtaagggcatcataagcaagacgaaacgcgacaagttgatgatgagggaggctgacattccagacggattcatagaacgtgacttacgcgattcacaatacatagcaaagaaggcacgtgagatactgtgtgatatagcaagggaggttgttgcgacaaccggttctgtaacttcacgtctgcgcgaagactggcagttggttgatgtgatgaaagaactgaactgggacaagtatgacaggcttggacttactgaaataatagaagacaaagatggaaggaagatacggcgtattacagactggacaaaacgcaacgaccaccgtcatcatgcaatggacgcactgaccatagcttttactaaacggagttatatacaatatctcaacaacatgaatgcaagaagcgacaagagtagcagcatttatgccatagaaaaaatgaactttaccgtgataacggcaaactgaagttctgccctcctataccgcttgatgtgttcagggcagaggcgaaacaccatctcgacaatattcttgtgtctataaaggcaaagaataaggttgttacaagaaacttgaatgtcacaaagacaagaaacggtaagaataaaaaaatgcaactgacaccacgcggacagttgcataacgagacaatatacggtaagatcaaacaatatgcgacaaaagaagaaagggtgaacgcctcattcacagaagaaaagattgctacagttgccaaccagaaataccgtatggcactgctcgagaggctaaaaagatataatggaaattcaaagaaggcgtttacagggagcaatgcgcttcagaaaaatccaatatatctggatgatatgcacactatgactgtgccggaaaaggtaacgaccgtgacttttgaagagatatatacaataaggaaacctaaattccgcagcattttagtttaacttattttataagtacctgagcaacaa

SEQ ID NO: 2487 - DNA, 5131 bp, synthetic construct
  variation 4179..4299: note = n is a, c, g, or t
  variation 4563..4690: note = n is a, c, g, or t
  source 1..5131: mol_type = other DNA
  variation 947..1067: note = n is a, c, g, or t
  variation 1307..1458: note = n is a, c, g, or t
  misc_feature 1..5131: note = Synthetic
  variation 2511..2512: note = n is a, c, g, or t
cccccgaagaaaggcgagggcgtccttaaatgttttcacaacggaataatccttattgtgaattgctttcagattgtaaatatagaaaataaaatataaaaatagatttttatgaaacgaatattaggtttggatttgggcacaacctcaatcggctggagccttgtggaagaaaatgaaaataaagaagcttctagaataattaaacttggagtgcgcgttaaccccttgaccaccgatgaaaaaataaattttgaaggtggcaagcccatctcaaccaatgccgacagaaccctgaaacgcggcgctagaagaaatttagatcgttaccaattacgtagagatacactgattgaaattctcataaaaaacgatttgattacatcagatacccccttgaccgagataggaaagaatactacccatcaaacgctctttttaagagcgaaatctgccaaagaggaaatttccttagaagatttttcaaaagtcttacttgccctaaataaaaaacgaggctataaaagcagtcgaaaaaccaaattagaagccgatggcgtagcgattgacgggatggcggttgcaaaaatcctatacaatgagaaattaacccctgggcaatacgttctaaatctgctcactgaaaacaagaaacacatcccggacttttatccttcagacctaaaggcagaattcaaggctatatggaaggttcaaaatcaatattatcccgaaaaattaaccgaggaattgtaccagaacctacaagggaaaaataaatctcaaacttgggctatctgcaagaaaccatttggcatagtcggcgtaaaacttcatggaaacaagatcgaacagcgattgcaacgttatgggtttagagtaaaaggactttcagaaaaattagacttggagcatttagcgattgcatttcaggacataaataatgnnnnnnnnnnnnnnnnnnnnnnnnnnnnnnnnnnnnnnnnnnnnnnnnnnnnnnnnnnnnnnnnnnnnnnnnnnnnnnnnnnnnnnnnnnnnnnnnnnnnnnnnnnnnnnnnnnnnnnnnngaaagattagcgatagaagtaaggttttgtatctcaataaattgaccgtcggggaatatcaatatcaacaaattgccgccaacccgcacgtttcattaaaaaaccaagtgttttaccgtcaagattatttagatgaattcgagcaagtttgggaaacacaagctaaataccactacaaactgactcctaaattaaaggaagaaatcagagacaccataattttttaccagcgccccctannnnnnnnnnnnnnnnnnnnnnnnnnnnnnnnnnnnnnnnnnnnnnnnnnnnnnnnnnnnnnnnnnnnnnnnnnnnnnnnnnnnnnnnnnnnnnnnnnnnnnnnnnnnnnnnnnnnnnnnnnnnnnnnnnnnnnnnnnnnnnnnnnnnnnnnagcgccccctaaaatcgcagaaaggactattgagtttttgcttgtttgaaagttggcaacaaacctattacgacgaaataaaacaaaaggaacgaaaaagaaccattggccatcgggttgtcccaaaatcttcgccacttttccaaaagtttaaaatttggcaaaatataaatgatttaaggttagtgccacaacgggatttggccatggatttgtttgctgtcgatgctataggcaagtacaagaaaaaccaacttgtggaactggaagaagatgacagaaaacttctttttgaagaagccaatttaagaggcaacctgacggaaactgccgtattaaaacttctaggattatcgccaaaagactggaaaatcaattttaaggaaggcatcaatggaaatacgaccaatcaaaaacttttcaatgtatatcaggaaatagcaaaacgggctggctacggaattggttgggaaaaattatccgcaaaggaaattgtaagtgaattaaaaatcgtttttacggaattaggaatcgatccaagtatcttggattttgattccacattgaaaaaaaatgcctttccaaaacaggcaggttatcaactttggcatttgctatattccgcaagcgatgatggaataatttcggaagaagaccgcttaacttacggaaacaatgatgtgaacctaaagaaaaaactccatcaaaatttcggcttcaagccggagtatgccacactactggccaatgttactttttcgaatgattacggaaatctatcgtcgcgtgccattcgcaaaatattgccacatctacaggaaggaaaagattattacgaagcttgccaagctgttggctataatcattccaacagcttgacaaaagaagagctggaggggagggttttaaagtctaaaatggaattgctcgaaaaaaacagtttgcggaatcctgtggtggaaaaaatcttgaaccaaatggtaaacctcatcaatcaagttattgatgaatatggcaaacctgacgaagttagaatagaattggccagagaanngaaaaaaacagccaaggaacgggaagaagccagtcgatacatcacatcagcaaccaaagttaatttggaaatcgcaaagcaaattgaacaagaatttggctttacccctaccaaaaacgatatcgtaaaatacaagttatgggaagaacttaaacctttaggtcataaaacaattttttccaacagatatattgagaagaaggacattttttcgaagaagattgatgttgagcatatcttgcccaaagctctaatttttgatgattctttctcaaacaaaaccctttgttatagagaggtgaacataaagaaagccaaccgaactgcactggactttattacgcaagatcaaaatgcagatgtagaagaatacatcaaacgggtagaatccctttatgaaaaaggtaacggaacaataagcaaggggaaatattataaattactgaaaggcgcgaaagatatcaaggaagggtttattgaaagagacctgcgcaacagccaatatatcgctaaaaaagcacggaatattttgctggaagtctttaaaacggtaacgccaaccacaggaatgattaccgataaactgcgtgaagattggggcgttatcaatgtgttgaaagaactcaacatgccgaaatatagagctctgggtttaatcgaaagagaagaacgaaagaacaataaaacgatcgaaaaaataaaagactggtccaagcgaaacgaccataggcaccatgccatggacgccttggtcgtagcttttaccacctacgaccacattcaatacattaacaatctaaatgcgcgccgcgatgaaaatcatgaaatgcatgcaagcatctctgggatagagaaaaaaataacgtactcagaaaaagacaaaaatggtcggtccaaaagaaaattcctggaacccttaccagattttagaagtgaagcaaaaaagcatttgcaatccattttagtatcattcaaagcaaaaaataaagcagttacccgaaatatcaataagacaaaaaagaaaaacggcttcaataaaaaactggaactcactcctcgcggacaactacataaagaaaccgtatatggaaaatcaaaattccccaagcccaagccaaccaaactaaataaacggtttacgcttgatgaagctaaaatgataattgatttccagcaaagaaatctggttttggaccatttaaagaaacacgacaattccccggaaatggctttcagttcaaaaatcttaaaagcagaacccctactctggaaccaggaaccgctcaatgaagtgctttgctttgaagaagtatatactattagaaaggatatatcgtccgatttaaaactggataaagtggttgaccaaggcgttagaagaatcctcgaacaacgaaaaaaggaatttggcggaaacgcgaaagaagccttttcaaatttagacaaaaaccccatttggctaaataaagcaaaaggcatctccatcaaaagagttacgattacaggtgtgagcaatgccgaagcactccattataaaagagactatctaggtaatagcattgagaatgaaaatggagaaaaaatacctgcagattttgtaagtctgggcaacaaccaccacgtatctatataccgcgatgaaaaaggaaatcttcaggaaaaagtgnnnnnnnnnnnnnnnnnnnnnnnnnnnnnnnnnnnnnnnnnnnnnnnnnnnnnnnnnnnnnnnnnnnnnnnnnnnnnnnnnnnnnnnnnnnnnnnnnnnnnnnnnnnnnnnnnnnnnnnnnttgaagcagtagcaagaaaaaaccaaaacctacccattattgataaagattacaacgcccatattggctggaaatttttgtttaccatgaagcaaaatgaaatgttcatattccctgcggaagatttcaacccgaaggaaattgacctgatggatgaaaaatacgcaaagttaattgtgccaaacctttttagagtacaaaagattgctaccaaaaactatatgttcagacatcattacgaagccgaagttacaaaccaactgnnnnnnnnnnnnnnnnnnnnnnnnnnnnnnnnnnnnnnnnnnnnnnnnnnnnnnnnnnnnnnnnnnnnnnnnnnnnnnnnnnnnnnnnnnnnnnnnnnnnnnnnnnnnnnnnnnnnnnnnnnnnnnnnagaaaatttagttaaagttagaataaatcacattggcaaaattgtccaagtaggagaatattaaaaagtacattctatgatcaaacgcaccctctttttcggcaaccccgcctacctcagcacccggaaccagcagttggtcgtccattttcccaatggagaaaaagaggacgccaccgtgcccatagaagatctgggctatattgtcctggaagaccctcaaattaccatcaccaatggtttgctcatgaaattggtacaaaacaagacggccgtaattacatgcgaccagcagcacctgccctgctcctttttgcagccccttgtggggcatactgagcaaaccgagcgcatccgccaccaacttgatgcgagcctgcctttaaagaaaaacctgtggcagcagaccgtacaggccaagatcgaaaaccaggcagccca

SEQ ID NO: 2488 - DNA, 4241 bp, synthetic construct
  misc_feature 1..4241: note = Synthetic
  source 1..4241: mol_type = other DNA
agcatctgcctttataaaaggagtcctatatggagacatagttttcactaagtccatttcttcaagataaaatccgtagtatctatttatagaccactttctaagagagttttccgttgcaggagtatcatcaaaaagaaaagaaaagttggacctaaagtttgccctaaatcctctccgatttttcaagagttcaaaatttggtcacaattaaacaacattacatacaataacgaaggttcacgaaagtctcaaggaatttctttggaattagaacaaatgcagtttctctatcaagagttgaattggaaagaaaaattaacggcaaatgaagtgatacgtttacttaatctaaaaggctaccaacttaattttaatgagattgaaggaaatcggaccaatgcatcctttatcaaagctttgaatgatttttttgtgaaagaaggacatgatgaattggttttatctaaaatgaattcagccgaattaattgatacgttaaaaaagttatttccaatctatgggattgatgtttctcttttaaatttcgatagcaatttaggcggacagaatattgaaaatcaagccttttataatttttggcatctactgtattcttttgaaggagacaattccaaaagcggaatcgacaagttgaaaactgcccttgaaactaaatttggatttccgttcgaatctaataccccgattacaaatataaaactttcagatgattatgggaacctctccgttcgcgctatgcgtaaaatcctaccttttctaaaggaaggcaatcgctatgatctagcttgtacacttgccggctacaaccattcgcattctgaaactaaagaggatttgtctactaaagttctattggatagacttgaaatcttacctaaaaatgaattaagaaacccggtggttgaaaagattttaaatcaaatgatcaatgtaataaataccattttcgaaacgtatggcaaacctgacgagatacgcattgagatggctcgtgagttgaaaaaaagcgctaaggaacgagaaaatgctaccaaggccatcagacaaattacagatgaacacataaaattaaaacgagaattacaggctgaatttggtttacccaacgtaagccggaatgacttaattcgttacaaattgtatcttgaattaaaagataatggattcaaaacgctttattcaaaccaaccaattgaccgttcgaaattgttcagttcggaatacgacattgagcacatcattccgcaatccaagttgttcgatgattctttttccaataaaacgattgaattacgctcagttaatctaaagaaaggcaatgatactgcgtttgactttattaataaagagtatggtgaagaaggacttaaacagtatgaggcaagagttaaagcacttttcggaaatcaacttggtaaaaaatcaaagtaccgcaagttactcatgagcgaaaccgaaattccgaaggattttatagaaagggaattgagagacactcaatacatagcaaaaaaagcaaaagatattctttctacggtggttcggaatgtttcaactactactgggtccattactgaaaaattaagggatgattggcaattagtggatattctcaaagaattgaattggaacaaatatgataaactaggcatgacggaaactaaagaaaatcgtcatggtcaaaaagtgaatcgtatcgtagactggaccaaaagaaacgaccatcggcaccatgctatggatgccattacggtcgcttttacgaaacgggaatacgtaaagtatttcaataatttgaatgcgaagagcgagaaagatggagaaatttataaaatactgaaaaccgaaacctattttgataaggatcaaaaaaggcgttttaaccccccgatgccattaacccaatttcgatcaagagcgaaggaacatttggaaaacacactcatttcctttaaagccaagaacaaagtttctactaaaaataagaatgcaattaaaacggcgaaaggtaaaataacgactattcaggatacacctaggggacaattacaccttgaaacggtatatgggtcatcgcaatattattcgtcaaaaattgagaaaattggggcaaatttcgatttagaaaaaattaataaagtagcaaactccaagtatcgcaaactattactaaaaagattggaagaaaatgggaatgaccccaagaaagcctttacaggagccaatagtttaagtaaaagacctatattcttaaatgcgttggaaacttacacactgccagaatcggtaaaattagttgagtttgatacccgttatacgataagaaaaccaattacaccggatataaaaattgataaagttatcgacaaaggaattcaactcattttacaagaacgcctcaatcaacacgatggagatgctaaaaaagcattctccaatctcgaggaaaatcccatttacttgaacaaagaaaaaggacttattttaaaacgggttactattcaaggggtcaacaatgccgttgcactacataataaaaaagatcattttggaaaagaagtgcgggatgcaaaaggcaatccaattcctgtagattttgtaaatacaggaaacaaccatcatgtggcgatttataaagatgaaaaaggtaatttacaggaagaggttgtctctttgtttgaggcaattaccagaaaaaatcaaggagtagaaatcatcaaaaaacaacacgaactaggttgggagtttttattcactatgaagcaaaacgagttttttgttttcccaaatgaagaaacgggtttcgatccgtcagaaattgacttattggacccttccaattttgctaaaattagcccaaacttatttagagtacaaaaaattggcaaaggtgattattggttccgtcatcatttggaaacagaacttattgatcgtattgaattgaacggttcatcatacaaaaggattagaaatccaaagtcaatgaatatttcaaaaaaaataagcctaaatcacataggtcgaattgtcaatgtcggtgaattctaaatggtcaaacgcacgcttcattttagcaatcctgcgcatttgtcgtttcaaaatgctcagctgttgattgaactcaaagacgaacttcgcacgtgtaaaaccattcctatcgaggacatcggtgttgttattttagaacatccgcaaatcacgctttccatgaaagttctggatgccttaatcaaagcgaatgtggctattgtgagttgcgatgaccattacatgccgtctggtatatttttaccccttgagggacaccacacccaaaccgaacgcatacgcaaccaattgaatgccagcgaacccttgaaaaaacagttgtggcagcaaaccattaaaatcaaaatcgcaaaccaagccaaggtcttggataaaatcgggttgaacggagcacgattaatggagcattcgcaaaaagtaaaaagtggcgatagcgggaatttagaagcccaagcggccgccttttactggaatcaactgtatggcagtgatttttttcgttcaagaaatcgaagcagtcccaatgcccaattgaactatggctattcgattcttcgttccttggtagcacgcgctttgagcgcctccggtatgtacccatcggtggggattcatcaccgcaataaatacaatgccttttgtttggccgacgatatgatggaaccctaccgccctttcgttgactggatggttttaaatctcaattacccggaggaagaggccggcttaacaaaagaccaaaaaatggaattactgaccattcctcaaatggacgtgcaaataactgacttaaaacgaccgctgtttcatgcggtgagcttaacaacagccagcttgtacaagtgttttgcaggggagattagaaaagtatcgtttccgaattttgaatgaatcacgaacgttttaatgcttatcgcaacatgtgggtcatggtgttatttgatttgccaacggaaactaaaaaagagcgacgcattgcccaacaatttcgtaaaggattacaacaagatggtttcatcatgtttcagttctccatctacatccgattttgccagagtgctgaaaatgcaacggtccacacgaaccgggtaaaagccttgcttccggaaaaagggaaggtgggaattttctccattaccgataaacaatttggccgcatggaaatc

SEQ ID NO: 2489 - DNA, 23258 bp, synthetic construct
  misc_feature 1..23258: note = Synthetic
  source 1..23258: mol_type = other DNA
gccaacgaggcgggcgaggtcaccaaactcttcgccgtcggatcgccatttgagttgggtaaggattaagggttcgaccttccgctaggggacaatttccacatttgcccagttattgccatgggccttcaggaatttggcgagggccttgctgcgtttctgataaccctcaacatcattgtcccatcggtcctttgcagacttgtggattgccccagcgacatcgcgcgtaatcttgtccctgagcagataaatacctttgcgctcggcatggattttagaaccatgatcagggtctatccaggtgttgatttgatcttcaaactcaagatcaaagctttctgcttcccccttcatccacttgcaggccgcatcgctcaacccatgtaccttatagccgccgcccacatccgaatgaacgccagggaaccacacctctttgaggtctatggtggagttgggctttaaatcaaagcgggtgacctggaaatcctcccgatcctcatcgatcgacatcgcatgccgcaagtgccgaataatgccgcttggagaggtgtcatgaaacaggaattccttcttgccaagtgttccccagaaaggaaccgggatccccaaggcgccaaccgtatcccacgcccccacaaatttgaccggggtcttatttgcgacagaataatccgcccgaaattgcttggccatatcttcgtctggatggctggatttggtgcgcttacggtacaaagcataagcttcgggaattcggatcgcgtgctcgcgctttagcagtccgcaattgcgaataaagccggtcagagagcgaaccgtataggcgccccggctgaagccgaagaaaaaaagctcatcccccggatcgtaattatgaacaatgaagcggtagcaatcctggatatttttgtcgatcccttcgcctgacacaccgcccatcagcttcttgcgatccgtcccaacaccccagtcatagaagacgacctgtttgctcccatcatccgcgacaggctttacgcttctggccatcatcaagacattggtcacaccctcttcttctggtgaattccatgtgccgtcagcaaagactacaatccgtttcatcttcccctcccccaaggttccagactaggtccaatttacattagaaacatattataagttgagttcgcaatgaaaacaactccacttggggttatttttgtttcttgggacataaatagaccgacaacaatcgggcttattctaggtggcccttcctagtcaaagaaggttgtcgagaataccacagctcctcagctaaatctccaatacggtttaatatttattagtaatatactaaataattgatttttaatgtttcggcctcggcagtgttttttttcaacagttagatttttatgaccgtgggagagaatattgagctctaataatctcagacgagagtatgaaaaagccttagcatttttttaaaaatcttagtgatgggatgtgtgttgtttcctcggatggcaaagttgtagaagtcagtaatcggttttgtgagatgctgggttattcgagtgacgagttaattggatcacagccagtattatgggatgaggctttaactgaaaaagagattgagtcgttaatcgaaaaaattctggtaggtgggcagcgagttgaatttcagacggttcataaaaagaaagacggcacgacattcatcgcttctgtaagtgcggcaccatttcattttgaggacgaacatctcatcatttgcttaacccgagatatctcagaacaacagcggttgcatacggcactgattgaaagtgagggcaagtatcgctcactcttcaataacatgatggatgaggttcacttctgggaagtggtccgggacgaaactggtgagatcaggaactggcgactgatagacataaaccctgccgctgtaaaatcttgggagatggaacgggaagacgtgattggcaaaacagctgacgttatcttctctcccgaggcggtcaaactcttcatgcccatggtcaatcgaatatttaaaactggcaagccttattcctggacgacttattttcccgacctggaccaacatctgcaaatgacaagtatccccttgggcgaatattttatctcaacaggatgggatattacctgggtgaaaaaacagcaagaagaggccgagttggcgagccaggtaaaatcagagtttctcgcgaccatgagccatgaactgcgaactccgttgaacgcgatcctgggttactcgcaaatgttacaaataggcgtatacgggtcattaaacagaaaacaagcggaagtcatcgagaatatcttgaacggtggcaatcatttatcgcggcttgtggacgacgttctggacctagcacgcatcgagtctaaccagttgcagctaaaactcgaagattttgatgcaagtgaaacaatcgaagaatgtgttcaatgggtccataaaaaatgtataagccgcaatattcgcatagacgtctcacttgaagatcgccaaaaacatgccgttagaagcgacaaagttcgcttagctcaggtcctgtctaatctgttatccaatgcagagcgctataacatcgacggcggcatgattgaggtcaaggcagagttgttagaaaatgggtatttacgtcttgcggtcaaagataccgggatcggcatccaaccggaaaaccgaaatcggattttcgatctatttgatcgcggcattgataatcctgaagtcgctggaggaggaagcggcataggtctcgcagtttctaaaagcatcatagaaaggctcggaggttggatcgactataagagcgagattggcatcggaagcgaattctggattgcagtaccgttggccgcgaataaggacgccttgatttggaccgatgatttgcgtgttggtgttgatgagattgaccaagaccatcagcaaatcttcgttttaatcaatcgggcgtcacgcctaagtctggagaaaggccaagtcgctgagatcattgagcaaatgatcgcttacactcgataccattttaagcgtgaagaagtcatcatgcagattgccggatatcccgatatagacaatcacttaaacggtcatcgcaagctggaagaacaagtcgacgagctcgccaagtcttggcgggaccaaccgacccccgaaactttacataagttgcaacattttcttcgcgattggtggcgcagtcacatattagcgcgggacatcagcatcgctaatcatgcagatggtaaacaaagagaaatcaaggaagcacttctcgcccggcggctcaatcggttcccaaatacagtttccgtaagggaaaacactcttaagagagtacctccagatcccgaatttaacgcctgaggcgaggttcagtaacagacccagatcgctcggattaataaaaacactaaaaacttaaaacacaaaaaccgatttatacatcaagacgacagttggcagcttcggggcgagctgcccccccggatgtgcggattgtatttccgactaaaaacctccctttccctcaaaggaaacaggcattgccagatgaggtccctttttcaaaatatcctatacttctgaaactgacgcgaatatgaatgagggaacaagttttgaaaatagcgtcaaaaaccctcgcgagttaaaccgttcacgatgactaagtcgacatcccaccattgcccagcgccgctcggcggaaacatagttgcctgcgggggtatcaagccgtgctgacatttgccgttgcagtttttttcctgttgattacgccggggcctggggttctcacgaccgcaggtgttggggccgcgtttggccgcaaggcaggattgcagtatgtttcaggattatgcgtcggcaatgcgcttgtcgggcttgccgtggtcacagggttggcggccatcatcttcgccgttccctgggtccgaaccattctcctggtcctgtcggcgctgtatctgtcctatctggcgttccggattgccacagcgggatcaaaaatcgcctttattgaagcggacagccaacccggcttcttttccggcgtcaccctgcaggccataaaccccaaagcctacgcggtgaatacggccctcttttccggatttgccatcctgccggatgcgttattgatggagaccgtgatcaagttcgggatcctcaacgcaatctggatccccattcatctgttgtggctggccgcagggatttatgtcgagcgcatggagctcgcgccccacatccagtttcgggtcaatatgatgatggcctgctccttgatggtggttgtcgttctggctatttattcgttgctttaagggttattctgacgttttttgtggttagtaaagcaagtgttgggcaggtatagatcctgagcagcaaacagcgtcgcccagagctgcatgtcttcatattcttttcacagaagaaaaaggtggtagtttcggtacggacttgaaccctgagacgccgattttaacaggatttcatttatacgttaaaacaacaagagcaccaaaccgcgcaatttagaatatcaaaaatacactgttgtgggaaactcctgcgtatccctaaactccaaattcgcataaggaactgcaagcccagacggaatatctacccaggtattttctttatcgggccaaaataagcgatattcgttttgccatttatcttctattgattttgtaaatggatcccttgaaatcccatgtacatagttacatggtccttggttactctgatcccctacagcgttatccaacaccttctttaatgcatcaatatctaaaatcttgacgcaataatgttttttgaatttcagggcagttggtactgaatagcggtttgagcagcagaagacgagaccatcccacgtctcgactctaccaacatgcattctttctataatcccctcaaaaggggagtatgtattctcaaatgtacaattttcgattagaacttttttagctttcaaatttaagggcccaactgagactctattaccatccctaacgacaggatttcttatgctttggcttacttcgattccttgaattgtaaggccttcatccagagtttgagttccatgcctttcttgttcatagtaggtactagctaccttcaggggaattgaaccgccatttacccaagtggtcgcatgcgcaccctccgacaaatgtaaatatttctccaaattccaccccctcaagtttcaaattctatccaatattttttcgccgcaaagctcgccatcgccacacatttaaataatcttatacaataatttttcgataaacaaataggatggaattgctttttgagggacgaaaccttaagtgatttcttgaataagagggcagcacagagaactacctagagtgaaaaagataccaacctgaaaaggtgaacacaaaaatatcaaaaaattgtattcaatccattaggaaaaattggtagcggaggagggacttgaacccccgacacgcggattatgattccgattggttcccgctaaaattttgacatatcaagtatatttttaaatttagcgcggggtaggttctgatcaatctggtcacgaaaccaagtacgtatttcctgcatttttcgcaaataactgtctttttgctctctttcaatttcagacaagtcttcacctgcaaacgctctagctcgcagaggctccctcagattttggttgatgaaaaaatcagtcgattgttccgaaatttctttaatataatctatttgttcttcatcaagaatgaactcaagttgtctacaaagaaagttagcctgtctcactgcatcttcatttggttttccttcacgcaaaaagcagtcaaagcaatgtataaccgcttggtacacttccattcgcttttcgaataaagcctcatcacgtttcgcaaaaaacaatcttcggctaagtcgatgagttctaaattgaagcaaaaactgcgaaactgtaaaaactgcaattgtagcagaggatacagccattacgtaatcagttacgctagcgttctcagcatccaaaaaatccaataacgacaatatgacaacagcaaaaatcgcaataactgctattgtttcagctttcccgaacaccgtttcttgatcaaaattggacacactatctcctaaactattctcaataatgcaaactattattactaactatgcagcccacaaatcctgttccatcttggccattaactcaacgtcctctgaagggtcatggaaaagatgtccatacacatcatacgtcatattaatagatgaatgccctagtatagattgaatttttttaggggaccagctttgctcaatatagagggaagcagcggcatgccggagacaatggaaactgaatttcggcttactatttgcttttgtgatcttgcattttctcatcaacggattaaacaccctattcgtgatgtttgagagcgtttcgacgttccctgccccatttggaaagaccaatcgtaattcacccccaggacagcgctgacgccattctaatagtgtttcacataccttgggtgtcattggtatgtcacggcgcccagcacggctcttagggttccccatctcgttataacgatccgcgcgctgacgtactttgatcacccgattttcaaaatctatgtgatcccaggtcaaacctcggagctcgcttgcgcgcatacccgtcagaatcgctgtaactattagaggcttgtgacgttccggagctttctcaatcaaggctttgatctctgcttttgtggggatgatcttttcagcttcattgcgacgagaacgaggtagccttatgtcattggccagattaacctcaatcatgtctcgagagacagcttcagcaagtattgcctttaggctcgcaagtaccttcttcgtcatcgcgagggagttcttctcaagcatctcatcaatgaactcttgtagctgagagcgcttcaattcattgagccgcagatccccgatcttcggctcaatatgatgatcaaaatgcccttgataagatcgaatagtcgcgcgttctaatccacgtaaccggcatcgtttcaaccatatctccgcggcatctcttattgtatgttcctgtgtagtcattgaaacctctttcctcacaatttcgtattcaatgacaacattctaggacgagcggaaattggtgtcgggctctttcccggcccgatcaagattagttctggctggtgtccagacggacacaaggcttatcatttttttgtataaaatccgcgtatacactgattttatacatctgcaaacaagaatcgaagatcgcagaaatctggcctttttagcccgacagacaagacctaagatgctataattgcatgtataaaacagatagagaatttgagagaattacaaacaaagatagccaaaatgaaaacattgaagctcaaaacaacaaagcaaaaaaatgaataatttgagttacatccgttcacacctcaactgctccttaacaccgtcctttagtgactataaaattttttaggattaagagctttgctccttggaaaaaagaagagtgctgggcgttaagtactaaaccgatttacagaaacacaacaaactcacacctctcatcagtatatgaggtccaattattcctacgacatgtaaaccccttacctcccgccccttcgatcctggaacagcaccgatcgttcccaggcaatggagacatattaaagagaaagacaggttatggttttatgctgccgcactcaactcaatgggaagccctgtcacgttcacagtacacttcactcaggacatccaccggcgcatggacagtcaaacatcgattaagcactacattgcccagaggtttagaagacagtttcccaaagttccttatttctttgtcatcgaactcaataaggggacttccagaaagcatatacatggtgcattacatggaggatccctctcagaagaggaaattcgaactggtcttcaaaaaattagtggcgacaagaggaaactgaaagggtttactgcggagtttttctatgaccggaaagccactcatacggataaaccaaactgggatcttgggtttcaagggaaaaatggaattgcgggctggtctcagtattgcgcaaaggaaactaaaaagacgcaatccattctttgcactgataattctctgatttcatgctcacaaagcttaaatcgagaggcaaagcgcatttatacaatcaaccacgtaatttgaatattttcaataaacgctgggcaacttgagaagaaataatttagattgctagctatcttcacaagtaaggcattcgccggaagtcagccccagtgtcaaacaaagcaatatcatttttctacgccaggagacgccctgaaaggcagttttggaaccagccaataatgtatcctggaactaaatttcagaatataacgcaccaatactataggttaaagcacgatttgcagcctgcacagaggtcctatttcaaatactcttctggtaaaacgcataatttttttaatgatcaagagttcaaagaagctctatgtgaagctgagaaaagtaacagcttattgctgatacatgatattttctcgcttctgtggcttatgaaaagtgatgaaaatgaaattgaaaatgtgttgggcgtattgtttagcgataaggttgaaataatagatacactttatgggataccaataaggataccacctgaaacaatttttaccccactaaattacagaatcaaaatggaagaaggttacagaagatggctggggaagcaaagccacctcacacatgaaaacgacacgaccaaagcatcatcagttgcagccagttgggccagatatactcgaagcattttaaaaccaaaaattgaggcggttatcgctgaactaaaaaaggctaaaaaaccgtcgatacaaacaatcgctgatgaactaaatgcacggggaataagaacccaaaatggtagggtctggtcgcgaggcaatttagctcacacacttaaaaagctagaaatcgaccatatgaattgagaactaaaagcttacgaaatgtaaaaatgtctcgaaatgtctcactttgtcacggctatttcggcttttttcatttgcatgctcctcacatgcgtccgctatcaaagcgaagtcctaggaataaacagggatgctttaggggcatggctccagagttttaagagacaccaatcggatccttacagtaccagtccaccatatatttcgacactctagatataaggattacatctcaatatcttttggtcacagcccaaggacctttgattatttttcaaaccttatagatagaaaccaaagtaagtcacgagtgacttaagttattgtttttgtttatttttttaatctttcctctataatctcgacaatgaactggaggtcagatcaatgcaatttcgaatactagattttctcatttgctcatttcgagctcatccatttgaaatagtggttttctccctaatcatcgtcttattgggcttgatgttgctcatgattacagccattccaggcgatgactggcgatacctacttgagttcattaagttcttatcttcttttatggtgggaaggctgatttttctactcgcacgttagaagtcctagtcggcaaatatagacatcccatgccgctagatttagggaatatacaaaatctcagttgagaaagtggcgcatagaagaagcaaattaagagcatagaagcaaatagaacggcttacgcttaaagcataaaccgccctattagttacattttgtggactaaatccttgttaacggaaagcccaacttttccagagtgctacaaaatgttcgttgatcttactagacgaaagaaattaatgcaaccataatgcgtttaaagggggaaacatgcaaacacggacaccatggagattaggaattgatttgggaaccaattcactcggctgggcagcattagagctaaatcatgccaagactacacccattggtattgttgccagtggtgttcgaattttctcagatggacgcaatcccaaagacaaacaatccaacgctgcgaaacggcgcgaaccccgcagcgcaagaaaaaatagagatcgagccaaacgccgaaccgagcgactcatgcgcgaactcactgaattcaaactcatgccgacggatccttcagagcgcaaaaaacttgaaggtggaaaacacactcttttagaggatactgatccatggattctgcgctaccgagccctcaacgaagaaatcagcctattccagttggggcgcgcgattttccacctccaccaacggagaggtttcaagtctaaccgaaaaacagaccgtgcggattcagaaagcggcaaggtctttgaggcaacacagcgaacatctgttgcattggaggagaatgatgcccgcacattgggcgagctgtttgggcactcccgatacgaagctgcttgcttcaacaaaacggcgccaaagggtgagcgtaaaccacaacccctcgcccgtgtcagaaaatccggatccggatcaaaatggcagtatgattattacccaactcgcgcactgatcatggaagagtttcatctcatctgggaagctcaaaagaaataccatccagaagtcctaacagatgaagcctacgcccgactggcagacacaatagaatggcaacacccgctcaaagcccaaccagtaggacgatgcaccctcctaccggaagaagaacgagccgccaaggcctatcctgtgtatcaacgggcacggatccttcaggaagtaaacgcattgagagtttcagatgcgggaaaagctgaatacgctctttccatcgagcagcgcaacaaggttgttaatcgactgattactccaacaagtaagactgggaaagtcacatttaagcagctaaagaagctgcttggtttagaagctgatgtcttattcaatttggagtctgataagcgtcaagagctccagggagacgaaacagctgccaaacttatgcaaccggaccgttggggactagcatggctggaactaaccgctgatcagcaacaccagatcgtttaccaacttcttcacgaagagaatgaggaagccctgatcaaatggctttgtaacacttgggaactcagtccggaacaagcctatcaagtatccaactgtcccctacccgatggccatggaagacttagcctgaaagctctcgaaaaaatagtccctgcacttgagaatgacgtgatcgtctattctgaggcggtagaacgcgccgggctcggcagccacagccaatttgcaaccggcgagatctttgacgatgggcttccctattacggttacattcttgagagatcagttgcctttggctcaggagatccaaatgatcctgacgaaaaacgctatggaaaagttgcaaatccaactgttcatgtcgctctcaatcaaatcagagcggtggtcaatgacctgatgagacgctttggcacgccagaggaaatcgtggttgaattggcgcgggatcttcctctatctgcaaaacgcaaaagcgagctggaaaagctgcaaagggaaaatcaggacgcgaataataaacgaagagaaatcctagatgaacttggggtacaagacagctacgagaaccgcatgcgattgcgcctttatgaagacctgaaggcccttgacaaatgctgtcccttctcaggagagcccatcagcttaacgaatttgttctctgatcgggtcgaggtagagcatattcttccgttttccatcacttttgatgatagttatgggaacaagacacttgctacgcgaaaagccaaccgggacaagggcaagaaagcaccctatgacgctttcggccactctcccaacggatatgactggcaagcaatagcggatcgggcgacagaactcccctataacaaacgctggcgatttagcccggacgcattaaagcgatacacggaatttgaagggggctttcttgcccggcaactgacagacacacaatatatctccaggctcaccaaatcctacctagaagccctgtacgggggtcaggggtacaaaggggccaaaaaccgtgtccgcgtcattccaggccgtctgacggccgatctacgacatgagtggggattaaacgcggttttgagaggacataacgagccggaggcagaggcccagagaaagaaccgcaacgatcaccgccatcatgcgattgatgcgattgtggccggatgtacggatcagagactggttcagcatatcgcaacacaggccaaaaagaatgaagacaatttcagtgaaaagctaatggcaggtattgcagagccttgggaggggtttcgcgaggatgtggaacagtcagttcgcgacataatcgtcagccatcagccggaccatggcattcaggccgccatgcataacgacaccgcctatggcattccaaaaggcgaagaaggacagccagataagaaaggcgttcgcacagttgtcacccgcaaaccattggatagcgacagctttaagaagcaggaggatctggagaaaattcgtgaccccgacattcgcgaacatctgatgtccgaaacggccggattgactggaaacagcttcaaggaagccctcctcgcagcagggaatgccatgagcccgccggtatacaaaatccgtatcgaagaaaagctgcgcgtcattccaatgaaagatacaaagggcaaggaatacaaatcttataagggggatggcaattactgctacgacatctggaagacaaataccggaaaatggacgggcgaagtcatctcaaccttccaggcctatcaactggccagaaaagatgaaaactggtggcaaaagccggttggacagcaaggtcagaagctgctgatgcgacttcgcaaaaatgactacctgaaaatccatcatgaaaaccgagacatcattgtccaggttgtgaaatttactgatggtactcttgctttagcagagcatatggaagcaaatgtagatgcacgcgtgcgggacaaggatgatgagttaaagttcatattcaagtcccctagctctttacaaaatgccaacgcagtgctcttaaccgttagtccatcaggagtttccaaatcacatcaaattagagaataaataaaaatttaactcaatctaatatatcttttcctacacaagtgaggggaaaagatgaaaaaccgtgtcgtcgaaatatcctcggacggggcacacctgtctgtcgaccgggggtttctgtcagttgcaatgggcagggaatgtgttggaaaggttgccattgaagatatgtctgccttgatcattcgcggacatggcgcgtctttttcagccaatatctgcgcccgactggcagacgtcaatgtaccaattgtcatctgcaacaccaaccagtcacctgcttcggtgatctggcctgtcagcggtcatttcacacaaggcctgaccatgcaggcccaagccgttgcaaacaaaccgatgcaaaagcggttatgggcacagttggtcaagagtaaaattgaaaatcaggccgaagtcctaagattatacaaccaagaattcgaagacattgcctctatggctggtcgcgtcaaatcaggagatatagataatctggaagcgcaggcagcccgaaaatactggaagcggctaatgggagaagattttatacgaagcagccaccaaggagcaatcaataccgccctgaattatgggtacaccattttaagggcagcgacagcccggtccctgctggcggcaggccttcacccttccctctcaattcaccatcaaagcaagggagatgccctgcgcctcgcagatgatctaatggagccatatcgtccttgggttgatgatcgagtcaaacgaatttccgagcaaattgagggacaggagttttccctgacgcctcaacataaagcggcactcgcagcggtgctgacgatagatatgcaagctgctgaaggggcgagcccgatgcaagtctgcatggaccgaatggcccagtccctcgcccaggtttttctcggcaatcgaaagaagctggaattaccagccccaccaattcccttaacacttggccagccaatataatggcacgtcagagatacacagaactgagcggatataaattcatgtgggtgatggtgttattcgatctgccgaccgcaacgaagaaagaacggtatcactataccaaattccgcaacttcctgcttgataacgcctttgagatggctcaatattctgtatatgtgcgacacacctctggcaaagatgccgtgcaggcaattattcgaaaaatcgaacgcgccatgccaccaatgggaaaagtagacatcttacaatttacggacaaacaatatgagaacatcgtgtgttttagagggaatcagcgcagattatcccttaaaaacccggaacagttcattctattttaaaaaataacgatatgttttttgtcatttcaaaacccaataaatctcgttatttcaataccttatattgcgatcagttatagcactctggaaaagttgagccaaccgcaacatatcctgcaacatagtcaattgcgaccccgttatagcactctggaaaagttgagccaaccgcaacagtggcttcgggggatgcatgggcagacttgttatagcactctggaaaagttgagccaaccgcaacagatggaaaccaagctcccaagcttcaatagttatagcactctggaaaagttgagccaaccgcaactaacccaggatgatccgaccggctccccgagttatagcactctggaaaagttgagccaaccgcaactatgaaagttgaattaacagataaatttgagttatagcactctggaaaagttgagccaaccgcaacagatggaaaccaagctcccaagcttcaatagttatagcactctggaaaagttgagccaaccgcaacacggttggtttatgggtacaagacgaagcggttatagcactctggaaaagttgagccaaccgcaactcaataccctgaatggtaattacctgtcaggttatagcactctggaaaagttgagccaaccgcaacatccgcgcttgtttcttgtgctcctcgatcgttatagcactctggaaaagttgagccaaccgcaactaatatatagtgtggtgctgactggctggagttatagcactctggaaaagttgagccaaccgcaacatataaggtccgaacctttaccagcttgccgttatagcactctggaaaagttgagccaaccgcaacgaagacaagctaatggttctggaagcggcagttatagcactctggaaaagttgagccaaccgcaaccagttggtcagggtctagtgaatagtgcaagttatagcactctggaaaagttgagccaaccgcaactcattgagctgaaggcaccgaacggaagacgttatagcactctggataagttgagccaaccgcaacttgaaaccgctccgccataaagcgaagtgagttatagcactctggaaaagttgagccaaccgcaaccaatttgccaagggtggccgcccaccggttgttatagcactctggaaaagttgagccaaccgcaacgcggtgatttccgacgcctttgtcgccctcgttatagcactctggaaaagttgagccaaccgcaactggggcctccctcaatacaccttgctagtagttatagcactctggaaaagttgagccaaccgaaacctcggcgcggcttttgcctcaacgcaaaaggttatagcactctggaaaagttgagccaaccgcaactggcattaccaagacccccatttggatttgttatagcactctggaaaagtataaccaaaaccaaaagtattcttacttaaaggaattttggtagcggaggagggacttgaacccccgacacgcggattatgattccgctgctctaaccagctgagctactccgccacacgaagaacggccgtggatcaggccgtctggagcccggtttttagggtcttttgctgaggctgtcaagcgaagaaatcaacaaaattagctgcaggattagcgcaggcgtgaacggcccggatgttgcggatcttgaagacctgaaaagaggtcatcggcggcaagtcgttaagcaacctcgagggtaagcggtgcttctgttccagcgatccagccaccgcccaaaaggcgatccccgtcatacatgacacaggcctgcccagcagaaacaccggcttcgggctctgtcaggtgaacctcggcccagccattggccgcaccataaacggttgccgggaacggatcctgcgtagagcgcaccttgatcatgacctctgtgccctgatcagacagcggctcatcaccaatccagttcatttcccgaaggctgagcttggagaccagcagggcttcgcgcggtccgaccacgacccggtttccttccgggtccagccgcaccacatacagcggatcgccaaccgcaatgccaaggccacggcgctgcccaatggtgtagttgatgatgccattgtgacttcccagaaccttaccggaaagatcgacaatgtccccttcccgaccggcgcctgggcgaatacgctcaatcacgctggcataattgccattgggaacgaagcagatatcctgactttcaggcttggccgcaacggcgagattgtatttttctgccagcgcccgggtttcttccttggttagaccgccaagaggaaaccgcagataatccgcctgctcctgcgtcgtcgcaaaaaggaaatagctctgatccttgatggcatttgcaccgcgatatagacgagcgccgctaaggccgccttcgcggcggatataatgcccggtcgccagggcaacggcgcctagatcctgagaggtttccagcaaatcgcggaatttcacggtttgattacagcgcacgcacgggacaggggtttcgccgcgcagataactgtcggcaaattcttccatcacactgtcttgaaagcggctttcataatccagcacataatggggaatgccaatggcatcagcgacccggcgggcatcgtgaatatcctgcccggcacaacaggcgccttttttctgaaccgcaacgccatgatcataaagctgcagcgtgatcccgaccacgtcatagccctgatctttcaaaagcgcagccgtaaccgagctgtccacgccgcctgacatggcgacgacaacgcgggtatcttccggtgctgtatcaaaacctaatgaattcatggcgcgcaatataggctggtttttagcggatgcaagtataaccgtcacactatagccatgcaaaaaaggcatccgtcccttgggacgagatgcctttctctggagatgttccttttttaaggcgtactagctgagataattcagaagcgttgtccgattgagctgggagaggacgttataagacgcctcaagcgcaaagttcgcctcgttcaacttcgtgatcgcttcggcggcatccacatcctcaatattgctgatgaagattttggtttgtgtgatctgcacatcgatcgcctcaacggtctgttccatcactttctggttgagaccgttttcaccgcggagctcacccagatcccgcaccagattctccaaattggcgatctcgcccgtcaggaaagcctgatcctcatcgcgaagcggtgtggttacaggtcctgctggcccggttggaacgggcgcagttgttggaagagttccgttctgccacatgacaagacgctgaaccgccgtcatgatgtcgagcccgacctcatccgccaccaagccgatttccagggtccggttttcatccacgcgaacggtgcgtttcaatgtattgttgtcaaaaacatcggttggaggctcgagcgctgtcagcagatcgttcatatcggaaatgttgatgggagacgtatctttcttactccctgcgaacaagtagccttccgtattctgactgttcataaacccgacaactgcatcaaatacaccctcgatggtggcttccagaccaagggcggaggacgcattgatcgcgcccataacggcctctttcaggtcagttgcagcactttccatcccgccaagcgcctgatcataggctgccaactctgacaacacgacgccgttattctctttatgctgttcaaggcgcgacagtagtgatttcgaccctgtcaatgtcgaggtatcctgatagatatccttgtagaattccgccacgtgacctgtggtcacatgaaactgggctttgtcaacccgcgcctgggcaccctgcatgtagctgagcagcgtctggctttggtggaatgtggatacgcgtgtcatgagctttctcctacgacgatgcgttaaacgatgttgatcagaatgtcatacatgtcgcgggcggttgtgatcacacgagccgccgcattgtaggcattctgatagacaattagattggccagttcctcgtccatattgacgccggcagattccagaagtttttcctctaaaaccccggcgagcgcagcacggtcctctcttaggctgtcggcacgggctgcgtccaaaccggacttggccaggatctgtgcggcatattcaccgacagtcacatttgagccgggcagaccaccccaggtatcaaagctggtcgctgtatttgccagatcctgaaaagagagagcaccccggttatcagaaaggttcaaggctggtgttcctgttgcatccacacgggccaacgccattgacatgggagacgccagaatatccgagcggacagtcaggccggaactctgatcaacaggatagcgaagacccaccccgaacatgtcggcaaaggagacaccggtagcgcctcgatcagacgtatcattactgacattgatgctgtagttctcatagcctgtaacatttgagatcacaatggctccgtctgatgtcaggcttgccgttgcagcgggtgagaggtttgtgttcagctcgttaatgatatcattgacggtgccgccaatagcgccaaagtcaattgtgaagctgctctgaacctcgccatttggccctcggttttcaatatcaatggttccagtgaacccgtgcgcatcaccggccgccagacctgtatcaaaatttgttggaaccgaagcttccacaaggtcattaaggccgaagaaatgggaaaagcccttgccgcctcgcagggaaggatctgtatccacctgctgaacaccgacgcccgttgcaccgccctgggccgtcatttccagaacgccatttgtcagggtcagtgttcctgcaccaagggcaccgttcacctcagccagcacatcggccattgttgtcgttccgcccgcatcaaaatcaacggtataggaagccacgatgtcgttattggtatcaaaactgtagaatgttgcctgaccggtgaagccatgatcgtctgttgcgacgacaccgctattgtggcctgtcaatgttgcaggaggtggcaccgccacattggcgttatggacagcgttcaactgttcagccatttcaccagcgagcgcgccgatctgatttgccatgcctggcaattccacattccgcatatccagccagccccgcaaggaaccgccggttaattccggatcaagggcaagaccagttgccgcgactgtttctgttgtcgtgttataaacgttaatcgtcacctgatcgaaaatcgtttccgaagtcacagttgcagctgcatcgtaaaccagctgacgaggtataaaatcgagaagctgctgaccggcattggtgataacggccacggagttattgccttgcggataggttttcacatccacaatatcagcaatctcagagagagcctgatcccgtttatcttccaattcaccggttggcttgccgctgattgttgcggaggaaatttcctggttcaactcgtggatccggaggatcgcccggtttacagtctcaatctctgtgacaatatgattatctgcttctttgcgcagggcctggatctgtgtctgcagccggtttgcctcgattgcgaaattctgaatttctgtcaacgcagaggagcgggcaaccgaaagcgttggatccactgtcaactgggacaaagaggtatgaatgctatccaccttgccagttaaggatgtgttttctgccggatctccaagcagggcctgtaacttgccataaatatcggacatggcagcatattgttcggtgctcgcagtggaaaggcgcagttcgcgctgaatgaactcgtcagtgacacggcggacatcttcgatatccacaccagcgccctgcccgccaagaacaattgtgctgtagtccacgactttgcgggcatagccttcggtctggacgttggcgatgttgttcgacgtaacattgagcgcctgctggtgagccagcatacccgtgacacccgaattcataattgcagtcaaactcatgttcttctccacttaacctggcttcagcctatgggcagttttcgccgggttactctttgtaacctgtctaaaaggcagttttttccgatctctccacaatcctgaaaactgctttaactaattgaaaatactgaccttaatagattttagagacctatattttcaactggacatgccacaactgacattaatctcaccccatactatgcaatatggatgccaactcctcgaaactgagcctgaaaagatccccctattataaagtgtaaccagttttccgaagagaagccccctctggtggtcaccctgaaagacggtttttgccaccctaggcaagaaagggactcgtggagctggcagaaattgcctgaaccgactagacccaccgaaccttgatatgcccaacaacgcacaaaccattgattttattgatttttattttttttgaaaaactggcccgccttttgcttggtatggggcaaaccgcaataggttcgtgaaatacataagtgagattaaatcaatggatgtatcacaagtcagacatgataccgacaagtcctttaactggggcccaacctttaaggatgaagccaaggacgatttcgcccggcaccttgccgatgcagatcgcgccgagcgtccagaacccgaagaaaaggtcaaagcccgcgaggatgtcgatgatgtcaacgatcacgatgatgaccgagtagaggatacggatactgctgagcagaacgacgatacctactccgacaaaccagcagttgccgctgacagcactgagacagttaccgtcgctcctcaacaggttccggcagcagcaagccaggtaacaacgcccaagggtgatggtgaggctacagcagcagtgaccactggcagcaccactgcagatgaaactgcagcgacatctgtggcggacccgaaatcgaagagtgcaaacgccgaagcagcttctggtgaaggtgaaacaggtaatgtttcaggcaccactaaagaagtaggtcttgagaatgcagccaccagaacaagcggccaggcagctgaacaagccggtgctgccattgcagccgctagccaaaagcaaagcgctgatccaaaatcagcgactgcggcagcgtccagcacaccagccgcaacagcagccgctacagcagtgggtaaacaagtaaccaaaggcgagaatggtcaggttgcggataccgctgcaaaggcaaagaacaatacgcctgctcaggcggcggcaaccaacatgacacagactgaggaagttcagtcaaaaacagccaaccaggcacaaactgtcaatccgcttgaaaaaatgcggcaggatgaaatggcaaagatgaccgagaaagaggtcctttccgccaagatttctgaaatgctggccagcggcaagggcaagattacagtagcctcggccgccaagactggcacagcaaccgcgtctgctggatccatggtcagtggtggaaatacactacaagccagcactgccgcaactcagcaatccgcagcagcatcggctccaaaagctgacactgcaatcgcaatggtcacccagtcagcccaacaggctgagacaccgatcatcattccaaacggtgatttggcgacctccttgctgacaccacaagtgcagacagacacgaacgccgtgacgagctccactgccgccccaggcgctgcaatcgctggcgttgattcaaccagcagcagttcagccagccaggcaactcaggccaacagggcaacagcccaggctggaagtcctgctgagcaagtctctgcccagctgagcaaagctgccaaggatggggttgatcagatcaaggttcaactgaaccctgcggagctgggtcgggtcgacgtaaagatggaactgggtcatgacggacgggtcatggcggttatttccgcagacaacccagacagcctggaaactctgcgtcaggacgctaaccaactggcaaaagctctgcaggatgcaggtttcaaaacaggctctgacagcctgaacttcactttgaaccagggcaacgatcagggtgatgccaatcagcagtttgctggtggttcaccactcaattcagaagccgctgatgaagaaatggcactggaaacagcagcctattcaaatgcggcaggatcagacagtggtctggatatccaggtctgacccttgaaggagtaatgtgatgaatatcgaagaagcaaatgctcaatattataaggcagatagcaccgccaataaatctgcggtgaacctagccgataattttgacgacttcctgaccatgctgaccacccagttgcagaaccaggacccgctaaacccgacggattccaacgaattcacaaatcaattggtctccttcaccggggttgagcagtccattgcgacaaaccagcatctggaagccctgatccaactgcaatccatcagccagcagaacaatgaggcgacaaccctgatcagctatcttggcaagacggttggtactgatctgaacgtggccaaattggatggtgaaggcgcggcctggaacatcaatctgcagacaactgcagatgaggtgacctactcaatctatgacaaagccggaaacaaagttcatacggaaagtgca

SEQ ID NO: 2490 - DNA, 23246 bp, synthetic construct
  misc_feature 1..23246: note = Synthetic
  source 1..23246: mol_type = other DNA
agacggatgcatttatctcgcattcgccttgttctgatgcatcggtagcgttggtattgcggattgcctgatagtccatatcggacttcaatgcgggcagtatccatgggggcgagatgacaaacaattcctgcgtatcttctccctcggggaacctgtaaaaataggcgttggcctccagaagaacgtttgttttgtcaaagaacgaaaccgcgcgcacttcaagttttttcgcaatgacatcgtcagcgacaccctcttctctaagcaaggccaggattctacctaaaacgggagacactattgtgcggtcttgccgaacaaggtagcgcatgcgttcaaattcatcgtttctcatcgcgttgaggaccgagccgaaatagcgggtctcgttgcccctgggatcctcataacgaaaatcattcacccatgcatcccatgcaatggtgcggccttcattatcttttagcgcttccagcgaaagctgctggaaggaatcagcacaggcgaggggcggaaacagggtggccttggccaggtttatgaaaccgtggcgcgtaatccgctttgaaatcaaggcatcaataagttgccgaccgaatggcagacgcaacagacgctctttctgtcgttgtcccagtaatcttgcaaccattttttcatggagagatccctctgtttgttccttcgattcgaattcaccaacgatagaccgcgcaaagagactgagtagattattggcggaatctctctcatggttccaaagcttgtaaatgatcgtcatttccagcaggtgcgaagggacctttgacacaaactcttgctcttccccttcctttggtaacaatggttcaatcgcttctctgaatctatcgaaggcatcatctctacccttcaactcctgctggcgatcatactgctccgccagggcaagctgaacctgcgcaacggcggaaaaatatcgttggtgattccgtgagtcgggatcgggatgctggaagtctttggataatccatcaagaaaatccgtggccatacccagctcaaggtagccaagatactggtccacgataagctccatcacaccggaactatcccgcgcatcaccctcgtgttcttgaataatggccaggatggtttcgcgtggcgccccccaatcagcggttttgtatgccgctttgatcgcctgtctgagatcgttcaatagcctgtccctgcccgcttcgagccacgccacgagctttcgtatcccgtctacgtaatcagaaggcatggtcttcgggtcgaagtccggatccatgcggtagtgccattctttgaacgcaagctcgaagtgccagaccaaccagagtggcgccagtgcatcgactggcactgctgtcctttccgagagttgcctcaggaaagaatccagtcgtgccttgattcgtttgttgtccgactcgtcgcggcgtggcacgggagagacaaccaattgccgttgatcggcgaggcgcccaccctgggccatcccgagccgttgatagagggtagcgatgccactcaggctttgggcgctgaaattcgacaccaatacggcggcatcggccagacattccatgacgaacaggaccacgccgctcaatcccgcccggcaatccacgagcacgtaatcgggggggcttgggagggactcgacctccttgcgcaacaatgttccaagttctctcaaccgatccgtcaactccgggtcggtaagtccaaggatgtaggcggccaatcggtaggcatcatcggttttaccggcatcgatccagtggatggagccatcgggtaggttcagggtggattcgtagacgaagctccccaggtccacgggcaatcccctataggactcccgatccccttcatcgaacatgatctcgtccagcatatcggatggaacagggttttcctgtaagcgtaagctacgtgcgagaagccaaccgacaatgccgaagctcttcggatctccaagatcctggcttgcgacgaaattcggataatgccgcaaccccggcgcgtcgatatcgagatcgatggccagcacctttttcccttgggaggccaactcgacggccgtgttaaccaaacctgctgttcgtccaacgcctcccttataggagtgaaacagcacgaatcgggatttgttatctgtagaaggaatcatggaaatacctgaattgtggcgcggtgggactatgaccgattacgctgccaatggagaaaatggcacaacatgcagcttcagcgtactggaggattccccggtgatccgaggatgagcactttcgttaggtttatgggaagaggagaagcgtgtttcttcaggctcatgcccactatggtttttcgagtctccgatcttccgggcatcggtcgaactgataggtaatcttcgcaaccaataaatctcaaaagaaaccggagaaaccggattatctaccctgcggctttcggatatttccggttctttcggcttcaaacttctgcgccatcgaccgacaacctcctccacgaacggtttgaaatgggaatcgctctccagggcaacggccagaccgtatagccgatgactcaatttctcaatctcccctatccctttttgcttatcgttattcggcggcagggaaccggtttcgtcgtcgtaagggccgtacagcggctgccttacgagatcggaataaaggtcacgccaggaaggggagatatcagcgttcgacgaacccgatttttcgttgggtacctggatttcacccgctggctttacggagatccattttccccctttgatgccatcgtattgggtcggcaagttctccttcttttccatcaagaaaacctgaaggccattgtcctcgaaccagtgcaactcgatggccagaaacagccagagcagatcaggaaccgtatgcttgtcgcgatcaaacgcgaagatgatcaaacgagcgttcccctcaagaccgaaccgcgcccggttattttcggcgcgtcgcaacgccgcccgccatgcctgctcatcgccgccacttcgcgccagatattcgtgccggaagatgcgttcgatactttttctggtattttcctcatccaccgtgcccgacaggcagggagaaaaggccaccagcgattgaaggcgctggccaagatcctgattacggtgatcgcggcaggtgatggcatcaggtgtcggctccaggtcgagtcgattccataccacagggcgtttcagtttcttcgcgacattcttcaaatcgggtagagggatattgctcttcccgccgagataccgggatacctgggaatcggttttgtcggtgagccctgtcttttctctgaattcccggagtgtccggtagttcggagccagttcgtggaggagccgggcgggatcgtacaacgcatcggcccacttatcggtggttgattgcccggaacggcagcgaagacgcaaggtcaaatcatcaacaatggtgcgcaacagaccttgctcggcgcgaatggcagcgttgccgttgccttcgaacatgcggcttgtcatggctgaataggctgcatcaaatgccagcgggtcgatgggtaattgtcccggcgagtcagtatccgatgtgttcaaagatgtcgccgtacaatcctcgttcagaatcgatggcccaccggcaagatgcaaaaaatgcagatagatccgctgttcggagacggttaattcgtccaggttaatctgctgaccgtaaagcgttttatatcgccacattcgaaaatacatcccattgcggttgatataacttcaatccggtggtagaaaacaatccgaacgctaggtgttcggctatttcactggttagcgcttcgcgccaaggctgacaggggccagtaagtctccatacacgcgctgattcccagaaatccctgtctttccgatacatcaagtccgcatcaaactgaagttggaaacgggcaatcatgtcaaaacattgcatgttatgcaaggcgcgtaccttaatgcaagactgactgacggcttaccgtaagaactcgttccacgaaccgttaaaacaggtactgagccctaaaaaagccctggatcagcaattgatccggcaggcgcgtccggcgctggaaaacggcgaaaaggtgcggatacaactccccgtcaaaaacaccaaccgtaccgtgggcgccatgctcgcaggccgagtcgccaagcgttacggacacaccgaattgccggatgacaccattaccatctcggcccgtggtaccggcggccagagcttcgtggcattcctggcccatggcatcaccatccaactcgcaggcgagaccaacgactacgtgggcaagggcttggccggcggcaagatcatcgtctctcccccaaccgagagcactatcgttcccgaggacaaagccggttatcgattcgtgtgcaacttttttcgcctctgattctttacgagaagcattcttttacaaaaagttgcacacggggcatcatcggcaacaccgtcctctacggcgccaccggcggcgagtgctatttccgaggggtggccggcgagcgctttgccgtgcgcaattccggggccattgccatcgtcgagggcgcaggcgatcacggctgagaatacatgaccggcggcgtggtggtggtcctcggcaaaagtgggcgcaattttgctgctggcatgaacggggggatcgcttatgtgctagacgaaaaaggcgacttcgacatccgctgcaacagggccatggtggagatcgcaaagatcgccgaagagccagcggacaaggaacggatgaatacgccggaagaaaagagggaactcccgaaaaacatgctcggccacgatgcgctgcgtttgaagacgctgatcgaacggcatgtccgccacaccggcagcaagcgggactggatgattctggagaagttggcggggtaagcttatccggtatgtaaaactttggaggaattcttatgaccactattaccgcgcgggaaccgaccccggagtccgtctgggcgtttatgcaggagactgctcaacagatgcgggaaacggatcgacagatgcaggaaacggatcggatactgcacgaactggggcaggaaacggatcgaaggatgcaggaaacggatcgaaagatgcaggaaaccgaccggaggctcaagaaggccgagagactcttcaccacccagtggggcaggctgatcgagtcgctggtggagggacgcttgctccaattattccatcaacgcggtatctctgtttatgacacgtctacccgggtgaaggggaaccgggatgggcgctcctacgagttcgacatcatcgcccacgatggcgacaagatcgtcatcgtggaggtaaagaccacgctccggcctgacgacgtgcgcaaattcatcggcaagctcaaggacaccaagaccctgatgccgagataccgcgacaacgtcatccacggcgcggttgcctggttgcaggccgatgccggcgcggacgagatggccatcaaccaggggctgttttcggtccgggccgtgggggattcggcctggatcaccaacgcgcccggtttcgtgccgggggtgttttgatgcgggatttgcctggggctgataaatgaaacgcaaactccttcgcatcattcaccagaccggccctggcatcattgccttcgctattttcgggtttgtcctcttcattctcgccgtgtggtggctggtggccttccacccggaactttccctcaaagactggccgtggacatttctatcggcgctggcggcggcgccctccctgatcctcacctggttctggcggaccagtcacaaggaacgggatctggagaacgacgcccagcggttgcagaacgaggcccagcggatagaaaaagaagagcaacggctgcaaaacgagagccagcggctggataacgagaatcaacggatacaaaacgaagaggcgcggctgctgacggaccggttcaacaaggccgtggaactcctgggaaacgagaacctccagatccgcctcgggggcatctacgccctggagcgcatcgcccaggattccgaacgggaccactgggcggtgatggaaaccttaagcgccttcgtgcgggaaaagacccgggaaccgaagctaaaaccggtggccgcgccggaagcgggggatgcctccaccggtggggaagaaaaagaaccgccccccgaggagcgcttcgagccgccggataccgacgtccaggccgccctcacggtcctcggccggcgccgggaggaccggcggaagtgggagaagaaggaagggaagcggttggatttgaggggggcgcatctggcgcgggctgatcttcagagtgcccacctggcgggcgcctacctttcgagagcccacctggagggcgccttcctggagaaagcccacctggagggcgccgacctttcggatgcccacctggcgggcgccgacctttcggatgcccacctggcgggcgcctacctttcgagagcccacctggagggcgccttcctggagaaagcccacctggaaggcgcctaccttgggggagcccacctggagggcgccgacctttcggatgcccacctggcgggcgcctacctttggggagcccacctggagggcgccatccttggggaaatccacctggagggcgcccacctttggggagcccacctggagcgcgccgagctttcgggagcccacctggagcgcgccgaccttcgggaggcccacctggagagcgccgaccttcggtatgcccacctgaagggcgccatccttttgctagcccacctggaaggcgccgaccttcgggaagcccatctggagcgcgccgaccttcggggagcccacctggagagcgccgaccttcggtatgcccacctgaagggcgcctacctggagggcgccgacctttcggatgcccacctggaaggcgccgaccttcggggagatcacctggagggcgccgacctacgctccgcccaaggcctcacccaagaagcccaaggcctcacccaagcccaaatcgactccgccatcctcgacgacgaaacaatcctccccaaaggcctcgcgcggcccgtccgcgagggataaatccggggggccggacgcttccggccttgactaccctgttggctacggtaccctactatcgcaagaagaaagaacttcccccacgaggtgacccatgacgcaacgacaagttcatctgacggaaacacaacaaaacaccctggcattccttgcccacgagcgtggcggggaacaaaccgacctgatccgggaggcagtcgaatgctttctggcccaacagccggcacggcggacgggggggcggcctatggcgctgaaccgattggccggtatatggcgggaccggaccgatttgcccgatttcaacgcgctccgccgggaatgggacaggacgttggattagcatcatgccgaatctgctcgttgagccctagtgcctcgctccaccttatcttgcggttcagatcccaccaaacgcgccaagaccgcgttgcagcccttggaaatagttcactattccctgcgcgggctacgccttgccttgacgcgcctggcgaactctgaaactcgcaaaataagatggagcgaggcactaggcaattcctccggaacatgatgcccttcgggcaaaagagccggcctggagagcggcgctcccagcggtggtcttttttgatgcgccacgcaagaattcggaaatcttgtttttccgatgcgtgaacaagggggcaggcaaacatcagccccaacggggcgtaatctatacagcccagggcaacgccctgggggaataaggacggatatccaacgagccctgaaagggcggcataatctttaccaaccgaaatcatgtttgggatttttgtattccgctcttacagggctgaaccggcgcccaatccgatccaggggcgttgcccctggctatatggatcttgccccgttggggcaaagagaatggacatgatgcccttcgggcaaaagagccgcctcggagagcggcacttccggcggtggcctttccggatgcaccacttccaccttcacccttcacccttcaccctttattcccctgatcccgcgcttttcctccggggggcggacttcgaggccctggtgctccacgtcgccgatgatgccatcgtgtcggcctggaacgagtgccgggcggcctgccagtgcgatggcgccaatcatggcggcgcccatagtagcggtaaacaaaacggcatcgcctaccggatccacaaacgggaggaccgggtcttcgccatcaccttcacctatctgcccgaacgggagaacgatccggccgccgtgctggtcacgggtcttacggtcatggacgggaccgccctcacgcccaccgtcatcgcccgccagacgcgccttcaccgctataccggctatacccagaccttcgggcgtgaccaatccggggaggacgtgaccatcgtcctggatctcaaagggcgcgtgggcgtggagatacaggtcaccgaccggcccgaagatcccctgcccctggggaccatcgtggcgtccatgctggggtgggaggactatgcggcgctcgctggcgaggaaagggagttcgatgcgcggttcaaccgatgggcgccctgcgacgggcgcgatatcgccggctcccggttggaagaagcggccgacgacaccgacgccgagggttccttcgaaaaggccccggatctgcgcggcgtgttcctgcggggcctgaaccaattcgacgaatatgaaaacgattacaccgagagccccgtgcccccggaacgggaggacccggaaggattgagagaggccgtccatttccaggaggcgaatgtgggcgcgcatagccatgcctcccgtggtggcggggcgggaggcaaaacctgcgtccgtcacgggtacggggacaagagctgcggcctatggcacgatggcgatcacacgcaagaaaaggagggaggggaaaccctgaacaatcccggcggcgagacccggcccaagaacgtcgccgtccactattacatgaagatcaactgagaccgtagcccgggtaggttggggatcggtgcgaaccccaacctgggcatcaagaaacatcgaaccgtccgggtttgtgttggggttggcaccgctcaccccaacctacccactaacccgacctactccgctgttttggcggatgccgttgccatctttgccccgaaggggctgcgtaacgtagccccttcggggcacagacccctgaacattcggaaatcgatagtaactacctaccaatacggcattgccccctgtagagacgcgatttatcgcgtcttatttgggtatggtttttaccggagacgcgatttatcgcgtcttatttgggtatggtgtttttaagagacgcgataaatcgcgtctctacaatgctccggctccctacgtaaaggcgataatgttgtacacaacggcctgtatggtgggcagttacaatcgataatccataaattggggttgcagcccgtagattggggggatcggtgcgaaccccaacctgggcatcaagagacatcgaaccgtccgggtttgtgttggggttggcaccgctcaccccaacctacccggactacccgggctcatggggtttaagtacgtatttcccggatgaaccgggattaagagaaaatcacacgcgagctttccggcagagccggaaaaacaaaaggcggacattacgaataatgtccgccttttgcattttgtggtctgcaccttgttaacggaaagaccgcatttccgagtcagctacaactcagtagtgttttattctcccggatctcgtggcacgatacaagccttgatttcgaatcacgttacttcgcggggcggaacggtcatacggaatgaggaaatacacaatgagcaaaaacgaaaacaggggtccgtggcggttggggttggaccttggcaccaactccatcggcatcgcggccctgtcgctgcggaaactgcccgggaaagacgaagacgaaaaacaagagtatcgggtcttgggcctgatgatgctgggggcgcgcatcttttccgatggccgcaaccccaaggacaagcaatccctggccgccatgcgccgggtcccgcgcggcatgcgaaggaatcgcgaccgaacgttgaaccgcaacgcccgcttcctcaaggaactgcaaggcttcgggctcctgcccgccgcttccgatccgccgagcgcggcggagcttgccacccggcgcgaattggcggcgctcgacccgtatatcctcagggcccgggggcttgatgaggaactgccgctccaccacctggggcgggcgctgtttcatctgaagcgccggggtttccagtccaaccgcaagaccgacagcggcgatcaggaaagcggaaagatccgggacgcggccaaccggaccagggaaaagatggaaggggaggggggccgcaccctgggcgaatggctggggcgccagcgcatggaaacgctggcggaaaacgaggcgctggccaaaggcaagcgcaaacccctgccccaggcccgaacgcgcctccacggcgcgggcgccaaggcctattacgacttttatcccacccgcgccatgatcctggatgaattcgaccgattgtgggaatcccagcgccgctggcacccggcggcactcaccgatgaggcctaccaaacgctcaggaaaaccctggcgtttcagtatccgctcaagactccaccggtgggcaagtgcaccctcgaccccagtcaggaacgcgcgccccgggcgctgcccagcgtccagcggcttcgcatctatcaggaattgaaccacctgcaggtgatggactgtccgggggaaccttggcgagccatcgaaaagaaagaacgtgacctcctggcaaaaaaggcgctcggccaggaaaagctcaccttcgacgggatgcggaaatggctcaagttatccgcccatgcccgcttcaacctggaaaccgataagcgaaaatacctggatggggacaagacggcggcgatgctggccagccccaaacgctggggcaaggggtggcgggatcttcctttcgatacccaggaggagatcgtcaccaaactcctggaaacggaaaaagaagaggaactgctgccctggctgatggccgaacacggtctgtcccgggaagatgcgctcgccgtctcccggacaacgctccccgccggacacggggcattttgcgccgaggtctcgcgcgggctcctggcggagctggagcaggacgtcatcacctatgacgaggccgtgaagcgggccgggtacgccagccactcccagctcgacgacggcgtccgcgtggacaggctcccctattacggcaagatcctggcgcgccacgtggccttcggttccggggagcccggcgacccggaggaaaagcgctacggcaagctcgccaaccccacggtccacgtggccctcaatcagctccgccgggtcgtcaacgatctgattgcccggttcggtccgcccacccagatcgtggtggaactggcccgggacctgccgctctcggccgaaggcaagcgggcgctggagaagacccagaaggacaatcaggcggcaaacgacgagcgccggaaaatattgcgggagcacaagcaaccggataattaccagaaccggctccggctgcggctctgggaagaactcaaccctgatgaccccctggatcgccgctgcgtcttcagtggtgaacagatctccattacccgcctgttttcggatgaggtggagatcgagcatctgctgccgttttcccaaaccctggacgacagcccggccaacaagaccatctctacgcgccgggccaaccgggaaaagggcaatcgctccccctatgaggcattttcccatagcccgctcggcttcgactgggaggaaattgcgcaacgggccgccaatttgccaccgaataaaagctggcgtttctccccggatgccatggaacgctaccaggacgaagagcgcgacttcctggaccgccagttgacggacacccagtatattgcccgactggcgggtacctatcttgcggcgacgggggcggatgtctgggtcataccggggcggttgacggcggaccttcgttgggcgctggggctcgataacctcctggccgcgcccggcgaaggggttgatgcaaaaaagaaccgggccgatcatcgccaccacgtcatcgacgccttggtggtggccctgaccgagcgagggcgtctgcaaaaggtcgcgacgctcgccggacagcgcagggagcaggggcacacccgtctgttacaaaatccggaggagccctggccggactttcgccaggaggtggccgattgcgtggagaagattgtcgtttcccacaagccggaccacggcgtccagggcgccctgcacaacgatactgcctacggcctgctggacgaagcacccgatgccaagggggttcgcacagtggtccaccgggtgccgctggagagcttcaagaagcgcgcgaacatccggaatatccgcgacgacgtgctgcgtgaatacttcatcgccaataccgagtacgttcccgacaaagagatcggaaagaccctggtcgcgctgggcgaacggctgcacccgccggtgcgccgggtaagaatttgcgagcgattgaacgtcatccccatcagtgacgcccagggccaacccttcaaggcctacaagggcgacgccaattattgctacgacatcttcgccggggcgccagggaaatccggcgccaccaagtggaccgggcgggtggtctcccggttcgatgccaatcaacagggctttgagccccaggcgcgggtctccaccggtggcgaacccctcatcatgcgccttcgtatcgacgacatgctggaactggacgacggcggcggacgccggatcgtgcgggtcgtgcaactatccgagggacagatcacgctggccggggaccacgaggctggggatctcaagaagcgtgacaaggataaggaagatcccttcaaatacctgaggctggtgccctccacccttcaggcacggaacgcgcggatggtccacgtcagtccgtctggggtcatccgccacaagggaaatctctcgtgatcgggcgggtggtggagatcgttcgcgagggcgcgcacctttccctccaccggggtttcctgcgggtctccgaggcaggcaaagaggtggggcacgtggcggtggaggatatcggcgcgctcatcgtgcgtggctatggcgccaccgtctccgtcaacctctgttcgcgtctcgcggaggcgggggtgccggtggtattgtgcggggccaaccaatcacccgatgccctgatctggccggtgcggggccacttcgagcaggggaggcggatgcaggcccagagcgaggccgggcgacccctgcggaaaaggctctggcgtgatctggtggcggccaagatccgggcccaggaagaggtcctctttgcccgcttcggcaaacaggacgagcggctccggtggatgatcaaaaccctcaaatccggcgacccggaaaacctggaggcccaggcggcccggcattactggccccggttgatgggggagcgcttccgccggaaccgcgacgccgacggcgtcaacgcggccctcaactacggctacacggtgctaagagccgcggcggcccgggccatcctggcggcgggcctgcatccctccctgtcggtgcaccacgaaagccggggcaacgcgctgcggctggccgatgatctcatggagccgtttcggccctacgtggacggcgtggtggcggaatgggtggggcagggggagttcgagatcgacaaggagagaaaggccgcgctcgtcgcggtgctgaccctggatctggccggccccaacggcgcgcggccagtgcaatcgtgcctggatgccctggcgacatcgctggccatggtctacaccggcgagggccgcgggctggagctgccggggggggccttttctcgttcccacgctgtgcgggcaggaaccggataaatacggaggggtttctcgttcccaagctccagcttgggaaccaaatttccggaagcttccgcttccgaattatgcgcgcccaagctggaagcttgggtgcgagaaaaaaaacgaagcccgctcaatggcgggcttcacggggctcctgatcccctggaaaccagaggcttttcgtcacgcagactaatcaggcagcacaaccacgccgctcaacgcggctccgctcatatgattgcggcctcatcctaacgctaacgatcacttaactcaatattacccggaaaggcagagaaaccgaatacaaggtttatttcaatgcatctttgttacttcgatgaaaacaaatacaccgcggagtaccctcacttcttcatcggcggactcctgatcccggataccaaggctctggcgctcgaaaatgacctgtcgcggattgccgccggcttcttcgactcgcgcacactgaccacacggaccgaattgcacggcaaggatctgtttcatggcaagggcaacgccaaggggcgaaagcttgccgaccgggtgcgggtgttccaggacgtcgccatcctcatcagcgacaacaatatcccggtgcggatgatccgcatcgacgttgaacagcatcgaaagaagtatgcgtatcccgaaccggaataccgtttgggtctgatgctgctactggagcgcttttgtgaatacctggatgcgtccgatgatctggggctggcgttcggggactacgaggcagacgaaatgactcgctcggtggcggatttctcagaattcaaggcgcggggcaaaacacccatgtatctcgggcgtcccctggagcggttggtggataccatctatttcacccagtcgcaccacagccgctttttacaagcggcggatctcctggtttacatggcgggccggtatgagaatacccaaccgaaccccgacaaatggcacgaacgggaagtaagcgcggcgtgggaaaaaataaaggccagcgggacgacgttcatccaacgctggccttgaggatttggaacgaccggctccccgagagagaggctcgccgatgggacgaacacaccagtcgctagggggaaagtctagtttatccgctctccggaaacaagttctgattttttgcttcgatcattatgcgttgtcccgccagcttcccgcgcttatccgcagtcttggggaccgggattgctattacaccccccgttgcggttggaccgcatttcccagtcagctacactaaagattgcggagagcaaaccggatctgttgttgcggttggaccgcatttcccagtcagctacactggaattttataccaaggcggagcttatcgagttgcggttggaccgcatttcccagtcagctacactatcagttcaatggcgtcacctagctgcatagttgcggttggaccgcatttcccagtcagctacactacagctggtgacagcgtttgggcgcagtgtgttgcggttggaccgcatttcccagtcagctacactcccatccatcaggcgatcaatcccagggcgcgttgcggttggaccgcatttcccagtcagctacacttagttagctggtgacaatgcgccccagggggttgcggttggaccgcatttcccagtcagctacactcaactactcaaccttgatcgtccacacaaggttgcggttggaccgcatttcccagtcagctacacttggaatttatcgctatcgcccgttcgtccagttgcggttggaccgcatttcccagtcagctacactcagagcggtggcgaccgctccagcgtttttgttgcggttggaccgcatttcccagtcagctacactggagaagtggtgacaacgatccctggttaggttgcggttggaccgcatttcccagtcagctacactaaaaaccacatacaccgcatccgagatccggttgcggttggaccgcatttcccagtcagctacactcatcccccgtgactaactacctaattaccatgttgcggttggaccgcatttcccagtcagctacactcaagacccaggggcgatcccaccgttaccgtgttgcggttggaccgcatttcccagtcagctacactaggaagtatgtcgaggccgatttcatagtcgttgcggttggaccgcatttcccagtcagctacactaagcacggtccgggatgggcgcgtaacaaagttgcggttggaccgcatttcccagtcagctacacttaagagaaagaagtaacttgacattatatggttgcggttggaccgcatttcccagtcagctacactgcctcgtttggaggtcgttgaacgatccaggttgcggttggaccgcatttcccagtcagctacactgtacctttccagcgacagcataaatttcttgttgcggttggaccgcatttcccagtcagctacactctattgcctcttccgggatcgacttgattaagttgcggttggaccgcatttcccagtcagctacactgtattttcttccttcttcttccaacattcggttgcggttggaccgcatttcccagtcagctacactccatccatcggcgccaaccggcaccaaagagttgcggttggaccgcatttcccagtcagctacacttcccgaacgtcagacgatgcaggttgtaaggttgcggttggaccgcatttcccagtcagctacactgggcatgagctttaccagcgccttcgaggagttgcggttggaccgcatttcccagtcagctacactgaatgcggggggggttaggggtgaaaacgagttgcggttggaccgcatttcccagtcagctacactccgtggaggtggtgaagaagatggtgtagagttgcggttggaccgcatttcccagtcagctacactcggcggcgttgacggccggggcggattcccgttgcggttggaccgcatttcccagtcagctacactgccatcgaagacgacgctggccttgcgtcggttgcggttggaccgcatttcccagtcagctacactattgcaggggataagttcttgttgaaaagcgcttatcccctgttttccacagcgggaaaaccgccgcttttcgatcagaacagaaccagttgctccggtttttccggtggcggtttgctgcccttgcctcgaaaactgacgatgttctcatattgcttgtccgtgaatagcaatatatccaccatgccctcatcggggaccgccgtcccaattctccgaatcagtgcctcggccgcttcctttcccggggtatgacgaacgtaaacggagtactgggcctgctcgaacccgcgatccaacaggtaattgcggaaccgcgtgtaggctcgacgctcctcgcgttcggtggtcggtaaatcgaacaacaccataagccacatgatgcggtatccgctaaggtgcgccatgacgatggattgggattattttggtcattgatccggaaatcgggggaatcagaatttgtttccgaggagtggagaaaccggactgtagcgtaatccacactccaatagatgggtagccgaaccgctcatcaccgaaccataccggtaccagagcaaaatggatacccctgagctgtatgcaaaagtcaccttgcactccctaacggcgttgaaaatgtcttcaaaatgctcatttattccctataaactccgctttttcatccattttcgccttgttatgaagcacaatctgacttttgcataaggctcccctttcaggtgtttccggtcaggcgggggctttgcccccccccccaactgcttttgcgctgtcccttagcgcggccaaggccgcaaccaaactctgttgccgtccctagcgccgggtcccggcatctttgccgggatgacgggagtggtagattcttaccgggtcgccggaaataaccactcccgtcatcccgccaggcagattggcgggacctggaggccatggatggcatgctactccccatagaatttccgcaagaccgcaatctccctccaaccaaccccaaacgtccgcgcttgtgtgtcaattattgcggaggaatggcataacgcgcggacggcttccgtggtatcatagtccaagcggagcttacgtccgctttccgggctttttaccggcggaatcggaccaatgtgatcttccggttccgtcatgcaaggtggcgggaaattgcattttttaccacccggataaaagcccccttcagagcgcgccgcgagagtctatccggcttgggatgaaccggcggcggaagcgatagattggccccggttttgtgcgaatcctcgtcgaatcgttttggcattttcttcggattcgattttcttcggattcggcgaaaagatggttccgattttccgctttccggctacggttcccctaagccgtgctggcccccggaaagtccatgggcattgcggccgtggaatttcgggcgcgcttgaatgtcacacatgcgtcgtcacatgtattcgggtgcccggccggtccgggtcgatacatgggacgcatggaggcgaaacccaacttcggagtagttatcgaaatggcacaagttacgatgcgggacatgctggaggccggtgtgcactttggccaccagacccgttactggaaccccaaaatggccccctatatctttggggaccgcaataaaatccacatcatcgatctcggcaagaccctcccgctctataatgatgcgcaaaatttcatcagccgcatggcggcgagcggcggcaacatcctgttcgtcggcaccaagcgcgccgcccaggagaccatcagcggcgaggcgaaacgttgtgggatgccctacgtggacaagcgctggctgggcggcatgctcaccaactttaagaccgtcaaggaatccattgcccgcctgaagctgctggaaaccatgatggaggatgggaccctcgccaagataagcaagaaagagggcctttccctgcaacgggaactggccaaactcgagcgcagtctcggcggcatcaaggatatgcccggcacccccgacgtgttgttcgtcgttgatgtgggctatgagaagatcgccgtgcgcgaagccgtcaagctcggtatcccggtggtcgccgtggtcgataccaatcacagccccgatggcgtcgattacatcatccccggcaacgacgacgcgacgcgggcgatacagctatacgtatcgaacgtcgccgacaccatcctcgaagggcgccagaccgcggagatggccgcgttgatccgccgggagaacgaagagaaggtcaaggccgacaaggcggaaaaggaacaggccacccgggatgtcgccgccgagaaggccgaggccaaagagggtggcgccggcaaggacgatgccgctcccgccccggcgcagccggaggaggcgccgacgacagccccctctggtgccgacagcgagccggcggcgtctgccgatccaaaatagcaaccttctcggccgtatgccggtaaaagggcatgcggttccaagtaatggcgtaagagccctttttgccccgcaagacggggcgaaaagggtttatccttcctgaaaacaaagtaactaccacctatcctgtgggagggcgaggctcctgccgagccttgtttccatggcatctccggctcggcgggagcctcgccctcccggatggcttaggtaacgtatccacatggtagaaggcagttacaaaacaaaacaattacaatccggccgtggcgaactgcgcttttagggttctgcctgactcgcgggttcgggggacggtgggatgatgactattcgaggataagaaaacatggcaatttcggcggcattggtaaaagagcttcgggaaaggaccggagcgggcatgatggagtgcaagaaggcgctggtggagaccggaggcgatctggaggcggccatcgaatccatgcgcaaatccgggcaggcaaaggccgacaagcgcgccgggcgcgtggcggcggaagggaccatcgccatgcatatcgacgaaaattccggacaggcggtcatggtggaggtcaattccgagaccgatttcgtggccaaagaggacggatttcagaagttcgccgccgatatcgcggccagggtcttcgaggaatccccggacaatatcgaggccctatcgaatcttcccatggaaaagggtggccagaataccattgaggaacagcgtcaggccctgatagcccggattggcgaaaacatcacgatacgccgcttcaggaagatgcaaagccagggcggggtcctgggctcttacctgcatcacggtggccgcatcggcgtgctcgtcgcgttttccgagggaggagacaacgagaccgccagggacgtggccatgcacgtggccgccaaccgtcccctttgcgtccgggaagatcagatttcccttgcggtccgggaaaaagagaaagagatcttcgaggcccaggcggccgccagcggcaagccggcttccatcatcgaaaagatggtgatcggacggatgaataaattcgtcaatgaggtcacgctcctcgggcaaccgttcgtcaaggaccccgacatctccgtgcaaaaatacctcgccaaatccggggccaccgttgccgatttcgcgcgcttcgaggtgggcgagggcatcgaaaaaaaagccgagaactttgccgacgaggtgatggcacaggcgcggtagatttcaggccgtgttggctcgttcccatgccgcacgtgggaatatgataggcattgtgggcgatacaaggacgtatcgccattttcgatggatgttcgctcgttcccacgctgtgcgtgagagcggggataagtgctgataaacacaaagacgtaaccgaatgcgcagcgttcggcgttatgccccattcacatccactttgagcccgacaaaccggtacaaaacatgaaaaaataccgccgcgtactggtgaaggtcagcggagaggccttgggtgatgcccgggaacgccccggacaaggcctgaatcgcgaggccctggagcgattctccgctcaggtggctgaactcattgcggccgatatccaggtggcgctggtggtcggggccggtaatttcattcgcggcgccgagcttgccgccggtggtgtggagcgtgttaccgccgaccacatgggcatgttggccacggtgatcaatgcgctggccttgcaggatatgctcgaatcgataggcgtcgtcgtccgcgtgatgtcggccatcaagatccgggaggtctgcgaggactacatccgccggcgcgccatccgccacatggaaaaagggcgcgtggtcatcttcgccgccggtaccggcaatcccttctttaccaccgattccgcggcaagcctgcgggccattgagatcaacgccgaccttctgatcaaggccaccaaagtcaatggcatcttcaccgccgacccgaaaaaaaaccccgacgccacccgctaccaatacctcaattacgacgaggtactgacgcgcaagctggcggtcatggacgccaccgcgattgttttatgccgcgacaacgacataccgctgcgggtcatcgacatgaaccgggaacaggtgctgctgcgcaccgtgatgggagaagacgagggcaccttcgtggggacctttccgatgatctcgccgaaggaaatcctgtgagatacctctgtcgtcctgtttaccggggcgttttccctgggaccgctggcctccaggccggctctttatgcgcgccattgatggcgccgcggcgtattggcagagatccggattgatagtcagcgatgttggcctcaagtcgtagtccaactgcgccgaaataccgatacccctcgtgcaatacgacttctcgtattgctatccctcgatttgttgtttttttggtaactacctaccctacgagcctgttattggcctgtccgggagggcgaggctcctgccgagccgaaaataccgggaaataaagcttggcgggagcctcgccctcccggataagtggtaggtaagcagttactttttttgtacgttttcgatccggttttctttgccccaaaggggctatgtaagatagcccagggttgcgggcgaagcccgctaccctgggttagcggaacataagaaaccaaccccaacggggttgcgtaaaacggattcccagtcggcccatgaaaataatgacgcaaccccgttggggttgtcttggtggcgttcgatacccagggtagccgctacgcggcaaccgaaggtctatgttatatagccccttcggggcaaaagaaggccaaccgaaaatttcaaaccgagccgccaccaaagggtatcggaacttgagcgcaggtggagtagtgctgcgtacgctaaattccttcgattatgatcttttgtggccaatcaatgcattttgccgattgttgaacgatgtatttatggcttgaggcagtagttcccgacccatcccgcatggggttatatgccctaccggacttttcacccgaattatcaattcctcgccgtatgacaaccaatccttctctgttcttccgtccgttcttattgctattgcttgtcgccgtgctcggcgccatggcgggttgcgccagcaagctgaacctcatcaaggacaaggagtacgacgatgcatgggatcgggcccgggcatcgctggcattgcaggacgcctacggcgcgcgggaagtccgggagcgccttgattggtttcggcaaaaacaaaactatctggaccgttgcgccgagcggggttcccgttatttctatcatatcctggaggaggtcgaacgcagggacatgcccggcgagatcgcgctcctccccatcgtcgagagcgcctttcagccctttgcctattcaccggcccatgcctccggtatctggcaattcatccccgcaaccggcaggcgtttcggcctcaaacagaattggtggtatgacgggcgccgcgatatcccggcctccacccgggcggccctggattatctgcagcagctccatggcaggttcgacggcgat

SEQ ID NO: 2491 - DNA, 23237 bp, synthetic construct
  misc_feature 1..23237: note = Synthetic
  source 1..23237: mol_type = other DNA
gagacattgaatttcgatgtcatgggcacacgtggcaaggttattgtagaagctggtcgccgtataacttcccggcacgtgcttctgatgaagcagacgaatattaacaatctgtgtgtcccggatgagtacgcccttggtaaggttctggctcatgatgtagttgatgaagaaaccggagagatcattgccaaaacaaatgatgtactgaatcaggatactattacaggaatacgtaatatcggtacgacttctttccgaacgctatatatgaatgaagtggatcgtggttcgtatatttcggataccctgcgtatcgatcctactaccaatgcaatagaagcacaggtcgaaatctaccgaatgatgcgtcccggtgaaccaccgactaaagatgcggcacaaacgctatttcacaacctattctcaagtccggatcgctatgagctatcgatggttggccgcatgaaatttaataggcgtgttggacgcgatgatatcacggggccaggtatactgacccgcgaggatatcgtagatgtgcttaaggtacttatcgatatcaagaacggcaccggaaccgtagacgatatcgatcatttgggtaaccgacgggtgcgatgcgttggtgaaatggctgagaatcagttccgagttggacttgtgcgcgtagagcgggccgtacgtgagcgcttgagccttgcggatgcggatgaactgatgccccaagaacttatcaatgccaaaccggtatcggcggttatcagggaattttttggatcgagtcagctttcccagtttatggatcagagtaatccgctttcggaggttactcataaacgccgcatttccgcactaggtcctggagggttgacaagggaacgtgcgggattcgaagtacgggatgtgcatccgactcattacggtcgcgtatgccccatcgaaacaccggagggtccgaatatcggcctgattaattcactatcggtgtattcacggaccaatgactatggttttctcgaaacgccctatcggaaggtagaagatggtgtggtaacggatcggatagattatttgtccgccatcgaagaggggcaatatgtaattgctcaggcaaacgcagccgtagatgataatggccaacttcaagacgagttggtgacctgccgacatcagaacgaattcacggtgaccacacgagatcgaatccattacatggatgtctcacctaagcaaatcgtgtcggttgccgctgcattgattccatttctagaacatgatgatgccaaccgcgcattaatgggttcgaatatgcaacgtcaggccgtgcccacattgcgcaccgaaaaaccattggtgggcaccgggatggagcgtaccgtagctatcgactctggagtggtcgtagtggcaaagcgtggtggtgttgtagactcagtggatgccgcccgtattgttatccgggtaaatgatgaagaaacagtggcaggtgaaccgagtgtagatatctacaacctgattaagtacacgcgttccaatcaaaatacttgtatcaatcaacgacctttgatccggcccggtgatgtcatcgcacgaggtgatgtactcgcggacgggccagctacagatctaggggagcttgcccttggtcaaaaccttttggtggcattcatgccttggaatggttacaacttcgaggattcgatccttatctccgagcgtgtggtcgaagaagaacgttttacgactattcacattgaggagttggtttgcgtagcgcgtgatacgaagctgggtcccgaagaaatcactgcggatattcccaacattagtgagggcgcactcgccaggttggatcagtccggcatcgtatttgtgggcgcggaggtgaaatccggtgacatcctcgttggcaaggtaactcccaagggggaaactcaattgacgccggaagaaaaacttcttcgggcaattttcggggagaaggcatccgatgtgaaagacacttcgttgcgcgtgccatcggggatgaatggtacggtaatcgatgtacagatattcacgcgcgatgggcttgcaaaggatgcacgtgcggtagagatcgagcaaatggagttggataaggtcaagaaagatttgcacgaccagtttcggatactgggggccgatgtttatcagcgcttagagcgtttgcttatagggacaacggtgatcggtgggccggcaggtttggagcccaatacccaaataacaaaagagtatcttgctaacctcccgaaggaaaaatggttcgagattcgaatcaaggacgagtcgataaacagacaattggagcaatcatcggaacaactcaaggcacagcgggaagcactggatgagcgttacaaggaaaaacacgacaaacttacctcgggggatgaccttgctccaggtgtactcaagatggtcaaggtatacctggctgtaaaacggcgtgtgcaacctggtgacaagatggctggtcggcatggtaacaagggggttatttcaaccattgtcccgatcgaagacatgccgtatctggaagatggaacccccattgatatcgtattgaatcctcttggcgtgccatctcgcatgaatgtcggtcaggttttggagacccatctgggatgggcggctaaaacattgggtctacaaattggccgtatgctggataacaacgatcacggaaaaatgcgcttatttttaaaccgcatctatgaggtcggtggaaaaccaggggtactaaatgaattatcggaggaagagatttcggatctggctaggaaccttcggggaggagtacccatggcaacgcccgtgttcgatggcgtggtggaagatgaaatcaaacatatgttggccttagcagggctaccgaccgagggcaaggcgatcctttacgatggccgcactggagtaccctttgatcgaccgattaccgtgggctatatgtacatgatgaagctcaaccatctggtagacgacaagatgcatgctcgttccactggcccctacagtttggttacccaacagcccctcggtggtaaggctcaattcggtggtcagcgttttggcgaaatggaagtttgggcgttggaggcatatggtgcggcatacacattgcaagaaatgctcacggtaaaatccgatgatacgaatgggagaactcagatgtataaaaacatcgttgacggtgagcaccacatgaaggcaggtatgccggagtccttcaatgtattgatgaaggagatccgatcactcggtatcgatattgagctggaacaggaatgatatcggtgatccacttcccatccccgtattttagcgtgggaatataaagcatccctgaaatagatgctcggggggcattacctggatcgatgcattggtgggaaaactatgggttcgagatacgggttcatagtttttctgttcatccataaccgcgtgattatccacgcatagtcaggtattccaaacatagtcgaatacaagatgggtttcgtatacggtccgaagagattagagagtccgtaaaatccatagcaatagtcatgttgtactgccctcacccctatcgatgaaagggcaatgagtggccaaggtcagcgggtgacctggctctgcgcagtaagcctcgaaaccttgtatctcttttcctgtactttcatgacaactaaagaccggagaaacgaccttgaaagatttactgaatctattaagaaggcaaggccagatagaagatttcgattccatccgtattggtttggcatcccccgaaaaaatccgttcctggtcttatggagaagttaaaaagccagaaaccattaattatcgaacactgaaacccgaaagggatggtcttttttgcgctaaggtcttcggtcccatcaaggactacgagtgtctttgtggtaaatacaagcgcttgaagcatagaggtgtcatctgtgagaaatgtggcgtcgaagtgaccctgactcgggtacggcgcgagcgtatggggcatatcgaacttgcaagtccggtcgcgcatatttggtatttgaaatcgctcccctcgcgtatggggttgcttttggatatgacacttcgggatattgagcgcatcctgtacttcgaggcctttgtcgtagtcaatccgggattgacggaactggaacgcggtcagctactatccgatgatatgtatctggatgccattgaggaatacggtgacgaattccaggctaaaatgggtgccgaggccatttacgacatgttgcgagccattgatctcgagtcggaagtcgccaagctacatcaagaattactcgatacctcatccgaatcgaagatcaagaagctgacaaaacgtttgaaactaatggaagcattcatcgattccggaaatcgccccgaatggatggtgcttcgagttttgccggttttaccgccggaacttcgtcccttggttcctttggatggaggtcgattcgcgacctcggacctgaacgatctctaccggcgtgtcatcaaccgcaataatcgtctcaaacgactcctggatctgaatgctccggacatcatcgtgcgtaatgaaaaacgtatgcttcaggaatcggtagacgcgctgctcgataacggacgtcgaggtcgggctatcacgggtaccaacaaacgaccactcaaatcccttgccgacatgatcaagggaaaacaagggcgattcaggcaaaatctgcttggtaaacgagtcgattattccggtcgttccgtcattgtcgtgggacccaccttgaagcttcaccagtgcgggttgcctaaaaaaatggctctggaactctacaaaccgtttgttctcggtaaattggagcgcaggggcttggcaactaccatcaaagcagccaaaaagctggttgaccgcgaaggtccggaggtttgggatattctcgaagaagtcattcgggaacatcccgttatgttgaatcgggctcccacactccacagacttggcatccaagcattcgagcctgtgctggtcgagggaaaggcaatccagcttcatccactggtctgcactgccttcaacgcggatttcgatggcgaccagatggcggtgcatgtaccgttgtccctggaagcgcagttggaagcccgtacccttatgatgtccagcaataatgtactttctcccgccaacggtgaacccattatcgtacccacgcaagatgtcgtatttggcctttactacatgacaaggacgcgggtcgatgcacgaggaaacggaatgatattcgcggatgtggccgaggtgcatcgcgcattcgaggcccaagcggctgatttacacgcgagcatcaaggtccgtgtcgccgaatccgatacggataaggaaactcccgggatggtggatacgaccgtgggacgggccttgctatccgaattactgccggcgggattgcccttcgaactggtcaatcgcgtcatgaacaagaaggcggtatcttccttgatcaatatcgcgtatcggactgtcggcctcaaagccaccgtcgtgttcgcggatcgacttatgtataccggtttccattatgcaacccgcgcgggcctttccattggtgtggacgatatggtagttcccgagcaaaaacgtggaattctggacaaggccgaggaagcggtaaaagaaatcgaatcacaatatgcctcgggcttggtaacgttcggtgagcgatataataaggtcgtcgatatttggtcgtataccaatgagcaagtggccaaagccatgatgggtaaactaggcatggaaagcgtggtggatgccagcgggcaggaagtaagccagcaatcattcaattcgatttacatgatggccgactccggggctcgtggttctgcggcgcaaattcgacaactggccggaatgcgtggattgatggccaaaccggatggttccatcatcgaaacaccgattaccgccaatttccgagaaggacttgatgttcttcagtactttatctccacacacggtgcgcgcaagggcttggccgatacggcgctcaaaaccgccaattccggttatcttactcgccgtttagtggacgttgctcaagacttggtcgtgatcgaagaagattgtggcactcgccagggccccatcatcactccgctcatcgaagggggggatatcgtcgaacccctgcgggaacgcgtgttgggccgtgtcacggcccaagaaatcttcgatcccgatacgggagaggtcttcgttcccgcaggcacgttactcgacgagcgctgggtggatttcattgaggaacggggaatcgataggattcaatgtcgttccgctattacctgtgaaacccggttcggtatctgcgcaaaatgctacggacgcgatcttgcccgtggggaattggtcaacatcggcgaggcggtcggtgtcatggcggctcaatccattggtgaaccgggcacacaattgaccatgcggacattccacattggtggtgctgcttcccgtgcggcagccgtggataacatcgaggtaaaatcttctggtgccataaaacttcataatatcaagcttgtaaaacacacgagtggtagttatgtagccgtatctcgatctggagaacttgccgtcctggacgacaacgggcgtgagcgtgaacgttacaaactaccatacggggcaacgctggctgtggccgatggagataccgccgccgcgggaatgcgggttgctaactgggacccgcacacgcatccggttatcacagaagtggcgggaatcgcccatttcaccgatatcatcgaaggggtcaccgtacaaaagcagatagatgatgttacgggcttgacgagtaccgtggtcatggatcccaaacagcgcggttcagttggaaaagaccttcgaccgatggtgaccttgatggatgaggctggggaaaatctatgcctgcctggtacacagatccctgcccaatacgtactttcaccggacgccatcattacggtaagagatggagataatatcggtgtcggtgacgtcatcgctcgcctaccccaagagtccactaaaacgcgagatattaccggtggcctgccgcgtgtcgcggacctgttcgaagccaggaagcccaaggatcacgaaatccttgccgagattaccggaacaattagctttggtaaggacaccaagggtaaacaacgactaatcattaccggcgaaggggatgaaaagcacgaaatgcttgtacccaagtggcgtcagatcctggtattcgaaggggaacatgtggaacgcggagaatccattgtggacggaccaccaagtccccacgatatcctgcgcttacttggcgttgaagccctcatgacctatatcgtcaacgaggtccaagaggtatatcgattgcagggcgttaaaatcaacgacaagcatatcgaggtcattgtgcgtcaaatgttgcgcaaaaccgaaattatagatactggagacacaagatttctccagggtgaacaggtcgaacgaggtcgtgtattagaggaaaatgagcgtgtcgaggccgaaggtaaactgcctgcccaatggcaaccgatacttttagggatcaccaaggcatcattggctacggattcatttgtttccgcggcatcttttcaggaaacgacgcgagtgttgaccgaagcctcggtgactggaaaaaccgatgaattgcgaggtctcaaggaaaatgtcatcgtcggtcgcctcatcccggcaggaacaggttatgcgcaccatcaggaaaaaagacggaagcgctgggaaatagatgaagaaatagatgaagaaatggaaatggacgaagaaatgaatgatgaagaaataaccgaagcaaaagtggccgaggcattcatggatatcgttgaaaaaagactggaaaatggggatacggcaatggcggcgggtgataccgaaagtatgagcggcggttgacgtgcgatgtcggggttttccttcttaggatacgaaccgctggattcttcctgccaaggtttggccctggatttcgatagtaacctgaacaccaaggaagcacccatctactattaagttgtaatagttcatgtatctcgcggtaggaacgcccgttaccgggcgtcctccgcacagacctggacacgcagttttcccgcatccggttcctcggttgtactcgctttcgcgcaagtgcgattgctcgcctcgattgctatttccgcagtgaggtttgcccgcctgacagtcatgagggaacttccatcaccccggaaaatgaaactcccgtaggtctggttagcgcggcgtaacccgacaaaaacgcatcgaaaatgccgggacacgaataatccgcctgacccgaccttgtatgatgttttgttgggttacgccgcgcattggcttccggggggggcacacattatgcgatgcgcgcctaacctaacctgcaagtccgggctgttgtttcttcatagtaatatattagcgaggccgtgcctcagaccgacaaggcagaatagattttccgcccccctttttctacagcggagatctttctcttttctctgcgaacttaagcgcctctgcggtttcaaaaacagcttttataaccgcagaggcgcttaagttcgcagagaaaagagaaaatgccgccaaaaacctgatccatttgtaaagatgagtcggagttaaagctagcgatgctttaccttaagacctttgatgcatgagcccgcattagtaaagcgcggttaaaacttgatctttttacaatcacttcccgaaattaaaagatcctagcaaaaacgactcttacgacttctgggatcgatacatcggttctacaggaatatcctgaaacgcgaacctgaagattggaatcgcactgaaccgaagactgaaccgaaaactgcaaaacaatttggtaagaatattcgaagtagtttggtgacggttaccggaagaggtgtcgcatgagcgtatcggttaccgagcaacttacatccgccgggtggtggatcgaacacgactccttcgccattatcgaccaagaggccggcgctcatacctacggcgaggaccagtggcccatcgtgcggcacatgatccatgccaccgccgatttcgaattcaatggcttgacgcactttcactcggaagcgttaacggccggcatccgggccatccaggtcggcgcccccatcgtcagcgacgtagggatgatccgcgcggggctttcgaaaacgcgccttctccatttcggtatccaggcccatcaattcatcgacgacgaagacgtcatcgccagcgcccacgaaaaaaacaccacccacgccatccaggcaatcgataaggcccacggacaggggcttatggataacggtatcatcgccatcggtaatgcccccacggcgctcttggaagccattcggctgatcggtgcggaaaacgcgcgcccggccctggccatcggcatgccggtgggttttgtctccgccgctgaatccaaggcggaactcgccaaggttagcgatgttccctggattcttaccgaaggccgcaagagtggctcgaccttggtggtagcggtggttcatgcgttactggggttggcggatatggaaaggagtggaatatgagcccgtcggtcttggtatttatcagctacgcctccgaggacaaagaggaatacatcgagcccatcgtccgcgatctggaggattgcttcatcaacgtatggctcgacaaacgcaggctcgtccccggcgagaatctcaagaaatccatccttcgggaaaggctcgataacggtgtttgtcaagcaagttgtccggcaatatccaacactaattaccaaaatgccatattgagtttttgccttcggggatggtaggtagctgtcgatggatggcgcacgactccgtgttgggtgggagcgctgtgcgtaatgggagaaaaatcatgcgtgagaaagaaaataggggaaaatggcgactggggatcgatcttggcaccaactccatcggtatcgcggcattgtcgctgaatgagccgaccgaggctggtgggaaacatacggtctctgggctcatggacatgggggtgcgtatcttttccgatggccgcaacccgaaagataaacaatccctggccgccatgcgccgtatcccgcgcggcatgcggcgcaatcgcgaccggaaactcaatcgcaacgcccgcttcctccgtcaattgcggggcttcggactgctccccaccacatcggacccaccgacaaaagaggatctggcaaggcggcaggaactggaggccctggacccgtacatcctgcgggccagggggcttgatggggaacttcacttgcatcacttggggcgggcgctctttcatctcaagcgtcggggcttcaagtccaaccgcaagaccgacagcggcgatcaggaaagcggaaagatccgagaggccaccaaccggacgaaagaacagctggaggaggccggttgccgtaccctgggcgaatggctcgggcgccagcgcatccaaacgctggaaaagaacgcggcagccccgaaagggaagcgcgatcccttgccccaggcccgcacccgcctgcacgggggcgccaaggcctattacgacttctatcccacccgcgagatgatcctcgacgaattcgaccggctatgggaatcccagcggcgctggcatcccgaggccctcaccgacgatgccttccggaccctgcgcgagaccctggccttccaatatccgctgcgcccaccaccggtaggcaaatgcaccctcgattccacccaggaacgcgccccgcgcgcattgcccagtgttcagcggctgcgcatctaccaggaactcaatcacctggccgttcagcaaccgggagaatcctcgcggcccatcgagaaaaaagaacgtgacctcctggcggaaaaggccttgtcccaggcgaaactcgaattcgacaagatgcgccgatggctgaaattaccccttgatggacgcttcaatctggaaagcgaaaaacgcaagcacctggacggcgacctgacggcggccaaactcgccagtgccaaatgctggggcaaggactggcgggatctgaacctggatacccaggaagccatcgttacccgactcctggagcaagaaaacgaagaccaactggtatcctggctcatggaagagcacgggttatcccgggaaaaggccatggccgtatcgcgagtgcagttcccaaccggacacggggcattctgcgccgaggtctcgcgcaagctcctcgagcagctggaggccgacgtggtgacctacaacgaggccgtcgagctagccggatacgagagtcattcccaactcgacaacgacgccgtcttcgacaggctcccctattacggcaaggtcctggagcggcatgtggccttcggttccggggaaccccacgacccggaggaaaagcgctacggcaaggtcgccaaccccacggtccatgtggctctcaaccagctccgccgggtggtcaacgacctcatgggccgcttcggcgcgcctgcggagatcgtcgtcgagctggcccgtgacctgccactctcggctcaggaaaaacggaagctggaaaggacccagaaggacaaccaggcggccaacgacaagcgccgggagatattgcgggactacagtgaaaaggacaattacgagaaccggttgcggctgcgcctctgggaggaattgagtcaggaccccctggatcgccgttgcgtcttcaccggtgagcagatctccttcgggcgcctattttcggatgaagtggagatcgagcatctgctgccgttctcccggaccctggacgatagtccggccaacaagaccatctccatgcgctgggccaaccggaaaaaagccaatcgttcccccttcgaagccttttccgacagccaacccggcctcgattgggaggaaatcaccgcgcgggccgccaatctaccgctcaacaaaagctggcgctttgccccggacgccatggaacgctacgagaacgaagagcgcgatttcctggctcggcacctgacggatacccaatatatcgcccggctggcggtctcgtatctcaaggccacgggcgccgatgtccgggtcattccgggccggttgacggcggacctgcgccaggtgctgggtctgaatacgctcctggccgaatccggcaaaagcggcacgaaaaagaaccgggccgatcaccggcaccacgccatcgatgccctggtggtggccctgacccagcgggggctcctgcaaaaggtcgcgacgcgcgccggacgagccagggaggaagggcgtactcgtctattgcagaatccgggcgatccctggccgggctttcgcaatgatgtggcatcctgcgtggaggagatcgtggtctcccataagccggaccatggcgtccagggcgccctgcacaatgatacggcttacggcttgctgaaagaagaaccagacaccaagggtatccggacagtggtccatcgggtctcgctggatagcttcaaaaggcgcgcggatatcgaaaacattcgcgacgataagttgcgcgaatacttcctggccaataccgagtacgtccccgacaaggagatcggaaagacccttgtcgaactgggcgaacggcagcaccccccggtgcggcgggtgagaatttgcgagcgcctcgatgtgattcccatccgcgatgcccaaggccagccattcaaggcctacaagggcgacgccaactattgctacgacatttttaccgggacgccaaagaaatctaccgaaggaaaatcgaccgggaacaaatgggccgggcgagtgatctcccggttcgcggccaatcaaccgggtttccagccccaggcccgcgtctccactggcggtgagcccctcatcatgcgcctgcgcgtcaacgatatgctggagctggaggagagcgatgatcgctggatcatgcgggtcgtgaaactctccaagggacagattacgttggccagggaccgcgaggccgggaacctcaaggcccgcgatgcggacaaggccgaccccttcaaatacctgaccctgtcgccagcgggcctgggggcgagaagcgcacggatggtccgtgtcggtccctccggtgttatccgccacaaaggcaatctatcgtgatcgggcgggtggtggagatcgcccgggagggggcgcacctgtccctggatcggggcttcctgcgggtctccgaatcgggcggggaggtggggcgtgtcgccatcgaagatatcggtgctctcatcgtgcgcggatatggtgccaccatttccatcaacctctgttcacgcctgtcggaggtcggggtacccattgtgctatgcggggccaatcaatcacccgatgccctgatctggccggtgcggggccatttcgagcaggggcggcgcatgcaggcccaggccgaggccggacgacccctgcgcaaaaggctatggcgcgatctggtggcggccaaagtcggggcccaggaggtggtcctggcctatttcggtaaaaaggacccgagccttcggcagatgatcaagtccctgaaatccggtgacccggagaatatcgaggcccaggcggccaggcgctactggccgcggctgatgggggaggatttccgccgggatcgaagcgccggcggggccaacggggccctcaactacgggtacacggtgttgagggcagcggcggcgcgctcgattctcgcggcgggcctgcatccatccctgtcggtgcatcacgaaagccgcggcgacgccctccggttggccgatgacctgatggagccgttccgtccctatgtggacagggtggtggccgaatacatggcgggggaggaagggatcgaactggaccaggacatgaaggcggcgttggttgcggtgctgaccctggatctggcgggacccaatggcgcccgacccgtgcaatcgtgcctggatgccttggcggtatcgctggccatgatctatatgggggagaaccgtaagctggatctgccggagggtcttttggaggatgcggcttgaccgtaaccgccaagccggagttgaaatccaatactctttgattttcctcattatgaaacggccatcatttgtccataaaggcaaccgttatcatcttactcatcttgactcgtttgactggcattacagggtcaaggccggtagggaacgaccggactggatctgcaagttccaggttattttctccgaccattgtttcacacgaaatcctttttcgggggaagaagttgccgaagatatgtggcatgaggggccaagaggaaaacgggtattttgcttcaaacgttatgagttatctttccgtctgccggaaatcattcggacccttggagagcgcgtttgctaccgcacgccgcacgggaatttccttaccgttgttgcgttgacaatcagagaagggaaacaggttgaatacgaaatctacttcgatgtcgtcagggcgagtagaaaaggatggttgcacctaatcgtgcaaagcgcctatgagcgcacgaaggatcatgagacgatgcggaaaaaaagaaaaatccgcctggatgtgattgcgtataacagacgggtagggaaggccattcgttcgggtccgtgaacgcccaaaataaaaagcccgctcgaaggcgggctacagggactcttggttatctccagacccgctggagacctgttgccaggcggtacaaccagcactgccgaaacagctccatgatatggctgcgttgatgatggtgtgatcttttgccgcaaaaagcaagtgcaagtccctttcaatggtttttagttaggatccaatactctttaaaattctctctcattatgaaatggcgatcatttatccagggtggtaaccgttatcatctcacccatctcaacccattcgactggcattacagggtcaagactggtaaggggcaatcggagtgggtctgcaaattccaggtcatttcctccatgcactgcttcacgcgagagccttttccggaggaagaggttgcccggaatatgtggtacgagggacccagggaaaagcgagtattttgcttcgagcgctatgaattatccttacagctaccggggattattcgaactcttggagaacggaaatgttattcgacgcccagaggcaacttttttgccatcgaaccggtcacgctgaatggggagaaagccgaatacgaggtgtatttcaggatacccaaggcaaccaagagaaccatgcgtcatagtcggctgaacttgcatgtacaaagtgcttatgcccgcacgggaggttacgaaacgagtcaaccaaagaaaacccggttggacttgggtgagattgccaggaagaagctacacggaaggtaatttcgatggatggaaaaaacgaagcccgctcaagggcgggcttcacggggctcctggccccctccggaaaccggaggcttttaaaccactgactagccaagcagcacaaccacaccgcttcacgcagctccgctcatatgattgcagtacgatgataccgtcaaagttttacgcgaatcaatacttacttcatgaagtcgatgcgaaaaacccatcatgacgaaagattgctcagcgttttcggagcaaaaaaccgctcatagggccgaatcacctgcgtcatggcgtcgtagatcttcaggtttcccgtaatgatgtttccggatttcagataatcctccgtattgcccagcccacccacgatgccgcccgcctcctgaatcaatagcgcgccggcggccatgtcccaggaatgcaagccgaattcccagaatccatcgaatctgccggcggccaccgaggccagatccagcgccgccgaacccgctcttcggatgccggccgatgcggtgaggaaggccctgaaaatcgataggtagtcatcgagttgcccggttttctcgaagtttccatagggaaatccggttcccaataacgcgtcaccaagattcttgcagcggctgacccggatacgccgatcgttcagtttcgcgccttctccccgcgttgcggtaaatagctcctcgcgcaaggggtcgtagatcaccgcgtggtccagacgccccttgtacgccagggcgatggaaatggaaaactgcggaaatccatggatatagttggtggtgccgtccagtgggtcgataatccagacatagtcgttgccttgccggtatccaccctcctctccgagtatgccatggttgggataggccttgagcagggtatcgatgacgatctgctcggcttgtctgtctacctgggtgacgaattcgttgaagctcttcttggcgatggtgagcctgtccacgcggtccgaataacgcacgatgatattccctgccgcacgggcggcgcggatggcgatattgagcatggcatgcatgtgtgtaaccccttttggcacggttttctgtgatttttacttgtgacaatcgataccaccgcgcagatatttgtgtctccgacgcgagagtgctaattgaatggtcaaaggtgggttcggagatgtctgtgtggatgcaacctacccagtccgccgttttctcattccctacttaagccccagagatctattttcctttctgttcttccataccggatcagagtatgggcggcatggctacaattgccatcaccatgacggtaatctcataagcgttcataaatgatgtgttgctggttgatgcaggtgctggttatagaggtcattggagggaagaagcgaaccccttaaaatccggacatcggtttttgttgagatccgcacgaggtggttagtatgaatcttatgcgggctttatggttttgtctgagtggacagcgcaaagttgccaagatcaatctgctctttagcaaagtccggtttcgatagatatcctacagattccgttcgacgagacttgcaataatgttagcgctgctctacgggtggaagttttttgattcctgtcgcatattcgatttgggtgattcgctcgaccatgcgggcattcatctcacttactgcttgaagagccgtgctaactatatctttcttcaggacctcttcgcgcggcatttccagtttgagtattctgccgccatgcccatcgactttgttggctagtctggttgttacggattccaactgtccgaccgactttgtgagagaaagtgtttctttcagaatatcaccgattgaactcactatttttccctctcttccattgccgcgagtatattctcgacctgctttgtcgggttttgcacggcatgattggcctctctgagatgacgggcggtaactgctaacaactcttcatcatctgcaatgccccgaggaaggtgtttcaataccgataatacactttgaaaatcatcggcaggtttgtcagtctctccccaaatttcgaaaagcctttgtgtatcctcgattactatgccgcgggatgtgtattgacggacgaatccagcttttccagcacatccacgggcgtatccagaaccttggcaaggtcgcgacggaatgattccgttgctcccgcgattatccctgatttttcattcatcgataatctcccgaaaaccagactcgatagtctatcggacggggtatgctatagcaaaactaaccaaatagacgctttactcaccgttgtgtcttggactcaactcgtaagtgcggctcatctgtgtcggaatagcaggcgatggtatgtttttccatacgtcgcgggggggggacgaaaatagagatcttgaagttccggctcggtcaggtcaggggaatcgaaaattgcctttttcggtgccctgctgatggtagaatagaaagaaggtggggacttgatttccccttcgtgacgaattcatgttgtttgtttcgagatatgggagatgacgcaagatctcttggtcaacctctctcgacaatcgtattcaagaccaaaattcccaaacaggacttcaagaaccatgcaaatagaaaccaaaaccacggcgcctttcgatgaccagaagcccggcacctcggggctgcgcaagaaggtcaaggtatttcagggcaagagcaattatctcgagaatttcgtgcaatccatcttcgataccctggaaggcgcgcaagggaagaccttggccctggggggcgatggtcgttacatgaaccgggaagccatcgggactatcctgaaaatggcggcggcccatggcttcggggaggtattggtggggaagggtggattactttccacgcctgccgcttcgtgcgtgattcgcaagcataaggcacttggcggcattatcctttccgcgagccataatccggggggaccggcgggtgatttcggcatcaaatacaatgcggagaatggcggtccgtcaccggagaatatgaccgatgcctttttcgctcgcagcaaggagatccgggaatacaagatcgccaatgcccccgatatcgatctcgatgccatgggtgagcaacgaatcggcggtatgcgagtgcgggtcatcgatccggtggccgattacgcggaactgatggaaacactgttcgatttcgaccgcattgcatcggtggccaaggccggttccctttcggtgtgtttcgatgccatgcacgccattaccggcccctatgccggggaaatattggaacggcgcctgggcatggcgcccggtaccgtgatgaacggggaaccgaaggaggatttcggcggtggtcatccggacccgaatcttacccatgcccatgacctggcggatctcctgaatcgcccggatggaccggatttcggcgcggcatcggatggggatggggatcgcaatatgatcatggggcggcaattcttcgttactccgagcgatagcctggcggtgatggtagccaatgccgggcatgtgctcggttaccggaatggcctggcgggggtggcgcgttccatgcccaccagccgcgcggcggatcgggtggcgaaggacctcggtatcgaatgctatgagactcccacgggttggaagtttttcgggaatctgttggatgccgacaagattacgctgtgcggcgaagagagcttcggtaccggttccaaccatgttcgggaaaaggatgggctatgggcggttctgttctggctgaatctgctggcggcgcggcaaatcccagtgagcgaactggtgaaggatcactggcgcaagttcgggcgcgattattattcccggcatgactacgaggccctggatgcggatcttgccaacggcatcatgcaggagttgcgcgataatctgtcgaaactgccgggcaagagcttcctgggacagcaggtggcctcggcggatgatttcggttacaccgatccggtggatggaagcctgacggagaagcaggggatccggatcttcttcgaggacggcgcgcgcttgatttatcgtctgtcgggtaccggtaccgagggggcgaccatgcgtatctatctggaacgctacgagccggacccggataaacagggcctggatccccaggatgccctgaaggataccattgccatcgcggaggaattgagccaggtgaaacaacgctcgggtcgtaagggaccggatgtgattacctgatattcctgctgtaacgggaatgcgcttcgggatcgataggtcgtatcttcgggatcgcttgcgggatcggaattcgatgtccttgatttccgatcccgaaattgacttggtagtcacgacctttggatgccatttcgagtacagcggaaagttttgtgcgccaggagattggatatcggatttctcgctgtgttcgaaatgacaatcggtaattcagtgacccgggtctacgtcatggatgccttgatctcggtcgaatacccgcgctacatcaccccagccgaataccctcacccccttgcgcgtatgttggtgggtgccgccatagatcaacgtgggcccgatcgcctgggatccggcgagaagcatccaacgttccagccccatgaagaattcccggttcagggtctggccggatttgatctcgatgggcatcggattggttccgacatcggcaatgacatcgacttcattgccgttgctgtcccgccagaaatagagttcggcgtgttcaccacgattgaatcgggttttgacgagttccgaaaccacgaaggtttcgaaaatggccccgcgcaggggatgggtggcaagttgatcggtctcccggatacccaatagccaacatagaagtccggtgtcgtaaaaatagatcttgggggatttcgtcagccgttttccgaagttggcatgatggggacggagttgaaacaggatgtagctggcttcgagcacggagatccaggccttggcggtgttatgggtgatgccgcagtcggtggccaaagaggatagattgaggatctgtccgctgcgtccggcgcagaaccgcacgaaacgctggaatgattccaactcccggaccttgatgagttggcggacgtcgcgttcgatataggccgtgacataggctgggaaccaggtgccgggagatagttcgcgatcatacaaggccggatagccaccactgaaaagcatggtttccggatgggtgggcttgagtgccgcttggttcagttcccggacggagaatggcaatagttcgatgaatccggttcgaccggccagggactgggtgatcccggacatgaggtcgaattgccgggaaccggtgagcaggaaaagacccatgcgaccatcggtatccacatgggcctgcagataggagaaaagcttgggggcacgctgcacttcatcgagtaccgccccgtccggcaatcgtcccagaaaagcgcgtgggtcgtcgatcgccatctcgcgcacgtccgggtcttccagggagagatagggtttgtcggcaaagacagcccgggccagggtggcctttccggattgccggggtccggtgatagtgacgatggggaatccccgcaggagttggtggagggtagattggatatcacgctcgatcatggttttttggtggtttgggagtcatcagggattgatttcggctatgtggagattggagaacggtaggataatttatgtaaattgtcaattgtttttacaatttgcatagattttagcggtaaaatcattgtaggatattgatcggtcaacaggtcgcatcatatttctgttgcgattcccaatgagtcaccctctagcgaggtttctccccagaccgatgaagcatgatgctcattagtaaaaatatcttaacaaagtcggcgaagcttcactaggagaatatccatttatgccaatacctcatcgggagattatccgtattgccacccggcgtagcccgcttgccatgtggcaggccgagcatgtgggtcgtcgtcttcgggagtttcagccggatatcgatatcgaattggtaccgatcgtgacccggggcgacaagatattggatacaccgcttgggaagatcggtgggaaagggttgttcgtgaaggaattggagcgcgctcttctggatggttcggccgatatcgccgcccattccatgaaggatgttccggcggtgttgccggatgacctggtgttggcggcgattctttcccgcgaggacccgcgcgatgcctttgtttcggttcactatcagcgtctcgatgaattaccgtccggcgcccgggtcggcacctgtagcctgcgcaggcagtgtcagattcgcgagcgccgatcggatctgagacttttggatctccgggggaacgtggggacacgcctggcgaggctggatgccagtgagttcgatggcattattcttgccgccgcggggctcgagcgactcgggttcggtgatcggataagggagcccctttcctcggcaatgagtctgcccgctatcggccagggagcgatcggcatagagtgtcgacggggggatgtccgtatcgggaccaaggtcggattgttgaatgacctgcccactgcccgttgcgtacaggcggaacgcgccatgaatgggatgctgggcggtggttgccaggtgccggtggccggatacgcgaagatcgaggaaggctatctgcacctgcgggggttggtgggtagggtcgatgggagtcgggtgctgcgcgcgagcggtagtttacccgtggagggtgtcaataccccgggcggagtagtaggcgaggggacggttgtggagttgggacgcacggttgctggcgcgttgctcgcccagggagcgggtgagattctgacggagatacgagaagcggggtgttgaggctttggaacgaattctatccgggcaaggggggagattgacgggtgtcggggtatgggttacccgtccggttcggcaagcggatgccttggcgcgctgtatcgagaaggaaggcgggcaggtgattcgcctgccggtgatggccatcatggatgtggacgatcgggaggctgttaccgcccttatggaccgactcgatggtttcgatctggcgatcttcgtcagtgtgaatgccgtgcggcgggggcttgattatgtcggtggggtggaaaactggccggcgggggtcggggtatcggctattggacgtgctacggcgggggcgctcgaggaaatggggcttttttgtacgttcgaaccggtgcccccttataacagtgaatccctgttggcggttccggaattgcaggccgaggccatagcgggtacccgtgtaatcattttccggggagttggcgggcgagcgttgctgggtgagacactgatggcccgtggcgcatgggtggagtatgccgaggtataccggcggggtttgccggaatgggtcggaacagtatcgattccctgggatcgaatcgaggttatcgtggtgaccagcggggagggaatcgagaatttgtttacgatagccgatgacagggagcgagagcgattgtgccgaatgccgtttgtggtgatcggtgaacgaatggcaaagctcgtggagcggttcggtggctgctatccgccaatcgtggccgatagcgccagcgacgaggcaattgtcagtgcgttatgtacctgggccgccaatagattgtcatgaaaagaaggggggaggatt

SEQ ID NO: 2492 - DNA, 23162 bp, synthetic construct
  misc_feature 1..23162: note = Synthetic
  source 1..23162: mol_type = other DNA
ccggtggcggtgactctgccgggggcggcgacattctcaccattcatggcgagatcggaacggtcgatcgtggcccgatggaacccgggctggaacccctgttccgcgcctatggcatcgatttcgagcaggccagcgtcatgcctttcgccagcctggcggacatgccgcaacacaccgtccgggtggcctatccggagggcggagagacgcacagcttctccggccccttgctgcgcgatgtcctggcggccgccctgccggagggcgatatgctgaccgtcaccgcgctggacgggtatcagcgcgatatcgagctctcccgtatccaggaacatgatgtcatcctggccatccgcatggagggcgatgcgctgaatatcggcggtttcggcccggccatgattgtctggccgcgcgacacggatgatgcgctggacggcatggatgacagcgactgggtgtggggcgtgttctcgatcgaggtacgctagcgccacctgtttgccgctttttcgaaccgtgtaaacggtttccgtccccgcatcggcgaggacaggctttccgctgaaatgccctgccaggctgccggactggcacacgattgtgtcagtgaccggaaaaagccgttgcgtccgcgccattgcttcctaagctgccgcgcaagcaactcttggggagagatatggacgctgaagccgcaacaatcggccaaaccgtttccgagctggtcggggtggttaacgggttcgtctgggggccgcccatgctggtcctgcttctgggaaccggcctctatctgacggtttttctgaaattcatgcccttgcggaaaatcggcttcgcctttggcgagctgatgaagggccgcaagcccgagggtgagggggatgtgacgcctttcggcgcgctgatgaccgccctgtcctcgaccatcgggacaggaaatattgccggggttgcagtggcgatcgccattggcggtccgggtgcgctgttctggatgtggatgacggcgctggtcggcatggccacgaaattcgccgaaggcgtgctggccgtgaaattccgtgaagtcgatgccgatggccgccgggttggcggaccgatgtattacatcaagaacggcatgggcaagaagtggatctggctcggcgggctgttcgcctttttcggcgtcatggccgggctgggcaccggcaatgccatccagacggccgaggtcgtgcgtacggtcaatgacacctatggtgtggaatactggatgaccggtaccgtgatcgccgtcctggctgcggctgtcattctcggcggcatcaagcggatcgccaccgtggccagtgcgctggtgccatccatggccgggatctatatcctggtcggtctgatcgtggtcggcatgaatgtggatgccataccggccgccctcggcgccattttcaccaatgcgttcggctttgacgctgccgccggcggtttctccggcgcgctgctgatgatggccatgcagcgcggcgtggcacgcgggattttctccaacgaagccggtcagggttcggccccgatcgcgcacgcggcggcacaaaatgacagccctgttgatcagggcatcatcgccatgttgggcaccttcattgacacgatcctggtgtgttcgatcaccggtctggcgattctgacctccggcgtcatcccggcggaatgcaatgccgggctgatcgcgatctccggaaacctgcccgaggtctgcgagaccggggcccggatcaccgcggccgccttcggcgcgaacctgcccttcggtgaccagttcgtcaccattgcgctggcgctgtttgcgttcaccaccattctgggctggtcctattatggcgagcgctgcgcggaatacctgctcggcgtcaagatcgtgctgcccttccggctggcctggattgtgatgatcctggcggccaccggcctgctctatgccggcgacaatgtcaccgcgctgatgaatacggtgtggctgaccaccgacacgctgacgggtctgatggccgcgccgaacctcatcgccctgctggtgctgtccccgctgatcttcaggatgacgcgggaatacttcgccaagctggaagcaggtgaaggcaaggaagccgcggcgcaggcggcgatcaatgtcgatgtgaaggatacaggtgacggcccgccccgaacctgaccttcacgggatatgaatggaaaaggccccgtcatccggcggggcctttttctatgccctgtccagcgccgcaagcgcggcttcgacatgggcgttgaactggccccagcgcttgtacgccagcgcatcctccgaggccgcgcgccagctggcggcaaaggcggcgcggtcggccggatcggccagggcggtgcggatcgggtccaggcagatgcggatgcagaagagaatggcgttcgtggcctccagccggacgagggtctggcgttcgacgcgcagggccagccggtcgatggcctcgcgggccggtgtcgtcttcaattgttcgcgcatggccgagccgtgcggccagtgccgctccatgcccagttgcacggtccagttaaagcgctcgaagacttcgcctgacggcatgcggtcaaagacgcgggcaatctttcccgccagcgagggtgagccgctgggcacaggggcatgcagctggtgcagttcgcggtcgaaggcatcgtcgagcgaaaagaaggtcggctgggtcaaaagcaggctggtggcgatccagccgtctccggccttttccatgaccacaagatcgtccgagaccagccgccccgccgcgatcagggccggttcggtgcggcccgtacgggtctggccggtcgccgcctcgatccgggcgagcgcttcggcttcggcagcggccgcagacgggagggcgcggtaataggtgtccggcgtggcatcgaggcgttccgatttgagcgccagccagccggcttccgggtccggcgtcagccagtcttgcggcgcgatgcgcctgagaccgacttggaaacgcggcggcccgtcatagaagggtttatagggcggccgcttcacggcttgcgcagcccggtcagggccaccagcaccagcgccagcgcgattccggcggcgtcggccaccacatcggcaaaggacatggtgcgttgcaggacgggcgaagcctggatcagctcgatcagcaggccgtgggtgatcatggccagcgcgatgaaccagagcggcaggcggcaccagccaaaggcggcgagcagggtgaggaccaggaaagcggcggcatgttccagcttgtccgtcccgaggagccgcggcggcgcggccgggccgggcaggagcgccagaatggtgatggctgtaaaagccagccagaacatgcccttggcggcttgccgcaaagcgaggctctttctagggtccggaccggaagaaaacgggtgaaatgacatgccggccactgtccttgatatcgagaccttgtcaaagccccgctttgactggactgcagacgaggcgggccggatataccgggctccgtttaacgatttgctgttcgcggcgcaaagtgtgcaccggaggcatcacgcggccaatgccgtgcagaaatcccagctcctgtcgatcaagaccggcggctgtgccgaggattgcggctattgcagccagtccgccttccacgaaaccggcctgaaagcctctaaactgatgccggtggacgcggtcctcgccgcagcccgcaaggccagggccggcggagcgacacgcttttgcatgggcgcagcctggcgctctctgaaagaccgcgatgtcgatgcggtgtgcgagatgattgaaggggtcaaggcggaaggcctcgagacctgcgtcacgctcggcatgctggaagccgaacaggcccggcggctgaaggtggcgggactggattattacaatcacaatctggatacgagccgggactattacgacacggtgatcaccacccgcacctatgacgaccggctggaaacgctgggccgggtgcgtgaggccggcatcaatatctgctgtggcggcattatcggcatgggcgagagcgaggatgaccggatcggcctgctggtcgagctcgcctcactcgatccgcatcccgagagcgtgccgatcaatcatctggtcgcggtcgagggcacgccgctggggcatgccaaaccgctggacgggtttgatttcgtgcgggcgattgccgccgcgcgcctgatgatgccgcgctcggtcgtgcgcctgtcggcgggccgcgaaggcatgagccgggaattgcaggcgctgtgtttcctggccggggcgaattccatctttgtcggcgaggaattgctgaccacgccgaatccggacctggaggcggatggcgcgctgttcagcgatctcggcctggagccgatggcggcgccgtcttcgccagcggaacgcgcggcggagtaggcagcacatatttcccctccccttgatggggagggtcgacgagccgtaaggatcggcggggtggggtgatcaacgccgcgactgtttattgcccccacccctacccctccccacacagggggaggggaaagcgggcaacccccaagataaacccgtaccgtcttcttccggcttgaccggacgacctcgatgacgaagaggccctccggtcaagccggagcaaatcgcgctatagaacagacggtttatgtgacgcctaatccagcccggcgagttcgcgcagataatcccaggtgaaaagaccggaatcatggccgtcatcgaacacgatctggacggcatagcggccgaccggatgggcggcggtcacgccgacattttccttgccggtgatggcctttttctgacccacaccatgaccctgcacctcggcgctgggcgattcagtgcgcaagcgttcaaaactgacttcgccggtccggccgtcatcaaagtcgatggtcagcactttgcgggactttgaaaagtccagtttttgcggccaggcgcggctcatttcgcttccgcgtcgctgagctcgcgggcctcctccggcaacatgatcggcacgccctcgcgcaccggataggccagacgcgcctttttcgagaccagctcgcccgccttgcggtcataatgcaacggcccgcgcgtgaccgggcagaccagcacttccagcagtttgggatcgacgtctttttgcggggtttcgatgttttcgctcatgtcttgatatctagcgccgctggcggcaatttgccagacgggtcacgcatccaggtcggtctcatccacgtcatagtcaatgatatcaccggggcggcaatcgagcacgaggcagagtttcgacagggtatcaaaacgcattccccggactttgccgtttcgcagcaggctgagctgcgtttccgacaggccgattttctcggcgacatcacgcgcccgcattttgcgcctcgccagcatgacgtcgagtgtgacccgcaccggcatcagacgaaaccgtccagctcggcacgaatctgccggccccgccgcgccagaaggatcagcgtcagtccggcaaatgcgagcaccagattggcgagggtcagatcaaagcggactccggtcatcaccgtaaagccgttctgcacgagatgacgcaaagccggttccgcgagaatggccacccatgccccgagcatcaggccggcacccatctgattgaggcccgataacaaagccgggccaaatcctgctgcgtctcgggatttcgaaaacacttccgcaccggaccagaaggcccagagatagaaaacgggcgccgccaatccaatccagtccgctccagcttccgaggccggatagatggcaaggtgtttaagccctagcaggaccgccacgatcaaaacaaaaatccgcaaggcaagcgcaatgggtgaggccgacaaggcaggcatgatttcttctttcagttaaatatcatcaactgaaacgctaattattttaagttttatataaagtcaatacagtcagttcggcgtgccgcccgcaccttcggccagtttcttttccagcagcgccgtcatcagatcatagcgggcgcggccgtcctcggcttccagcagggcctgtttttccttggcggcaaagggggcggccatggcgatctggtcgacaatgcggatgacgggggcggcatccaccgtgccccagtcacacttgatgccttcctgcgcgaaccagccgcgcaacagggcggtgaagcgcgcgcggtcggcggtcagcagggcgtcgggcgcggcgcggtcggcggtaaagagcgaccagtcgacctgcgcggtgcgataaggggtcttttcgtccagctcggcgcggatctcgaaacgggagaggccttcgagctcgatcagatagcggccatcatcggtttcggcatggcgggtgatgcgccccgccccgccgatcgcctcgaccagcgggcgctccggcgtgccaccggcccgcgtctggacaatgccgatcagcttgtctgtcgccagcacgtcatcgaccatgttgagatagcgcggctcgaaaatattcagcggcaaggcctcgccgggcagcaatatggcaccgcccagcgggaaaatcggcagaatggatggcagacggatcatacccaagagctagggtgaatgagcggctctgccaagggggtcaggaaaacagcagggtggacaagcgccgccgcccggtcttcgccaccggcgaggcaaagcctgcggcctcgaaaatctccagcagccttgctttggccttgccctcttcccagtccgcttcggcttccagaatgtggaagagctgatcactggcgccctgcagatcgcccttgccggccagcgcattggccagttcgaagcgggtggcgtgatcgccgggattgtccgccagtttctgttccagctcgccggcctcaccggcatcgccggcttcctcggtcagtttcagcgcagtcagggcggcctgcacggccggatcggattttttgtcctccggcacgtgctggaggagttcttttgccttgtccggttcgccaccggcgaggaagacccgcgccatgccggcaatcggggcgatattttccggatcggattgcgccgccagcgagaagtcctgggcggcaccgccgagatccccggaggcgaggctttcctcggcgcgcttcagcagcgcctcgatctcggccttgtccggcccgtcgcccgtcaggcgcttgatgaaatcattgatctggctttccggcagcgcgcccatgaaaccgtccaccggctggccgttgcggaaggcaaagacggcggggatggacttgacctgaagctggccggcgacgcccggattctcgtcgatattgatcttgaccagacgcaccttgcccccggccttgcgcacggcattctcgatcatcgggccgagctggcggcaggggccgcaccagggggcccagaaatccaccagcaccggcacttctttcgagggctcgatgacatcggccatgaagccctggtccgtgccctccttcaccagatcggcggcgccctgcggggcggacggggcggcattcgggttggtggtgaaaaaatcgctcatggcacaaatccgtctttgatgtcttcgggtctacttggcgcgggcgggcggtgtttacaaggtcagtcgtctgccgccagcgccgcgaaatccacaatcagcgggtcatggccggtggcctttgcaaatttcaggaggtcgtcgcgcgcaatggcggtggtggcgtcatttttcagcgggtggaaattgaccggatcggtggccagcaaggcggcgtcaacgacgaaggtgacctgcctgccggtatcattcatcagcgcaaaggcggtgaccgagccgggacggacgcccagcacttcaagcaggtccgactcgcgggcaaaggacaggcgctggcaaccgatcagcttgtgcagacggttgacgcggaccggcgtatcgcccagcgccgagaccagcacgaagcggcctctcttgtccttgaggaagagattcttggtatgcccgccgggcaggccggccttgatcgcctggccctcatccaccgtgaagaccggcgcatgatccagcgttgaatgggcgatgcccaattcatcgagaaacgcgaacaggtcggtgcgggccgcaggcatgacctgccttatgcggcatggagcacatggatcaagcgcaaaattgcgatagtctccgcctccggccataaggatctgcccatgacgacgactgtctgcttttttgccttccgcagcccctattcgcgcatcggcctcgccaagctgaaggcggcgggtgtggcgccggtggtcattccctttaccggaccgccggacggggcgcccttcttcaatcccaccgacagccgcccgaagctggactattatctggaagacattccgcggatgacggcgcgggccgggctcaaactggcctttcccgacccgttcgagctgacctcgcgcctgcccaatcttgcctttcaccttgccgatcaggcgggcaagggatttgagtttgcctgtgcggcgtcggaggcgcgctggggcgaggggcaggatctcaaccggcatgacgtgctggccggcatcgccgccgggctgggtctggatctgccggaggcggaggcgctgaaaagcgcggagggtctgcgcgcggcggagcaagaggcgcgcgccgcggtcaatgcccatggcgtgttcggcgtgcccttcctgatcgcggacgggcagaaatactgggggcaggaccgctttgatctctatctggaagcgatccgggccagctgaatctggcgtcttgccatcgggccgggattgcgcgatatacgccgcctcccggcgcaagccggaaccccggacatgagcgggcgtagctcaggggtagagcgtcaccttgccaaggtgaatgtcgtgagttcgaatctcatcgcccgctccattcttttcaatgacttagaacgaattagttgaactgtagaaagttccgttccactgcgattccaccaccgcagcccttaattggttttcacaggcatctgtctgaaagtgggggtgccgcaggggggcaacggggggcgctttcatttgcaagtgatggcatgaatttttctcggagaaatgcccggtctccaattaatctagtctaccaatcgccggaactcgaacagtcgaactcatccgattggtaaagagcggggtcacggttttccagatagcagctcaagaaataattggggtcttgtgggcggtttcgataaaatattccgctgaggtaatctattaagaggacgttagacggaatcgaaacgtcggatatatctgctctatcaaaacattgcgctgcgatcatcatatagaggatggattccggctctggcctcatattctcgcgatcctctagcgcctgtcgttcgtcctctataggctgccaacccaatggattgcctgctgtgcccgcgagcgcataggggaccattgacgaactcaactgatcaactgacaagtcggaacaatcaacgcgcatgtatgattttatgatagagaactgcattgggacgccgggagttcttcttgccataagaacccatcctccctcctgctcggtataatccgagtatcgaaacagcacgccatcggttcgatccgagagcatttgcacccagcccggcacctgttgttgatcaccctgagcagccgagtggccggtcgtcaatccgattaaagagaagatcaacagagctagacggatcatattttctaatcccgtgcaaaaaaagaacgacccccgaagaggccgttccattttgtggtctaaaccttgttaccggaaagaccgcatatccagatcagctaaatttggacttttctacgctactgtttgcaggcagaggcgtcaatatgcttagattgtagaggttgtaggaaagaaatctggatgacttggcgattagggctggatgtcgggacaaattctgttggctgggcagcgcttgggttgggtccgaccgggcccgaaactctcattggtacaggcgttcggattttctcggacggtcgcaatcccaaggatggttcttcgctcgcgacaaagaggcgcgaacctcgatctgccagacgaaaccgtgatcgttatctgaaacgtcgtagcgagttcatggagcgacttgtcgcatttggcctgatgccaaaggacgaatccaaacgaaaagagttggaacatctagacccctggatactccgctgtcgcgctctggatgaacccctgacagctcatgaaatcgggcgtgcgctctttcaccttcaacagcgccggggctttaaatcgaaccggaaggcggatcggggagatagtgacaagggtgcaatcgctgaggcccgagaacgaacactcgacaggcttgcaaatgaaggcgcgcgaactctgggtgaactgtttggtcgcaggcgcatggacgccgcgcaaaataatgcggtaacgtcaaagggtgcacgccaaccacaacccgccgccagagtgagtccttatcaagacggcgcaaagcttgcctatgattattatccgacacgcgaactgatacagcaggaattcgatctaatctgggagtcacaggtcagttttcagggcaaagacacgttgacagacgacgcccgtaacgcgcttgcagacacgctactttatcagcgcaagttgaagcctcagccggtgggtaaatgttcgctggaccccacccagacgagagcagaacgcgccctcccgtccatccaaaggctccgtatttatcaagatgccaaccaccttcatgtgctggttacaggagagccatcgcgttcactgacgcttgaagagcgcgacattgtcgtcgacaggcttctcgggtcggcaagagtttcgttttctggtctgcgcaaagcattgaaactccccgcagacagtcgcttcaatctggaaagcgagaagcgcagctttctcttaggcgatgaaacagctgccgaactcgccaaggagaagcgctggggcaaagaatggcggaaaatgcttttcgcggaccaagagcgaattgtgcgtcagttgctggatgtggaagaagaagaagaactgagacgctggctgacagacgaattcggtctaggcgcaacggaagcaaatgccgtttcagatgcctcgttgccagaaggtcatgccgctatctgttccgacgcagccgggcggctacttacagcgcttcaaggtgcggtgatcacctatgacaaagcggtcattgaggccgggtttctgtcacattcgcggctggatcatcatggcgaaattctggatcgcctcccctattacggcaaggtgctacagcgacacgttgcctttgggagtggtgaaccatctgacaaggcggaaaagcgatacggcaaggtcgccaatccaaccgtccatgtggccctcaaccagattcgacatgttgtgaatgatctggtcagacgcattggatcgcctgaagaaatcgtcattgaactcgctcgcgatctgccgctatcggctcaaggcaaacgggatcttgagaaaaggcaacgcgaaaaccagaatgcaaacgaaaaaagacgagaggatttgaggaaactcggtcgatctgacacctatgaaaaccgaatgcggttgagattatgggaagaacttaatcccgaaaacgttcttgatcggaaatgcccgtttaccggcgaacaaatcggaattgagcgccttttttctgatgaggtcgagatagagcatatcctgccgaagtcccgaacacttgatgatagtccggcaaacaagacgctgtgcatgcgctctgccaatcgagagaaacgcgagcggtcgccctatgaagctttcggttcttcacccggctcatattcatggggtcatatcgtcgcgcgggcagctaatatgccgagtaataaatcctggagatttgcacccgacgccatggatcggtttgaatcggaggaacgtgactttctggaccggcagctgagctccacgcaatacatagcgaggctgacagccaattatctggtctggttggtaggcgaccccggaaaggttcatgtcacccccggacgtctgacaagcgacctacgacatcattgggggctaaattctgttctgcgcggacacaatgaggccgagccggaggcgattggtcagaagaagaaccgcaatgatcatcgtcaccatgcgattgacgccattgtggttgccctcaccgacagaggccttctaaagaaaattgcaactcaggcggcccggaatcaatccaatagtagcgggcaacttattgatacaatcgacacgccatgggccagctttcgggatgatgttgcagcttgcctgtcgtcgatcattgtctcccacaaggcagatcatggcgtacagggcgcacttcacaatgataccgcctacggattagcaagcgacgctgacaagaccggtaaacgggacgttgttcatcgggttccggtagcaagccttgataccctcaagaaaatcgaacaggtgcgcgatccgctcatccgtgatgcgttcatggatgccgcagcgggattaaccggcaaggacgttgtgacagccgtagtgaccgctggcgaggccatgacgcctcccgttcgtaaagtccgagtgctggagaggatgaacgttatccccatcaatgacaaagatggccaaacatacaaagcctataagggcgacggaaattattgttacgatatttacgcgaatgaaaagggtggatggaccggagaggttgtctcgcggtttgacgccaatcagccgagctttgaggccaatggatctatttcgagaagcggcacccctttgatcatgcggattcgcggcggcgatacgttattgattgatcaagggcaaggcgaacgtttcatgcgcgtggtcaagttcagctctggtatgatctgtcttgctgaacatttcgaggcaggctcgttgaaggctcgcgacaccgatcaacatgatgatttcaaatatttaattgtcgcgcccagtcgcctgcaaaactggggcgctcagatcgttcatgtttcgccctccgggcatgtattccggtgaccgaaaatgcgaaaccggtttatcgagatcacgacagaagggagtttgctatctgttgatcgtggattcctgaaaattcgctatcaagaagaggagatcggccgcgtcccgctcgatgacctagccgccgtaatcgttcatgcccactcagccacgttcacaagccatctggcagaacaattagctgcgcgtggttgtccattggttctgagtgatcgatcacataaccccgtgggagtggtttggcctattgatggccatcatgaacaggggcttatcatggaagcccaagcttcagcatcacggccgacccgtaagcgactttggcgggacattgtaaaagcgaaaataacggcccaagcggcaatattagaagcgttggggaagccaaatgttcggctttccagaatgctggcaagggttcggtccggagatacggaaaatattgaggctcaagcggcgaggcattattggcccttgcttatgggcgatagttttcgacgtaaccggagttccgacggtattaatggcttccttaattttggctacagtattttgaggtccgcaacagcacggtcgatcgttgctgccggtctgcacccttctctgtcgttgcatcacatcagtcgcggttcagctttgcggttagcggatgatttaatggagccatttcgaccttatgtcgatttcactgtcgccagattgatgctttcggggcaaacggaattggacaaggcagcaaaaggcgaactggtatccactatgtccatggatatgatcggaccacgtggcactgctccacttcaatcctgcctagacaggctggcgtcctcattggcaagggtgtttcttggcgaatgcaaagacctggagctgccgcagccgccactcgaactcagcctcgccagcgtgataacgaaatgagagctctcagtgggtatcggttgatgtggatgatggtcgtttttgatttgcctgtaaccgaaattgagccgcgaaaagcagctaaccggtttcgactttttctgaaagaccttggcttcgaaatggcccagttttcggtttatgtccgccacaccccgggcaaggaagcgatccaatccttgttgtctaaaatcgaggcggctttaccggcagagggaaaaatcgatatcttgcaattcacggacaagcagtatgaacgaatcatttccttcagaggaagatgccgtggacctgataaaaaagctccaaatcaatatgagatgttttgatccaaaccgattttatgaaatagattcagcaaataagggcgatatttcaacaccctatttgctgctctagtttagctgatctgagtatgcggtccaaccggaacataaagacagcggtgcgccacgcgcagatcagtttagctgatctgagtatgcggtccaaccggaacctgccggccatgcgggccgcgccgagcgtgagtttagctgatctgagtatgcggtccaaccggaacgaatggcgcggaacgtctcgtcgcagagttagtttagctgatctgagtatgcggtccaaccggaactgattcggggcgcagatgcggccaaggcatagtttagctgatctgagtatgcggtccaaccggaacacattgccgatgctgttctgaccgcccaggagtttagctgatctgagtatgcggtccaaccggaactatccacggtctgacggtccagtgtgtcggagtttagctgatctgagtatgcggtccaaccggaactccggagaccagcaccggatgggaatattcagtttagctgatctgagtatgcggtccaaccggaactaaccgggattggcggtgtgatcaaaacgcagtttagctgatctgagtatgcggtccaaccggaacggcccgtggtgtggccgcgcagaaaagcagagtttagctgatctgagtatgcggtccaaccggaacacgccccgcacacacccttagagcgccacaagtttagctgatctgagtatgcggtccaaccggaacggtccagctggcgcacactggccgaagccgagtttagctgatctgagtatgcggtccaaccggaacagggcgattgtcctcacgggtggccgggagagtttagctgatctgagtatgcggtccaaccggaactaggctgaaagctgctgctgcacctgcggaagtttagctgatctgagtatgcggtccaaccggaacgtatccgccgccatctaccgcctctcgcagagtttagctgatctgagtatgcggtccaaccggaacccagccctcgggcgcttccccataggtgatagtttagctgatctgagtatgcggtccaaccggaacagattcgggtccatcatgatgtgctggaatagtttagctgatctgagtatgcggtccaaccggaacagatatgcggatactgctctgcccgcttttagtttagctgatctgagtatgcggtccaaccggaacagctctactatgtgaacggcacggtccggaagtttagctgatctgagtatgcggtccaaccggaactgtcgatagccttttgagcgttcgatacttagtttagctgatctgagtatgcggtccaaccggaacctagactggcttggaacgccgggaggagagagtttagctgatctgagtatgcggtccaaccggaacctggacgaatcgctaggaccgtctcggcttagtttagctgatctgagtatgcggtccaaccggaacttagatggagccctctcatggctatcactgagtttagctgatctgagtatgcggtccaaccggaacacacgtgacaagcgaaaaatcagcttgcatagtttagctgatctgagtatgcggtccaaccggaactgaaggtggcgaggcgttggcgagtgcggtgagtttagctgatctgagtatgcggtccaaccggaactgacgggatggtgatggttccgaaagagccagtttagctgatctgagtatgcggtccaaccggaacgcttcatgtcagtcctcctgtgatgtggggagattaactgatctgagtatgcggtccagagtgtcgaatgagcttattccccctactatgaagagaaacagagagtggtaagctaagtgtatagctaggcgctcaaatcacccctgatatctctccacacccctacctaccacatctctcctataaccggctctcctcctacgacacttagatagtggtagtgcattctgtctaacaaccagtccctttcatcctgccttacgataaagccatcatggatagagaggagggtcttggattcagtcaatccatcaagcatgatgcgcaaggcaatctctgactcaatccgggaaatgctcaatccttcctgtgagaagaagcgatgcctgatgggttcattgtgggctgtgagcaggttcagcgcctcgtcgatggttgcaattcgatggatggcgaatgcgtcttcgtaatctttggtgcttccgcgaccctttgaattgagcagccggttgaagagctctttcatgccgtttcgtaattcctgccagtcgagaccagccgcctctgcacgagcaactaggtctggcggggagtaggggcagtctggcgcttcctgcttctcctgagcgtacagaactcgggcattgaaggcggagtaatccagtccgccaactggctgcccatctatgcgaatggcatgacggtctaccgacttcatattcagccaccacggcccgtagaagcgaccattcttctctaggtcatcattgttgaagatgcgcttataggcccgaaaggcagggttttgggtaatgagtgacccatagtgtcgagtgatctcggccctttcgtctatggtgaaatctgcatcgcgcagggattgattgatcgccaatagctgatcaagaatttcccggatttctggtatatctggatcgaattccaccttctttttcttggcgtccttgatctcgacaaagccgggttgggaaaggtcaagcggtacccaggaatcgagaacgtccagcgcctggaacaattcggcacccgcgtcagtaaggcggaatgtggacagccttccctctcccccaaagttgtcccatacgcccatcgtcaactcgataagcccttcggaggccagtacatccaagcaggttgtgaatacgcctctaccgggggcattgttccggtagattgatggttcatagccagcccaagaacgggagtaacaaacgcttcggcgttcttccggacgagtgttgtttaaaaggtttgcgagaatggatctgagtgcgtgttcatagctgagccgcgttctcttcccgaagcccctttcgtagtgttgctcacgatgggcgacaagcagaggaataagatgctccaccaataggtcgagctctggtgtttgtctctggaggtcatgtctaaaacgtgggtcacgttcgagacttaggggatcgttatcaggctcacacggtaccaatgatgatagattgtctggttcgttcattcttctactatttctttaataatcataatatattcagccagttaaatgttcggccctaccgcccaatcaagtgacacagacggtttccataaaatcatcaaacatatcctgtctgtaacgcggacagcgttctccgacatagatcgggtcaattgccaaccagtgatcttcgccatgctttcgcttgtgccgctgaacgcgtacccaagatgccgacattcccagttgctctgcgatttcagtgtcgttcatcaacttcatttttttgtcctatcgctttaaatctatcttccatcgctatggctgcagcctgatgattaagcggctgcgcatagtgtttctggagcatgttcaaatcagcatgccccgcaaatgactggacggtcctgaggtcaacattatcggccgccagccaagtcagacacgtccgccgcaaatcatgcagcctgacgtcctcaattccgcaaacattccaaagatgtttgagggttcgagtcacagtcgagagcgaaatcgggaatatcctctgatcgccctcctttctcggataatcctgcatccgctcgagaatgcccagcgtggtcgaaccaagcggaattgttcttggtttgccggtcttggactgagaaatgcgcgctaatggttgattgcttgtccggtcaatatcggaccatcttagcctgagtgcttcactcttgcgcatgcccgtcatcaattgccatttgatgtagtcttccagccaaggtgcggcatgtttccatggttcgtccttggctttgatgttgtccagttcgcgagctttctggagtattgcgctcacttcctctctggtcagatgtcgggtgcgcggttcgatgcccctgatcggatcggcatacttcacccaattgcggtccagtgcgccctttctgacctgataagccatgatcgtgctgaacgtgcccctgatccgctttacggtggccgggctgaggtcttcgatcaacttggcttgccataggtgtacgcggtcaaggtcaatctggtcgagtggcaggtttccaaaacttggcagcagataattctcgatatgccctttcataagggtgtgactggccacgttacgcttggtctcgagccaagtaagcgcggcttctcgaaacgtttctgtcgctttttcttcaagcggttcgcccctgtcagcgcgcccctgaagacggtctcgctcctgaatgatctgatcccaaggccaggacgataatcgccccagtgagacttctatagcggaaccgggcttgtaatatttttcccgatattgtccgcctcttggcaatcgtatttttaaatagacagtttcagttttatctccgcaccggatgccaatcccttcaagatactttgcgcgtgagggtcggtgcgtctttacatcttcttgcagcttatagaatcgagcatacctgcccggacgtgatcgcggcatttgttctcctgatttgtttgaaacaagaggaagattcaccttcaactctaccctattatagtacaccatttttggttgaaagtcaagttttttcttccaccagtgttccactcggaacgtccctgcagtggaaaaacatggctgtctttccagaacaatgcgtcagacgtttcacaagagattcaataacatgaatgcatgcaaggaacgagggtagcgggcgtcaataccttgccaaggtgaatgtcgtgagttcgaatctcatcgcccgctccattcttttcctcgatatttgacgatggctgtggacgggccatgctgcgcccggggcagcgcacaggaaaacggcgaaggccttgtccgccctcgccgctgtttgatgccgcgatcgtcccgcccctgtgccgtctggcgtagcgcgtccgccacacccgtgagggtgccctgcagggcggcaaggtgggctcggccggtccggtgcgctattcgccagccagccatctcgccggtttattcgggacagctatagctgaaaacctcgttattatagccaatggtccggcagaagatcgtggtctcgctcatattgaccgttgaaatattctggacgcccgagaggcgcgcgccggtcagatccgcgccatagatataagccccctgcatattggccccgctgaaatcggcattggtcagattggcatttgtgaattgcgcaccggtcaagtccgcgccgacaaagctggcgccggtcaggtcggcaccggtgaaattcgccaaatccagccgggcattgttgaacagtgtgttgtgcagggtgacgccggcgaaatccatccgcgagaatgactgtcccgaatagtcgcgattgctctggtccattgctgccccgggcagggtttctgaaagccattcgcccatacgcctgtgcatattcagctcggcctgacaggtggcccgccacgcttgtcccggccgctcagtctggctgcacgccggaccctcctgggctatcgccgccgggctgcccgcggcggtccaaatgaaactggcaaaaaggaatgcgacaatattctgttttttattgatgaattgcattctcgggtcccgcctttatttaaaacttttgtatgtcaggcacgaacataaagacaggcaattcgtaccggtgtgtctccggccgcctttcgactccccacgggcattgcgctgggcgctgcgcacgttacaccgccgccccatgttgacgatttcaaaccttgattaccggatcggcgcgcgcgccctgttcgagaacgcctccgcccagatcgcggcgggctggaaagtcggcctcatcggccgcaatggcacgggcaaatccaccctgctgcagctgatccgcgaggagatcgaacagccctcccccgacagcccgatccggctgaacaagggggcgcgtatgggctgggtggcgcaggaggtgcagccctcggacgacaccatactcgacgtggtgctggccaccgatgccgagcgccacgccctgatgcaggaggccgaaaccgcgctggatccggaccgcatcggcgagatccacatgcggctggccgatatcgatgcctggtcggccgaggcgcgggcggcggaagtgctgaccgggctgggctttagcgatgacgatctggcccgtccgacgcgggagttttccggcggctggcgcatgcgcgcggcgattgccggtgtgctctttgcccagcccgacctcctgctgctggacgagccgaccaattatcttgacctggaaggcgcggcctggcttgaaacctatctgaagaaatatccgcataccgtgctgatcgtctcccacgaccgggagatgctgaaccgctcggtcacccacacgctggcgctggagcacaaacaattgtcgatcacgccgggcggctatgatgcctggctgcggctgcgcgcggcccggacggcgctgctggaaagcgagcgcgccaagcaggaagccgaccgcgcgcatctgcaggcctttgtcgaccgcttccgcgccaaggcgtcgaaagcgcggcaggcgcagtcgcgggtgaagaagctggagaagatgcaggagatcactgtgccgctggccgagcgcacgacgccttttgtgtttccgaactccaaggacaagctctcgccgccgctgttgcaaatgcgcaatgcggtgctgggctatggcgcggaggccgtgatcctgaaaggggtcgatctgcgcctcgatccggaagaccgcatcgccattgtcggcgccaacggccagggcaaaacgacgctggtcaagtccatcgccgaacggctgtcgctgctggcgggcgagcgggtggccccgcgggcgctgcgcatcggctatttctcgcaggaccagatggatgaattgcggcccggggaaaatgtgctcgaccatatccgcgacgccctgcccgagggggcgcccccgtcaaaacagcgcgccgtggccgcggccatgggctttccgcacgagaaggtggagaccgccatcgagaacctctccggaggcgagaaagtgcgcctgctgctcggcctgatggccatcgacaagccgcatatcctgatcctcgacgagccgacctcgcacctggatatcgacagccgcgaggcgctgatctacgcgctcaatgattatgagggggcggtggtgctgatcacccacgacgtctatctcgccgaaggcacggccgatcagctctggctggtcaaggatggacgggcggcgcgctatgacggcgatctcaatgattaccgcaaactcgtcctgcaggccgaccgggcggcggtgaacgcctgaggcggcggacggcgcggtccggcccaggaaagccgatctgcgcgcagaaaaaggccggatcccatgggctccggcctttcatctgacaagcagggcgaggagaattagcgacggcgttcataacctccgctgaactcccaatcgccgcgatgattgcggcacatttcaaactggccgcgatcataatcgccataacccgaccaggattccgattcgaaactggcgcaggtacggctgccgcggtcatagtaatcgcgggggcggacaaccccgcgcgctcctgaattggggttttcccaataggttgtgctgcgggactcagccgaccagcccgatgcccagctatattggcggtggtcacaatcgttgaagcggccgccaagctgcacatctacgccgagtaaagggccggcatcaagaaccgcgccgaggcccaatccgccagacgtacgcgtttcgcatgcctggcgattgtaacggaaggaccggtggtcatagccgcgatcatgatagctgtgatgatagctgaagtgagacgaatgtccggactgggcttcagccgggacgcccgcaaacatcgccacgggcaaggctgcgatcaatataaatttctgaatttgcatgacatcctcctttgcaattggcgtcttgcaaggaggacaacgaatgggtggccggatttattccatccagtcgagacgtgcggctgtttctattgcttcggtatccagtggctcgccgtcgatcaggccatcgacactttccagaaccattggcggcaagggcgagctggcgagctgatactcgcccgcactggtcccatcgccggtgacgagtaattgcacctgccagccatcatcctgacggcatgccagaccggcggtgccggtttcagccccctggaatgcccggcaatagcgcccggtatcgtcccggaacgtgacaggaatttgccagctggttgtgccaccggcggcgttgagggccgtggccagttgcgcatcagcccgcgtggtctcgccggaaataccgttttcaaccggtacaaattgcacgccgacgagaatgccgatcgccagactggccatggccgacgcgccaggcatggccaacgggtgagagaaccagctttttagctgatctatgaacatattggctgccgccgcatcgtcatcagaggcaagcaaatt

SEQ ID NO: 2493 - DNA, 23150 bp, synthetic construct
  misc_feature 1..23150: note = Synthetic
  source 1..23150: mol_type = other DNA
ttcgccggtctcaagcgaaccaaggcagcccagttcaccctcaacagacacaccaacctgatgcgcggtctcagcgaccttcgccgtgacttcgacattatagtcgtaggaagccggggtcttgccatcttcttccagcgagccgtccatcatgacggaggtgaagccgttctgaatggcagagaagcaggtggcggaattattaccgtgatcctgatgcatgcagaccgggatatccgggtacatttcaacagccgcctgaatgaggtggcgcagcacaatatcattggcgtaagcgcgggcaccgcggctggcctgcagaataaccggcgactcggttttggaggccgccgacatgatcgacagcatctgttccatattgttgatgttgaaggctggcacgccgtaaccatgttcggctgcgtggtccagcatctgacgcattgaaatcaaagccatttttctctcccgttcgtaaatggggggctatcgcttggggctgccctcccggtcgtgattacctttccagcgcggcgacacccggaagcgtcttgccttccagccattccagaaaggcaccacctgctgatgatacataagtgaactgttcctgaacaccagccgtcgccagtgcagataccgtgtcgcccccaccggcaacgctgagcaagcggccgtcgcgggtcagctctgccgccttccgggcaaccgcattggtgccttcgtcgaacggtttgaactcgaacgcaccgagcgggccgttccagaccagtgtcttgcaggtctccagcaaatcacagagagatgctgcagccattggcccgacatcaagaatcatcttgtcggacggcacgccaccgacttcaacaacatcggtttcgaccccttctgacagcgttgcagcaacaacggcatcacgcggcagtacaatctcgcatcccgccgcatcggccttgcccatgatggcgcgggccgtatccagcatttcatgttcgcaaagcgacttgccgatatccgttcccagtgcggccagaaaggtattcgccatgccgccgccgatcaccagcttgtcgacccggccgaccaggttgcccagcagatcgagtttcgtcgaaaccttggaaccaccgacgatggcacagaccggacgttccggattacccagcgccttctgcaatgcatccagttccgtctgcatcagacgccctgctgcattcggcagccgccgggcgaggccttcgacagaagcatgggcacggtgcgaaaccgaaaacccgtcattgacgaagatgtcaccgagttccgccagcgcatcggcaaaatcgttatcgttggcttcctcgccgccatgaaagcggagattctccagcagcacaaagccgccgggtgcacaattgccaatcactgcccgggccggtgtgccgatgcagtcgtcaccgaacgccaccggcgcaccaagcgcctcagacaacgggccagccagcggcttcagtgagctggccggatcaaccttgcccttgggccggccgaaatgggacaggatcacaacctttgcacctgccgccgcaagatctttcgccgtcgggacaaagcggcgaatacgggtgtcatcagagataaccccattctgcatcggcacgttcagatcggcgcgaacaaggacagtcttacctttgacatccagatcatcaatggtgttgaagtcgctcatcagacccgtgccttcaccgcttccaccacggcatccgacgtgatgccgaaatgcttgtaaagctgatctgcaggcgcagaggcgccgaagccggtcatgccgatcgcgacaccattgtcaccgagataacgctcccagccccaggtgatgcccgcctcgactgacacccggaggctgcccggcgcaccaagaacggaagccttgtaggctgcgtcctgccggtcgaacagttcctgacagggcatggagacaaccgccgtcgggatacccgcagcctgcagttcggcacgggctgcaacagccagttcaacttcagaaccggttgccagaatggttgccgcacgggggccaccttccgcttcaaacatcacataggcaccgcgaccggaaaggttctcttccgtgtgcagggtgcggatggtcggcaggccctgacgggtgagagccagaacagacggggcatccgttgattccagcgccagcgcccagcattccatggtctcgaccacgtcgcagggacgcatcaccatgacattcggcatggcccgcaggctggccagatgctcgaccggctgatgggtcgggccatcttcgccaagtccgatggaatcatgggtcatgacatagacaaccggctgctgcatcagtgccgacagacggatcgagggacggcagtaatcggtaaagaccatgaaggtcccgccatagggacggaaaccaccatgcagcgagatgccattcatcgccgcggccataccatgttcacggacaccgtaatagatgtaggccccggagaaatcgtcacggctgaccggattctgaccggcaaccttggtattgtttgaacccgtcagatcggcagaaccaccagccatttccggcatcaccgggaagatcgcctcaatggctttctgggaggccacacgagtcgccagcttcggtgcggtttccgacatcagcttcttgtgggcattcacggcggctttgaaaccgtcatgcagcttgccggtcgaaacccggacaaattcatcacgcaggccggcatctgccttcgccagcttcttttcccaggcggtgcgggctgccttgccgcgcttgccggactgttcccaggcttccttgacactggccgggatttcaaacggtgcatgcggccagttcagcgccttgcgggcaccggcaatttcatccgggccgagcggcgcgccgtgggttgcggaagtaccggcttttgtcggcgccccgaaaccgatggtggtcttgcagcagatcagcgacggcttgcccttctgacgctgcgccgccttgatcgccttcgcgatggcttccgggtcatgaccgtcaatggactgtacatgccagccggatgccttgaaccgggcaggctgatcatcagagacggacaggtcggtagaaccgtcgatggaaatcgaattgtcatcaaacaggacgatcagacggccaaggccgagatgcccggccatcgacacggcttcatgactgatgccctccatcaggcacccgtcaccggcgatgacataggtataatgatcgaccagattgtcaccgaagcgggcggccatcatgcgttcggccagcgccataccgacggaggttgcgatcccctgccccagcgggccggtggtcgtctcgatgccggttgcatgaccatattccggatgaccggcggtgatgctgccaagctggcggaaattctcgagctgcgccttcgtcatatccggatagcccgtcaggtgaagaacggcataaagcagcatcgagccgtgccccgccgacaacacgaagcgatcccggtcagcccagttcggagccgtcggatcaaacttcatgaaatccttgaacagaaccgtcgccacatccgccatgcccatcggcattcccggatgaccagaattggctttctgaacagcgtcggcagcaagaaaacggatggcattcgccatctcttcgtgggtcgcggtagccgcggacgaagaatcgggcataggtaaagctcctgaagggctgaaagtcgcggcctttatacccgccctccccggagaatcgaccgaaaacggggcatagcctgtggaaaactattcggggtcacggcaaatcagcctgatcttcacgaccggggacagtgcttcatcacataagccagtcaaaacacctgcccctccagacaaccacatcatgtcatcccgtcaaacgacaggtcgctgccgggatgacatgttgcggataaatgctctgacccgcttaaagcgtccggcccgagattttttccatccaggcagagatttcacaatgatcatggccggcacccaggtctttctgagcctccagccaggctttcacgcccgtggtcaggacactattgggcagccccgcatcttcaccgatccgcatcgccgtggtgatatccttaaccatcaggtccatggagaacccggaattgaaggtatggggcaggaagaactgcttcaccttgcgctcggtcgtaccgttacggcctgtcgaggcattcaccacatccgtgaaattatccagatcgaggccgaattccttgcccatcagcagcgtctcgatcgtggcgaccatgccgacagcattgacaagattgttcagtgccttggtcgcctgtccggcacccggaccgccacaacggtacacattggcacccatcgcctgcagaacggactcggcccggtcgaccagatcagccgacccgccggtcatgattgccagcgaaccggcttctgcgcccttgataccgccggataccggggcatcgatgaaatcaaacccgcgcccggcgagatcggcctgcaggtcgcgggttttcatcgggtcggatgaggacatgtcgatcagcagcttgcccggcgcgaatccggcaatcagcgaatcaccgccatcaccaaacagaaccgacttcacgatatcgatctgcggcagcatggtgatgataatttcagactgcgccgcaaggtctttcaggctggcggccttcgttgcggtcgggcaacggtccagaaactcgctgacaactttttcactggcgtcggtaacgcaaacactgtgccccgccttcaccagattggcggccatatgcccgcccatgttgccaatgccgacaaacccaaccttttttgatgattcgctcacgttactctcccattgaaaaaacagcagttaccgaagatcaggtggccatcgaataacatcttgttttcatggtccacttgattttgtccggtctttagcatatcgccatggaatgagcactgatcctttgaaaattctcgacgacctcgacggtacagcttcacatcttcacacgccctgcggtgacggacatatggtctggcgcagctgggggaagggtgatccgctggtgctgatgcatggcggctatggcagctggatacactgggttcgctgtatcgagcccctgtcaaagcgttaccggctgctggttccggacctgcccggcatgggtgattcagaagttccgccggaaccacatacagctgaagggctggcgcaagtctgcgtcaccggcctcaatcagattctggaaccgggtgagcgaccacatatcgccgggttctctttcggatcaattctgtccggctactctgctgcctttctgggagagcgtgcccgctcctatacgatgatcggcgccggtggcctcgggctgccgcgtgttgccggaatcgacctgcggccgcgccgacgtcatatgacagagcagcagaagctggatgtccaccgtcacaatctggccgagctgatgctggccgacccggatgccattgatgagctggccatgcatatgcaggtcaccaacaccggacgcgcccgcacaaaaagccggcccatttccggcacggacacgctggcccggaagctgccggacatcatcgcaccgattgccggaatctggggcgcactggatgcaacggccatcccgcgcatcgatatgcgccgggacatgctgcgccgggttcagccggatgcagaattccatgtcatcccgaaagccggtcactgggtgatgtatgaagcgacggatgccttcgtcgaaaccctgacgggcatcctcagccgggtcgaggaacggggctgaagatcagagggctgaaggtcagccctctgcccagtccatcagcttgccgatgaaggcgttgcaggcttcgatttccgtcaggtcgataaattcgttgggctgatgcgcctgcagaatgctgcccggtccgcagattaccgtcgacagaccggcttcctgaaactgtccgccctctgacgcataggagaccgtggtcgtggcattgcgcccggtcagccggtggaccagttctgccgccggtgacgggctttccggcatcaggccgggaaccgaggccagttgcacggtctgtatatcagcctccgggaaaacggaccgcatggccggcagcatctctgcagcgcggccttcaaggcgcgccagaatgtcagcggaactctgccccggaatggtccggcagtcccagttgaagctgcattcccgggcaacgatgttattcgccgtgccgccggagataacattcacacccatcgttgtataagccgggtcgaaccgttcattgaaggggccctggctgcggaattcatcggcgatgtcatgcagaaaactgacaagccgggcggcaatcgcgaccgcgttcacacccttgtccgtatgggcggaatgcgcctcaaaaccggtcaccgtcgtgcgaaaacttgaaatgctcttatgggcatcgaccacgcccatcatgctcggctcgccgacgatacagagggccggtttcggaaaacggtccaccagttcacggatcatccggggtgctccaaaacaaccgacttcctcgtcataggacaaggcaagatagatcgggcgtttcagggggcgtgacacaagctccggcagacgggacagaacgattgccgaaaagcttttcatatctgccgtacctcgaccgaacaggcggccgtccttctccaccacttcccaggggtcggtgacccagggctggccttcgaccggcaccacatccgtgtgaccggagagcaccacgccgccctccgtcagcggaccgaaagccgcatacagattggccttggtgccctcgtcattcggcaccgcgtagctttcgacgccccaggcagcgagatagtcgcggacaaaatcaatcagcggcaggttggaacgcgacgacgtggtatcgaaggagaccagcttcgcaatcatctcacgcggggtatagcggggtccgtccatcattctttccagaaagccggggtcagcagaatcaatacggtcagcacttccagacgcccgatcagcatgcccgcgctgagcatccatttcgcactgtccggcagggtcgcaaaattacccgacggaccgataatcgggccaaggcccggaccgacattggagatcgcagtcgccgcgccggaaaccgccgtcaggaagtcgaggccggccagccccagccccatcgccagcaccccaaaacaaaagacgaaggtaaagaagaaggtcagcacggacaggcccaccgtctcggaaatcggccggcggttataataaggtatgaaaacaccatgcggctgcagcaacgtcttcatctgcgccgccgccatggcatagagaacctgaaaccggaaaatcttgatgccgcaggtcgtcgacccggcacagccgccgatgaacatgacgacaaagaacatcaccagcgcaaaggttccccactggtcgtaatccgccgtcgcatagccggtcccggtcatcaccgacaccacattgaacgagacataacgcagtgcgtcataccagggctcgccatttgcaaaggtctgccagaccacaagagccgcaatcacagcgccaactatgctgaagaaccagcggacctgtgtatcccgcagcagggccaggggctgtccccggaaggcctgcagataaagcacaaaaggcagcgcactggcgatcatgccgaaggtaatgatccagtcgatggcggcgctgtcgaaatgaccgatcgacgcatccgccgtcgagaacccggccgtcgcgatggtggtcatcgcgtgggccacggcctccagcttgcccataccggcaaaccacagcatgacggcccagaccagtgtcagaccgacatagatcaggccaattgaactggcgatctgtgcggcccgtggcaaaactttctcggactggtcggagctttccatccggaacagctgcataccaccaactcgcagcatcggcagaaccgcaatcgccatgacgatgattccgatgccgccaagccattgcaggacagcgcgccacagcagaatgcccggcggcgcaaaatcgaggccggtgatcaccgtggcaccggtggtggtgatgcctgacatcgcctcgaagaaggagtccgtataggacatttccagcttcgagaaagtgaaaggcagggcggcaaaggtggtcagcaccacccagctgaggctggtcagcagaaaggcctgccggatggtcaggcgcatatcctcgccgcgacaggtcaggatcagactgataccgataaagaacgtgcccgccgcggacgcggcaaatgccttccagtcatcgtcaccgcgaataatgtcgatgatggcaggcaggcacataccgatggccagtgtcgccatcagcagtccgataacaaagagtataggtcgaaagtccggcaaaaaagtctccgagcgccccggctgtccgttgcgcgcagagtcaggctaaaaggcggcgctgtccagcacgccggtcaaattccctagcgggcaccgacacccagaatggtcagaacctctttccggctctccgcattatcgcggaaagcgccgagaagacggctcgtcaccatggtcaccccgggcttgtgaacaccacgggttgtcatgcactgatgctgggcctcaacgacaacggccaccccttccggttccagcacatcctgaatgcaattggcaatctgcgctgtcagcttctcctgaatctgcagccgtttggcatacatgtcgacaacacgcgccagcttggaaatgccgaccacacgcttgcgcggcagataggcaatatgaatcttgccgatgatcggcaccatatgatgctcgcaatggctttccagccgcacatcccgcagggccacgatttcatcatagccatcggtctcttcaaaggtgcggctcaggatttcaaccggatcctgctcataaccggcgaagaattcctcataggcacggaccacgcggttcggcgtatccagcagcccttcacggtcagggtcgtcaccgctccacctgatcagggtacggacggcggcctctgcatcctcacggcttggacgaccttccttgccaccaagtgccggggccagcttatcgattgcgttcacgttgaaatcctctcatctgcgaccgaacctctgaaatgtggatcagccgacctgcttgcaagtgcggatttacccgcaggatcagtgaatgaccgggtgactgtgcggactgtcgagggaaaaagccggaatcgcaatgtcgaacaggtcaccgttctcgcgcttcatttcataagtgccaaccatgaacccggacggcgtcgaaagcgggcagccgctggtatattcaaaactctcccccggagacagcaccggctgttcaccaatcacaccgggaccgcgcacttcctccatccggccgccggcatcggtgattttccagtgccggttcagcaactgaaccacttcattaccattgttgctgataaccacacgataggcccagagataatgatcatctgaaggctcggactgctcatcgagataaaacggctcaaccgttaccgtgatattctccgtggtttcgctgtagtccgccattttctgccttgtttgctctcactcagaaggccaaacacttaattccccccctccgccctgtccagcctcgggcgagttgcccctgctcgggaagtgggtcaacggcatgcagcagacaattggggatgtggttcgacttcagaaaaaccggtaccgcagcaattttgccagcgcggaaaccagaaaggcagaaggcggaccattggcccgccttcttcattttgtggtctaaaccttgttaccggaaagaccgcactttcgagttagctacaactctattttagatagtacaacccgatcggattgtgcacaataataattttctgaagaatggagatttatgatgtggcggctgggcatagatgttggaaccaattcgatcggtttttctgtcctggaacttgatcagactcaggagatcctgaagccggtcaaaattctcgatcttggtgtccggatatttacagacggtcgcaacccgaaggaccttcagtcacttgccgccatgcgaagaaccccccgcggcatgcgacgcaaccgcgacagggcaaaaaaccggaacgcccggtatctgggtgagctccggcgatatggtcttttgccagacgaagaccggccctgcatcctgcaacttgatccttatatactgaggctaaaaggtctggatgagaagctcgacctgcatgcgtttgggcgcgcactctggcatctcaaacgccggggtttcaaatcaaaccggaaaacggatggcggggatcaggaaggcggcaagatcagggatgcttctgacagaacccgtcagacgctgaaggaggagaactgccgtactctgggtgaatggctcggcaaaccacgccttcagacactcatcgataacgagtgccataaagccggcgagagaaagccgatgccacaggcccgggtgcgattaagaggcaaaggtgcaaaagcgttctatgacttctatccgaccagggagatgatactggaggagtttgacctgttgtggcaggtccagcagaaatggcaccctgaagtcctgaccccggaagctaaggagtcattacgggagacgcttgcatttcaatggccgctaaaaccgcaaccggtcggacgatgcacctttgatccggaccagccaagagcaccacgggctctgccgagtgttcagcgactgagaatcctgcaggaactgaaccatctcggcataattgaacccgggaagtccttacgttccctgactcttgaagaaagggatcaggtgctccagttactgctcaggacaaaaaagcagacttttgacggcatacggaaagcgctcagattgccacaggatgccaggttcaatcttgaatcggcaagccgccaacatcttgacggagatcagacggcggcccgcctgtcttcaaaaaatctgtgggacaagtcatggcgggatctgtccgcaacggaacaggatcgcatcgtcgaacggctgctcgaagagcagaacgagacagctctcgttgagtggctgcagaaggaatattcactggcccccgaccgtgcggacgccatctcccgggtaacactgcccgcagggcatggggcgttctgccgggaggtcacagcccggcttacaccacatcttgaggcgtcagttctcagttttgacaaggctgcactggctgcgggttttcatcattccgatttcagggatggtgaagtgtatccggacgggttgccttactacggtaaaatcctgcagcgggaagtggccttcgggagcggaaacccgaccgacccggaagaaaagcggctggggaaaatcgcgaacccgacagttcatgtcgccctgaatgaaattcgcaaggtcgtcaatgatctcatttcgatttacgggacaccgtcacagattgtcgttgaactggcccgggatctcccgttgtcagcgcaggggcgccgtgatcttgaaaaacagcagcgggaaaaccgggaggcaaatcagagccgggacaaggagcttgaccgcctgggtatccccagatcctacgaaaacaggctgcgcctgcggctctgggaagagctgaatcaggacaatgtgatggaccgtcgatgtgtatttaccggtgaacagatatccattgaacggctgttctcgtccgaggtcgaaatcgagcatttactgccgttttcccggacgctggatgacagtattggcaacaaggttctgtgcatgcggcaggcgaaccggataaagaccaacaaaacaccacatgaagcctttggcggatcaccggaatgggcggatattctgaaccgcgcagcaagtttaccggaaaacaagttttggcgattctcaccggatgcgatggaccggtataacaccggggagagagattttctgaaccggcagcttaatgacacccgctatattgcccgactgacaaaaggatatcttgaaaaaaccggtgccgatacatgggtgaacaccgggcgactgacatccgacctgcgctgggcgcttggactggactctgtcctgcccgggcataacagcgcagcatccgggaccgggaagaaccggcttgaccatcgtcaccatgctgttgatgcccttgtcgtcggcctttgtgaccggtcgatgatgaagaaggtctccgaacttgccgcgaagcaggaaactgcttcaggtgtaaggctgcttcccggtctggacgaaccctgggaggatttccgggacgcggttgttcaccagctggagcgacttgtcgtctctcacaaacctgaccatggcgttcaggggccgctgcacaatgacactgcctatggaattcttgacccgcaggctccggccggagaggcacaggaagttgttcgccgggtagcagtttctgacattcataaagcgtcggatatcgagcggatccgggacccggaactcaggtcattttttcagaatgttgctgaaacagcgacagacaagaatcttggcgatgtgctcagcgcagcgggagagacgctgcatccgcctgtgcgccgggttcgcgttgttgaaaagctcagggtcatcccgatcggcaatggccgggctacacccttcaaggcctataagggcgatggaaactattgctacgacctgttcgaagatcagaaaggcaggtggaccgggattgttatcaaccggtttgacgctaatcagaaagactttgatccgcattccgggaccggccccgatggccataacctggtcatgaggattcgggtaaatgacatgctggaactggaacacgagggcagccgacaggtcatgcgtattgcgcaaatatcgcctggcaagatcactctcgccggtcatacagaggcgggcagcctgaaagcacgaaatgcagacaaggaagattccttccgatatctcacattttccccttcgtcgctgcaaaaactcggggccgtgcgggtcactgtcagtccggccgggcggctgtttcggaagcaacccggacagtgaaccatcgtgttgtcgaaataacccgggaagatgcccggctgaacctgcacagaggcttcctcgtcgtcagctctgcggacggggagataggacgggttgcgctcggtgatatcggcgctctgatcataagaggccatggcaccagcctgtctgtggcggtttgctcggcatttgctgagcggtctctcccggtcgtcatctgcgggtctgatcagcagccggacgccgttatatggccgatcgacggtcacttcgaacagggtaaacgaatgcaggcacaggcagaggcaagcctgccggttcgcaaacggctttggcgtgaggtcgtccgggcaaaaatccgaacccaggcgggaatactcgatctccggggtgttcgaagtaacaggctgcgacaaatggaacgggctgtccggtcgggagatcccgggaatattgaggggcaggcagcaagatactactggccgatgctgatgggagccggttttcgtcgtgaacgatcgtcaggaggtattaacgcccgcctgaattacggatatacagtgctacgatcagcaacagcacgttcaattctggcggccggtctgcatccatcgctttcgctgcatcacgaaagccggggcacggcgttacggctggccgacgatctgatggaaccgttccggccttatgtcgatttccaagtcgcccggctgatggatgagggtgaaacggatgaactcagtccggcaatgaaagccacacttgcagccgttctgacccgggacctggcaggtccgaaaggagtccggccgttgcagacctgccttgatgccatggccctctcattggcccgggtttttaccggcgaagttcgtaaacttgatcttcccggagaaccgttaccgatggaccttgcctcgacgtgagtcatctcagtggatttcgactattgtggattatggtattcttcgacctcccggtaaccgagccatccgaacggaaggcctatacaaggtttagaaactatcttcttgatgaaggattcgaacaggcacagttttctgtctatgtccgccacacatcaggaaaagaggccgtagaggctctggtcaggcgaattgagcaacaagttcccgaaaaaggtaaaatagatattcttcaatttaccgacaaacagtacgagaatatcatcagtttcagaggccgcggacagaaaaccagtcccgaaaacccgagccagtatgtgctgttttgatgcaaattgacccgtttccgaaaagtttaatggcggataatgcttttaaaatcagagcattatccgccattatagtgtagctaatcagaaagtgcggtccaaccggaactgtgggcgtcatggtaagggccaaggtcgagtgtagctaatcagaaagtgcggtccaaccggaactgtgtgcaaaaggttggtgttaagttccaaagtgtagctaatcagaaagtgcggtccaaccggaacgggctggtgtatccatccagcatggaccggagtgtagctaatcagaaagtgcggtccaaccggaactcggcaatcagacggtcctgctgttcaagtagtgtagctaatcagaaagtgcggtccaaccggaaccggccccattccacccgtatcaggtccatcagtgtagctaatcagaaagtgcggtccaaccggaacgcgcagggcgaaggccgggcaaccgatgccagtgtagctaatcagaaagtgcggtccaaccggaactgactgcgcagcggttgccgtggtcgtgaaagtgtagctaatcagaaagtgcggtccaaccggaactctcctgatgaaacgtaagtttcatatgctagtgtagctaatcagaaagtgcggtccaaccggaactcggataggtcggcatagaagccggggaacagtgtagctaatcagaaagtgcggtccaaccggaactggaaagcagacacgcatgtatcgattaatagtgtagctaatcagaaagtgcggtccaaccggaacagttcgggggaagcatccacgtaataacggagtgtagctaatcagaaagtgcggtccaaccggaactcggtcgtcgttgtctgctgggtcttgtcaagtgtagctaatcagaaagtgcggtccaaccggaacggatcaggcattcgcccgacagcgcgatggagtgtagctaatcagaaagtgcggtccaaccggaactctcacgtgcgcgtgcacaacgggtttccgagtgtagctaatcagaaagtgcggtccaaccggaacctttcggcactaccacatacccggcattacagtgtagctaatcagaaagtgcggtccaaccggaactccatggtcactatcaaaagcgcgatagacagtgtagctaatcagaaagtgcggtccaaccggaacgggctggtgtatccatccagcatggaccggagtgtagctaatcagaaagtgcggtccaaccggaaccgtgccgatctcaactatcaacagggcttgagtgtagctaatcagaaagtgcggtccaaccggaacaatgccagacggcggacgaacaagtcctgaagtgtagctaatcagaaagtgcggtccaaccggaaccggatggcggcggcgaaactttcggcccgtagtgtagctaatcagaaagtgcggtccaaccggaactctgctcaaggtcagccatctggacttcggagtgtagctaatcagaaagtgcggtccaaccggaacgtagacatacggctttgatctcaattcgttagtgtagctaatcagaaagtgcggtccaaccggaacgaatcccactggcgcgccatccttctcgaagtgtagctaatcagaaagtgcggtccaaccggaactgaaccgctgttacatctgccgcaagcggtagtgtagctaatcagaaagtgcggtccaaccggaacgatgaacaggcggacaaggaaagccgtgtcagtgtagctaatcagaaagtgcggtccaaccggaacgggttgcctaccatatgtatcgcagtcatcagtgtagctaatcagaaagtgcggtccaaccggaacgcaatccttcatcgaacgcatcgagcgtctagtgtagctaatcagaaagtgcggtccaaccggaaccggtccattgccattgcggcatcgcgcaggagtgtagctaatcagaaagtgcggtccaaccggaaccggctacccttggtaaaccgcccggatttcagtgtagctaatcagaaagtgcggtccaaccggaaccggcggctctattggatggaagatgaaagtagtgtagctaatcagaaagtgcggtccaaccggaacgtattcgcgatggtccggcggagctgttcgagtgtagctaatcagaaagtgcggtccaaccggaactttgcgtgcggaaaccatctggcgcgaaggagtgtagctaatcagaaagtgcggtccaaccggaacgctggaaaggcaggcgatcttgtcagaaatagtgtagctaatcagaaagtgcggtccaaccggaactgtaaggaggaacgacgatggattttctatcagtgtagctaatcagaaagtgcggtccaaccggaaccggtcagacatgctggttccgcgcgttgcgagtgtagctaatcagaaagtgcggtccaaccggaactagacgcatcccatagggattgctgccaggagtgtagctaatcagaaagtgcggtccaaccggaacttctggcgtctcgatgccggcaacctgaagagtgtagctaatcagaaagtgcggtccaaccggaacagcgcgactggtcagagcataccgcgtcaagtgtagctaatcagaaagtgcggtccaaccggaacgttaatcaggcgacaatggagacggcaatagtgtagctaatcagaaagtgcggtccaaccggaaccttgaggccatcgatccgcctgcctccctagtgtagctaatcagaaagtgcggtccaaccggaacgtattcgcgatggtccggcggagctgttcgagtgtagctaatcagaaagtgcggtccaaccggaaccggggcgggacattcctcctccgccctgtccagcccgagccgagttgccgtgcccgctgcgctggattataagcatcgttaacgcgggtgtagctcaatggtagagcttttgcttcccaagcaagtgacgagggttcgattcccttcacccgctccagttccttcctcagccagaaattagatgcaacgcacaattttcctgtgatagcttgtgtgcgacgcacaaatttgccggagaaaagcgccgtttaacccgtgaagattctttgacatcagccttgcctgacatcatcaatcttcgggtaatcggggatattgcataaaattcgggcgccctgcaggcctcgtcagattgtccttccccggcgaattgatataattatataacaatagaaatgtgacgcaccctggaatggagacgaccatgaccgccgaagccgcagccggcaaaacgccggcaagcaccagagcccacttcaactgggaagacccttttctgctggaagaccagctgactgaagacgagcggatggtacgcgacaccgcccgggattatgctcaggagcagttgcagccgcgtgttctcgaagcctaccgcaatgaaaccttcgatcctgaaatcatgcgggagatgggggcgcttggcctgcttggcatgaccatccccgaggaatatggctgcgccggcgtcaatcatgtctgctacggactggttgcccgtgaagtcgagcgtgtcgattccggttatcgttcggcgatgagtgtccagagctcactggtcatgcatccgatctattcttatggcaccgaagaacagcgccggaaatatctgccgaaactggcaaccggcgaatggatcggctgctttggcctgaccgagccggatgccggttccgacccggccggcatgaaaacccgcgctaaaaaggtcgatggcggctattccctgtccggctcgaagatgtggatttccaattcaccggtcgcagatgtgttcgtggtctgggcaaaaaccgacgacgaggtcattcgcggtttcgtgctggaaaaaggcatgaagggcctctccgccccgaagatcgaaggcaagctgagcctgcgggcctcgatcaccggcgagatcgtcatggataatgtgcaggtgcctgaagaaaacctgctgccgaatgtgcagggtctgaaaggcccgttcggctgtctgaacaaggcacggttcggcattgcctggggtgccatgggtgccgctgaattctgctggcatgccgcccgccagtacacgctggaccgcaagatgttcggccgtccgctggctgcaacccagctgatccagaaaaaactggccgatatgcagaccgaaatttcactcggtctgcagggtgccctgcaactgggccgcatggccgatgccggtacgatggcaccggaagtcatctcgctgatgaagcgcaacaactgcggcaaggcactggatattgcccgcctcgcccgtgacatgcatggcggcaacggcatcgccgatgaattccatgtcatgcgtcatatggtgaatctggaaacagtgaacacctatgaaggcacccatgacgtgcatgccctcattctgggccgcgcccagaccggcctgcaggctttcggctgattgctgagaagccgtctgatcttcactggccccggttgctgaccggggtcagtggaagatgatcagaaccgaggcacccgttgccatcagcagaaaggccgggatatagcgccgggtcaggggttcggtaaacaccacccgggcgatcagggccgcgatcaccggcttggtcagcaaaatcatctgatgttgccagacaggcagcagttccagccccttcagactaagccagacggcacctgcattggtgatacccagcatcggcaattgccagagaaaccggcttttccatgaaccgagccagcggttgcgttcaaacgccacgctcagcagcagtgacagaaccgaaatgcccgcagacagcaggctgacgatgacaaatgacggcacgacatcgaccgcgatcttcaggcaaatcggcaacagggcatagaaggctgaagcggcgacaagaatatgcgccccgtgccagctgccctttccccagccattaaaggcaatcagcaagcccgccgccatcagcgcaaaagccggggccgccgtccagcccaccatttccccgaaccatatccaggccgcgaatccggcgatcagaggtttgatcagaatgaacagctggtgccgccagatcggcatatagtcgtaaccgcggatgaccagataggcgccggcaaccgatacgcaggcccccgccagaatcgccagcaaagtgtcattgcttgtcaccgcaagcatctgccagtcgccgccaccccaggcgatcagaccggaaagcactgcttcgaacgccgaagccagcccgaccagcaggaagggcggacagggacgtgaggccttcgccataatcgggatgaatgcatagacgatcgaacaggcgaccatgatcccgaaagccgccattcagtcattcccctactaattgtatcttctgaaattcgatcacaaaataattatccccatgttccctgcattatccggcgcgtcaacgtgatattttgtcggtcttgaaacggcttgggaaagggtaaaaagccatgagactaccaaatcagatcaccatgcatcacggtccgcagatgttgctggcccgctcaatctttgccatcgacgcggttgcagaacaacggggcgtcaaactggaaatctctaccgaccttgaaatggttcaggaaattaaccggcggcacagcgacagctggtcaccgatcatgccaaatctgctgatgccggagcagacattctggatcatcggccgtgatgccgatggtgaggctgccgtaaccatgggttgccggcggtacgccatcgagaaagggtctctgtcagagattcttgcggatctgtcatttttctacgccacaattcatcccgacctcgatgagagggtggaacttctgaccgtggttcctgactatatctccggtcaggttgcctatgtcggcggtatgtggacccgcccggatttcagacgccgggggctggctgccgtgatgacgcggattgtccacgccatctgtctgggtgtctggaatacggaccatgcgatgagcctggttcgcccggaactgccggaaggggtgctcagcgcctacgggtaccgcaacacggcagccggcttcaaatggcatggttgtgaaaaagcatcacgggcgcgaatgcgcctgatctggtccgacaagaccggactgatctccgatctcgaaacctatctcgacatggctgtcgcggaactagagggcaacaccctcgcgacgggtctcagagaaacaccagaccgcgttgatcgttttccgacgcggcctttcgaggcggaacggcagcagaatgcggtcgtagtctagaacaacgtcgtcaccggccccatcaatgcgtgcgaaggacgtgttgatgtggccgatgcgcggacgccattcatccagcacgctggcataatcgccggcaacggccatggcgtagcgcttgtcgaggtgagcagcacgacgggtgcggccaatattatcgatggagaaaccggcaccgaaccagtggtcaaagccatgaccaatgtaacggtaggtaaaatcaacggccgcatccgcgtcctgcgccacgacaattgaccggcgcagcagaccggattgcatcatccgctcgaagacatccggcgacagacgcccgtcagaaacctgccagatgcgtttggcaagctggagcgattcaactggcggaatatcgtggccgagagattcaaatctgaattcccgctcacgaccggcttcctcacggcgatcaatcacctgtcccaaacgggtgacgatgtctgccatcaggccagggccatggtcggcacggtcaaaacgttcctcaacccagcccttaaaatagaaattcagccagacctgggtgatattgtgggtttccagctcgcgcagcttcccgacaagctggtcaatcgcaccaagctgcacattcggcgtatagaaacgaacggtcagccatgacttttcccgccgcaaatggacatgcccgagattccggatattgaaatcaatggtgtccacagcatctggccgggacaggggaatccctacctcctgcgccgcatgcatgatcgtcgcagggtaccaagtcgttctgttaaatacgatatcgtctgtcatcgcccaccctccaaggcggtcactctactctgattaatcagttatccacaagcagttgcgaacaaaaaccaaaacagaaaaatgactcccggagtcaaatgggagactcaggtttccttgtcggaaagaggcaggacacgaggcgaataaccggaaactgtctcaaccagcagaagaacatgcttccgcctctcgctgattgccgctttcacagcagcctcgaattccgccggcgttgtaaccggctgctggttaatttgcagaatcacatcacccggctgcaaaccggcatcggcagttggtgtattggcgtcaatatccgtaatggcgagaccagtcatcccccagcgcagtccgtatctgcggcgcacctcgccggaaagggatgccagcgacaggccaacggacatgaatttcccgtcagcaggttcctgccagaaccatgcacgatctgcgggctccgtacgcggtttcagtgtcttgcgatagtcgccgcgcagaacacgtgtctcgacacggctgtttgcctgttcagtcgaaatcacatcaaacacatcattcaccgacttgaccgaacggccattgaccgtggtgatgacgtcgccacggcggaacccggcacgggctgcaccggagcccagaatgatatcggtaacaacacttcctcccggctcaccgaggccaagcgcccgggccatggcggcatcaattgtctgcattttaaggccgatcggccccgggccgtcagcataggcttcgtcttcggcaacatcgccgccgggcatcagcacatagcgaaagccggaacggttttccaccagcatcagcatctgctcaacgccacgtcgccgggctgccttgaaggccgcatcaatctgctccggtcgccagacattttcgccattgaccatgacgatgacatcgccctcttcaattcccgcctcggctgcgggctgtccctgatctgcaccggtaaccgcaacgccgacaacaccccagcgaatgccgaattcctcacggatttcatcggtcagggcatcaagcgacaacccttctgccggatagcgaccacgggctgatttctgaatttgtcgtgccggtggccagttggtgaaccggaccgtcagctttttcatctctccgcgccggagaaccgtaaatttccgctggtcacccggccgggtttgcagcatggcaccaatcagatcgtcgaatttttcgaccggtgtttcattgacccggaggatcagatcaccacggagaaagccggccttgtcgccgggactgccgacagcaatatcacgtaccaatgcaccttccggctcgctcatgcccagggcttcggccatcagatcattcgcgccctgaacctgcatgccgacaaaaccatgctgctgagcgcgggcaaaattcggccagccggccattgccatcacagcgacaacaagcgccggtatgaagatagattttttcaagaaaacgcgatcaagcatgcctaacgacaatcagtattctgtacaaaccgttgccccggcgccggggccgcaatcaaccccaacttccccccaagtcaggaggcactgtacaaacagtctggcaggcgcacaaccgtaagggatactctggtcaatcaggctttccggaatgactctatttcatgaatcagatcttcag

SEQ ID NO: 2494 - DNA, 21524 bp, synthetic construct
  misc_feature 1..21524: note = Synthetic
  source 1..21524: mol_type = other DNA
gctggacagtcggtgatctggacctgatcgaagccaacgaagccttcgccgcccaggcctgcgccgtcaacaaggacatgggctgggataccgaccgagtcaacgtcaacggtggcgccatcgccatcggccatcccatcggcgcgtccggcgcccgggtgctggtgacgctgcttcatgaaatgcaaaagcgggacgccaagaaaggcctcgcaaccttgtgcatcggtggcggcatgggcgtcgcgatgtgcgtcgcgcgggactaacgagagatgtgcgtcgcgcgggattaacttgcaccttggggaggaagacggatgaccgataaaagaatagccattgttaccggtgggacgcgcggcatcggccgggccgtttccatcgccctgaaggacgcaggatataccgtcgccgccagttattcgggcaacgacgaagcggcaaatgcgttcaaggatgaaaccgggattccggtgtataaattcgacgtcggcgatttcgacgcctgtgccggcaacatagccgctatcgaaggcgacctgggcgccatcgatgtgctggtcaacaacgccggcatcacccgcgacaccatgctgcacaagatgacgctcgagcaatggagcgcggtcatcagcaccaacctgaatggcctgttcaacatgacccgcaatgtcatcgaaggcatgcgcgcgcgcggcttcggacggatcatcaacatcagttccatcaacggccaaaaaggccagatgggacaggccaattattccgccgccaaggccggcgatttgggcttcaccaaggccgtggcccaggaaaacgccttcaagggaatcaccgtcaacgccatcgcgcccggctatatcggcaccgagatggtccgcgccgtgcccgaagaggtgctcaataccaagatcattccgctgatacctgtcgggcgcctgggcgagcccgaggaaatcgcccgctgcgtggtcttcctggccgccgacgaggccggctttattaccggatcgaccctgagcgccaacggcggccaatttatggtctgaggctaaaccatctgttaatgccttgtcgttcatggtaaacggctatcgatatgcttttaaccatgagattccttgtgcgccccatacgtatgccctttcaagtgatgttgatcgccgtcgcgctgctggcgctggcggcccaggaaggccgcgccggttccgatgcaacgggcaagaccggcaagctggcattctatgtttcccagcagcaaaaggccggaaagataagggccagggagatttatccgtcgcgatatcagcggcccgatttcctgggaacatcgcagccgatacagatttacaagggatttacgctgatcggcggcaaattctacggccaggataagccggaaaattcatggttttttcgtaaaataaggcaatccattgaccttatagagcgcaaatcacctaatatttatcaaatgatgcggggaatcaacccgaacgggcgccgggtcatcgcctataccggcagaaacgggccagcctctttcgtcgcctgggaaaaagactatatcgtcaatatcaccgccagcaacattgatgatgatcccgcgttcgagaattcgagctataccctgtcggcgaccctggttcacgaactgctcggtcacggacggcaggaaaacgacggccgggtctgggccatgtatgactggtgcggcaaatcgaatggccatatcgaaggcgtcgtctggcaagccaatgttgcgggtaaaagcagcggcctggtcgaatacgaagccaatttgttcgcccgctggtttttggaatccgtgcgcggcacctatcccgacctgaacgaggtgccgatccggcgctatgttaaaatcgtccggacaatgaaaaaacgtttcccgggctggtacgacgaacgcaaggattcgaccacgctgctcggcgaattcgaaggccactttaatagagtctgccccggattgcagtttacaccgcatccggtaacaggcggttgacgacccgggcctccggtcacgccacatcccgcgctacgataatcggcggcagcgccgtgctgatgtgggcgaccctggcgctgctgacgacgctcagcggtgacgtaccccccttccagctggtcgccatggcattttcctgcgccttcgccctggccctgggcaaatggctgtgggcgggcgaggcggtgttggccaagcttaaattgccgatccgggtctggctgctcggcgtcggcggattgttcggctaccattttttctattttctggcgctgcgcaatgcgccgccggtcgaagccggcctgatcgcctatctgtggccgctgctgatcgtgctcgcctcggccctgttgccgggcgagcggctgcgctggtggcatatcctgggggcgctgatggggctcggcggtacggtcgcgctggtgcttggtaaccatggcggcggcttgtcgggctttaaatcccagtattggctgggctacctgatggccatcgcctgcgccctgacctggaccgcctattcggtgctgtcgcggcgcctcgcccatttgccgaccgccaccgtcggcgctttttgcggggccacggcggtactggcggccctggcccatgtcgccttcgagacgacggtgtggccaagcggcggccaatggctggccgtgctgggcctgggcctggggcccgtcgggatcgcctttttcacctgggattacggcgtcaagcacggcaacatccaggccctgggcgccctgtcctacggcgcgccgttgctatcgaccctgctgctgatcgtcgccggcaagggcgaggcgacgctcaacgtcgccgtcgcctgtgtggcaatcgtcggcggcgcggtgctggcgtcaaaggatatgctggtaaggaaaggataagtcatcaatttgattgaattgctatgctcgtttgtgactgcaaagctattctccttaagctattcttcttgatattaattcgataactcgagcctttatgttttgaaatgtcacgcttaagtgggctttggcggtttcagacaataaaccagtatgtccaactgcatttcttgcaggcttataactatgagcatccttcacgagggagggttcgccgtcatctttttttgactcttcagcactatgcgccagacaatccatgcctagatagcttaaatcatcgttgtctctgcgaatatcaaagctaatacctgctctgtctttacgtttcttctctctttccctccactcttttacttccgtttgagatggctctgtgagctcaatcccatgatccttaatgtatctgcgtactaggttctcagatagaaaacagtcaacatatgaagaaatattaaattcggcatcgtctcggagaccctgtatccatccctcaacttgatctttcccaggcgcatcctcgctgggtttgaattcatccgccgtagcagaatataagtccctcaccttacggtctttcttcgattttcgagtattttcatcatccccttcttcaccacggttcaggcgaagcctatcccaatcgtccaatatcttgggtatgacttctccttttaaataatcaagaagcgattgaaaattctcgtcgtcatcttttattccttctcggctacttgtgaacggatccaagtcagccttgtccatgaggtcaaagtgaatttgaccatacatataactttctggaagccgctgtgtaggaatgtgtctattaatgtttttctcacggagccgaccatttacaaacaggtcgatcgtcgcccgttcttcagttcctgtaattttaagatttcttggttttatcactgtcgctataaaaccttttaaatcaagagtggcagtgaacgtcgaaggatccgccttcaagctaggaaggttttgtatgtaatcgtcttcgtagccattaattagccagagaaattctgttgtatccatcaagtctttgagatcattgatggtaacttggttgccgtttacaaaaatgttgaattctttgtccagcaaggaaaacttgaaactcatagctaaaagcttctttatgtgggattctgaatttcgaataatttcctttgtctcttcaaagaccaaaattgtgccttggtcatggccttcggctaactcagcaacgagatcaaagttcaaattttcaagaggatagtcatttggagtcagatcatctttgatcgcggcatcaagtccagaattgtcgataacaccgccagtgtattcagagtcttcaattttcgtgaaaatcgaaactcttctggcacacgaaagcaaggcaagttttcctatacctttagcgccaatgtaaggtcggcctcttccggtctttgtttctccttctttccgttttgaatagccaatctttaggaactttgattggaaatcctcggcggtcatgccgtctccgtcatccttaatgctgaagacggaattttccttgtcgatgtcgatccaaacgttcttggcatctgcatcccatgagttggaaattgcttcgccgagcacagtaataaaattccgatacaaattacgcccaagatggtttaggacgctcagagaaatttcaaactgaaagtcagtttctgccatcggtttctccgtattgagcctctaaaattagattcccaattgcctcagcaagcttcactggtaccgcgttgccaatccacctgccgacttctgtaaacgttggtttctggtcgggcgggaaaaattcataatcgcgaggaaaggattgcaatatagccgcctcacgaagtgatatagcgcgatcttgttctggatgaccaaatcgcccatttccatatccataacattgggttgtcatcgttggcgaaggctcattccaggacattcgagcatatactcccggatatgttttccccgatggtcggcgatggcattctgctctcaatttcattggccaatcacgccaagtgccgcccggttttgaagcgcgaattcgctttaagttcatctctgtaagcgacgaagatacgtgtaacgaatcttgagggtccgatccccccgcttttattgatggcagtccgccaatggcttcgcgaactgtcgtaccagagtcgtgggtcgggtttaacggtggtaggacaaagtgtcgtgatgccacaacaactagtcgtcgtcgcttttgaggaacgccgaacaactcgcatttagcgattgaccattgaacattgtatccggcgccctctaggcaatttaagaatttcgaaaaaacccgtccgttcttgtatttcacgagcgccgggacattttccatggtgacaaaatctggtcgcactttcgtagctagttctgcaaattttgtgaccaaactccattgaggatcctcattgtatcgatgtttatatgaggagaacggctggcaaggtgcgcatcctgctagaattgacgggacagttcctgaaaagtgtttcttgatttctttgggggtcagcttggatacatcgcgagtgtagaatgcggattcgttatttttctcataggcgtatttgcaatttttgtcagtgtcataacccgcaatgatatcaaatcctgcttgcttgaggccatggcttaaggcacccacaccgcaaaataagtcaactacctcgcctaaacagttgcttttattaagcacgccaagcctttccagtcatcttcaataattaagaaaaaataccttaatgcaaccccttgtacaacaatagttgaaatgcggcccgttccgaaggactaagtctagcctacggtaatcggggcgcggtcgccatcatcgacgggcgatcggcgatggtttcgaaccagtccgccagggccgggcgggcggcccgccagttatcgtcggcaaagcggaaatccagataaccgagtacgcagccgaggctcagcaaaccgatggtcagttgatcgccgaagccgtcgacctgttcttccagggcgtcgaggccgccttcgacttttcccttctgcttggtcaaccaatcgggcgagcgttcattctccggtcgcaggttttcataaatttgcagaatcgccgcatccatgatgccgtcggccagggcctgcagacgcagcgcggccaagcgctcgccaccggcctggggaaacagcttgcggccgtcgtgcaaaccgtccaggtattcgcagatgacccgggaatcatacagcgattcgccgccatcggtgaccagggtcggcaccttgcccagcgggttttccgatgaaagccccgaatcaccgacccgggcatcggtcgcgatgcattcgatcctgtcggccaggccggtttcatgggcgaagaccatgactttgcggacgaacggcgaggtcggcgaaaaacgcagtttcatgggtcggatcctcttgttagaaattgtctttgcggcggcggatttcggcaaatgtccgggcggcgcccaggccgaccagcccggccgcaattttcagatcgtcggcatcggcgcgcaggaacgggttggcggctttttcatcaccaatccgcgacggcaccgtcggctttcccgcctggcgcagttcggtgatttcgctggcgcgttttttcagggccgcattgtcgggatcgaccgacagggcgaaatcggcgttggcgttggtgtattcgtgggcgcaatagaccagggtgtcatcgggcagggcgcgtagtttcaaaagcgaattccacatttggtccgccgtgccttcgaacaggcggccgcagcccagcgaaaacagggtgtcgccgcaaaacagcgcattgctgtcggcgaaccaataggcgttatggccgctggtatggcccggcacgtcaaatacctgggccgtgtgggcgccgagcttcaccgtatcaccctcgctgacccgatggtcgatgccgggtatccgcgccgcatcgttaccgttgccggtaatcgtgcatccgaacgcctgtttcaattccatattgccgccggtgtggtcgccgtggtggtgggtgttgaatatctggctcagggtccagccctttcgcgccagcgcctgcttgaccgggccggccaccgccgggtcgacacaggcggtttcgccactgtcgggatcgtggatcaggtaaatgtaattatcgttaaggacattgatctgaaggatgtcgagggcggacatgactgcaagctttcactggtttcgctaaccccaagttagcatctctttatattggaaactactgtgctaaagtccacggattatgtggatggacgccgtcgacctgagagatttttatgcggacagcctgggcggcgtcgcccggcgcatgatccgcaggcgaatccgcgccatctggcccgatctgggcggcatgaaggttttgggcctgggcttcccgaccccctatctttccgcctttcgcggcgaggccgaccgggtgctggcggccatgccggcggcccagggcgtgctgcactggcccatggacgagcccggcctgaccaccctgatcgacgaatgcgacctgccgtttgccgacatgtccatggacagggtgctgatggtacacgccctggaatgcgccgaaaatgtccggccgatgatgcgcgaggcctggcgggtgctggccggcggcggcaggctgatggtcatcgtgcccaaccggcggggcctgtggtcgcggttcgaacggaccccgttcggccatggccggccctattcgtcgggtcagctttcccgggttttgcgggacaatctgtttatcccctacggcattgagcgggcgctttacctgccgccgagccgatcccggatgatgttgtcgtcggccccggccatcgaggaaatcggtcatcgctggttcaagtccttcgccggcgtgatcatcgccgaggccaccaaacagatctacgccggccagcccgaagccccgcgcaagcgggcctatatgcgattgccgcaaccccgtcccggcggttcgacccgtgccagacagtaaaaaatgacggaacgaagccattttatcctttaaaatcaagggccagtttttttcggctccgtcaaagccattttcactctcgctcgctgtaaacaatattaagaataggtaatagtccctttttgaccgaagttcaaggattattttctgtttatctgattttttgcctttatttgattatcgacttggcgacaaaaagggtggcccggaggccaccctttattttgtgaatctttcttcttgttaacggaaagcccacgattcctaatcagctaaaaaaggaagcatcgataatgcgccttttcaagacactattcaaggtattaaatacaaccataacgaaaccatggaaacaggggtgcgattatggcatggagactggggctcgatattggaaccaattcaatcggctgggcggctttatcgcttgaccgggaaaagggtagttggcggccatttgggatcatcgcaagcggcgtccggattttctcggatggccgcaatcccaaggaccggcaatccaacgccgtcgcccgccgcctgcctcgccagcaacgcagaatgcgcgacagatacctgaagcggcgcgaacggtttatggatgctctggtccgtcacggcctgatgcccgtggacatcgaacagagaaaagcccttgaacacgaagacccgtggaccctgcgtgtaaaggggcttgatgagcaattgacgctgaatcaactgggtcgcgcccttttccatctacaacaacgccggggcttcaaatccaaccggaagaccgatgcgagtggcgatgacgactccggcaagatcaaatccgccgccgcagcagtcacggaagccatgaagaaatccgggaccagaacgttgggagaactcctcgcggctccccgtatcaaagacccgaagtcagcgcatagcaatcccgtacgtacacgtttgaaaggtaccggggccaaggcccattacgactattacccgacgcgggacctgatcgaacaggaattcaattgcttgtgggctgcgcaaaaaaatttccacaagggcgctttgacggatgccgcgcgagatgaactgcacgacatcctgttttttcaacgcgatctcaaatcccaaccggtcggcaaatgttcgctcgacccgacacaggaacgcgccccgaaagccctgccctcggtgcagaggctgcgcatctatcaggaaattaaccacctgacggtcagcctgcccggtgaagcggcgcaccccctgacacttgaggaacgggatattctggttggcaaggctctggcgacaaaacaactgacattcgacgccgcccgcaaagccctaaaattgcccgcgaacgcccggttcaatctggaaagcgaaaagcgcaaacacctggatggggacaagaccgcggccatcctcggcagcaccaaacgatggggcaagggttggcgagacttgcctgtagcagatcaggaaaagatcatcgaaaaattactcgacgaagaaaacgaaagcacacttctcgattggctcaagtccaaatacggccttgcagccgaaacggcggaagcggtggccggatcaccattacccgatggacacgggcaactggggcgcacggcgacggcccgggtgctggcggaactggaaaaagacgttctttcctatgacaaggcggtcgttgctgcgggctatgagagccactcccagcttgatttcgacggcgaggttttcgacgccctgccctattatggcgaggttctggagcggcatgtcgcattcggttcgggcgagcctgcggaccatcctgaaaaacgatacggcaagatcgccaacccaacggttcatgtcgcactgaaccagatcaggcgcgtggtcaatgacctgatcaaaacgcacggtgctcccgatcagattgttgtcgaactggcccgcgatctgcccttatcggccaaaggaaaatctgacctggataaaacccagcgagaaaaccagaacgccaacgatgaccgccgcaagtttctggctgaaatgggtcaatcggattcttacgacaatcgtatgcggttacgtctgtgggaggagctgaacccgaaagatattcttgacaggcggtgtccctataccggggagcagatcggtcaaaacagagtattttcagcggaagttgaagtcgaacatatcctgcccctctctcgcaccctggatgacgggatcggcaacaagacattatccatgcgtcgggctaaccggttcaagggacagcagacgcccttcgaggccttcgccgcgtcacccgaaggatacgactgggccggtatatcggcgcgggcgattaacctgccaaataacaaatcctggcgtttcaatcccgatgccatggaccgctacgataataccgaacgggatttcctcgcccggcaactgaccgatacccggtacatgagccgcctcgctaccctttatctgcgacgcaccggggcggatgtctgggttacgccggggcggttcacttcagatctgcgttgggcctgggggctggattcggttctcgccggacacaatcaggaggaagggggcgaccccatcaagaaccgcaacgatcacaggcatcatgccatcgacgccgtcgtcgtcgcgctgacggaccgaggacttttaaaccacgtcgcgaccgtcgccggacgggcggaagaacggtttgataaacgctatctggccgatatcaacgatccctggatcgactttcgcgatactgtacgcgaaagcatcgaacaggtcgtcgtcagccacaaacccgaccacggggtgcagggcgctctgcataacgacacggcttacggcattgtggaaccggcagacgccaagggccggtcccaggtcgtccatcgggttcctttgggtagcttgaagccgaagcagcttgaagcgatccgtgaccctctgattctagaacatttgaaaacgaaaacggcgggccttgagggaaaggattttaccaacgccctcatcaaggccggcgaggcgatgaacccgccggtcaggaaagtacggattgtcgaaactttaagcgttatccctacagttaccgacaagaccggcaatgttctcaaggcgtataagggggatgccaattactcttacgacatttattccgatagcaagggaaaatggacgggtcgcgttgtctcccgcttcgaggcgaaccaaaaagaatttactccagacgcccgtgcgttgccggacggagcgcctttgatcatgcgcataagggggaatgacatgatcggtatcggagaaggcgagaaaaggcgcattttacgagttgtcaagttctcaaccgggcagattaccctagccgatcattgcgagggcggtgcactcaaatcccgagatgccgacaaggatgatcccttcaaatacatgaccgtctctccttccggcctacagaagttaaaggcaacattggttcacacaagtccggcgggtagagtgtttgaccctgggccgagcgaatgatcggtcgggtagtcgaaatcgccaccgacggtgttcatctttccgttgaccgggggtttatgaaagtcagccaagatcacaagaaaatcgggcaggttgctctcgatgatatcgctgctcttgtggttcacggccacggcgcgacctggtcggcgaacctgaccgctcgcctggccgatcgaggtgtgccgatggttatttgcggatcgaatcacgcaccggtcgcgcttgtctggccaatcgacggtcattacgaacaagggcggcgcatgcaggcccaggcggaggcatccagacctttgcggaaacgtctgtggcgaaatcttgtcaagagcaagattctggctcaggccgacgccctggaagcgttcggtcagcgctccggcgccttgcgggacatggcgggaaaagttcgttcgggcgacccggaaaacatcgaaggcagggcggcgcggcgatactggccgctaatgatgggcgacagttttcgtcgggaccggggcgcgggcggagccaacgccatgttgaattacggctacatgattttgcgggcggcgacggcgcggtcaattctggcggcgggattgcatccatctctttcggtccatcatgaaagccggggtaccgcgcttcgtctggcggatgatttgatggagccgtttcgcccctatgttgacgggatcgtcaggaaactgctgcaaacgacaggagatgacctggaccgggatgcgaaagccgcccttgtcaaggtgacgacccttgatcttgaagggtcaaagggggcgtctcccttgcaaacctctcttgatcgtttggcgacatcgctggcattggtatttatgggggagcgagacgacctggagcttccggggccatctttggctcttttcaattctgtcaaaatacaatgagccatttaagcggatatcggatcatgtggatgatggtgttgttcgatttgccggtaaccgagccggaagagcgcaaagcggcgacagaattccgaaattttcttttggatcagggattcgaaatggcgcaattttccgtatatgtgcgctatacttcgggtaaggacgccgccgcttcgatgaccaggaaggttgaagcgaccgttcctcaaaatggaaaagtggatgttttgcagtttaccgataaacaatatgaaaatatcgtcagcttccgcggtggggatcggggtccgaggaacaaaaatccggaacagtttgtgcttttttgatgatttggcgagatttgcaatggaaatggctcaatttatcacgcgaactccaatgaataaccccctgaatatcagggggttattcaaggatggagtttagctgattaagaatcgtgggccaaccgcaacaatgcttgatcgacgccaacgtggctttttagtttagctgattaagaatcgtgggccaaccgcaacggtgcgaccagaagcccgttggcgaccgtcagtttagctgattaagaatcgtgggccaaccgcaactgaattcgctttccaacgaccacaattttaagtttagctgattaagaatcgtgggccaaccgcaacgccttagggaccgggtatttcggaaaattaagtttagctgattaagaatcgtgggccaaccgcaacctattgcttttcggcaagtcttggtttaccagtttagctgattaagaatcgtgggccaaccgcaacagcaagagcagccttgaaaatagacccgccagtttagctgattaagaatcgtgggccaaccgcaacatccggtcactttaaaggttcgttcgatatagtttagctgattaagaatcgtgggccaaccgcaacatggatagcagcatcaacaatagggtcggcagtttagctgattaagaatcgtgggccaaccgcaacttatcagcgaagggctttacaacgaggaacagtttagctgattaagaatcgtgggccaaccgcaaccaatacgccgttgccgcgacggacgatttatttaaaaagaaattatcgcgtcaagaaaaaattgatttagaaattttcggaaaagaaaattggtcaataactggcgaatttggtactaatattttaattgaaagggaattagatgaacctgataaacgattttataatgttgctgttgcggcttctataactagtttagctgattaagaatcgtgggccaaccgcaaccaaaccggacgcttcaaccccaccgcctacagtttagctgattaagaatcgtgggccaaccgcaactgtcgccgcttcctcgaccccgccgccgcagtttagctgattaagaatcgtgggccaaccgcaacgtcaatggtaccaatgaagttcagcttttgagtttagctgattaagaatcgtgggccaaccgcaacgggcgtcacgttcatagagtttttgaatttagtttagctgattaagaatcgtgggccaaccgcaaccaattgccgcttcgctttttggagcaaaaaagtttagctgattaagaatcgtgggccaaccgcaactcttcttctcggttcccatccgtctattatagtttagctgattaagaatcgtgggccaaccgcaacaaaaagatacgcttctttcaatgcggcgagagtttagctgattaagaatcgtgggccaaccgcaactttacacctccatgatcgcccatgccatcaagtttagctgattaagaatcgtgggccaaccgcaactgaatacctcggcggtggacaaagccctatagtttagctgattaagaatcgtgggccaaccgcaacgataccattcggcctgtttaagctgctgctagtttagctgattaagaatcgtgggccaaccgcaacgaataattcctctcgacccactgctcagtgcatcaccgcctgagcaaatataccgcctgttcgccgcgcaggtttgacaggaacgggcgacggatggcgacgccatgggggcccaggatgatcgagcgttcgaccttgatgcccatttcccggcacagcacccggaaatcccggatcgtgcaaaaatggatattgggagattcgtaccactgatcgggcagggtgtcgctgaccggcatacggcctttcagcagcaggtgcgcgcgcacccgccaatggccgaaattgggaaacgagacgatggcgcggcgaccgatcctgagcaattgttcgagcacgtctttcggtgcatgcatggcctgcagggtctggccgagaatgacgtaatcgaaggcgtgggccggataatccttgaggtctttttcggcatcgccctggataaccgacaagccgttgctgacacaggcgttgacgccttccgtaccgagttcgatgccgcgcccgtcgacctgtttgaagttggtcaggtattccagcaaattgccgttgccgcagccgacgtcgagcacccgcgagccgggctcgatcatgtcggcgatgatctgcaggtcgatgcggatcgacttgacgccggcttcgttcatcatctcaggcgcccccggccccgtttcggcgcggcaggccgcgatgttcggcggcgccgtcgataaagccgctgagcacccggaaaaattccggttcttccagcaggaaggcgtcatggcccttgtcggagctgatttcggcgaagctgacgttggcggcgacggcgttcagggcgtgcacaatttcgcgattgccgccggtcggaaacagccagtcactggtgaacgaaaaaacgcaaaagcgggttttcgtgcccaggaaggcattggccagcacgccgtcgtattcttcggccaggtcaaagtaatccatggcccgggtggtatacaggtaggaattggcatcgaaccggtcgacaaaggttatgccctggtgacgcaggtagctttcgacctggaaatccgcatcgaagccataggttatttcgtcgcggttctgcaaacggcggccgaacttgcgatgcagcgccggttccgacagataggtgatgtgagccgccatacgggccaccgccaggccggcgtggggccgcttgccttcgctctggtagccgccgccgcaccagttggggtcggccatgatggcttggcgtccgacttcgtggaaggcgatgttctgcgaggaatgacgcgccgccgtggccaccggaatggccgagaatacccggtcgggaaaacttgccgcccattgcaacacctgcatgccgcccaatgatccgccgataacgctgaacacctgatcgatgcccagactgtccagcagcatggcctgggcccggaccatatcgcctacggtgatgaccgggaaatccaggccccagggcttgccggtggccgggttggtgtcctgtgggccctcggtgcccatgcagccgcccagaatattggcgcagatgatgaagaaacgctcggtatccagggtcttgccgggaccgaccagatggtcccaccagccggccttgcccgatatcggatggacgtcggcgacgaactgatccccggtcagggcgtggcaaaccagaacgacatttgatttatccgcgttcagcgcgccataggtctggtaggcgacggtgaaattgcgcaattcggcgccgctgtccaggcgcaggggcgcatcgacgcccagctttacccgcaagcccgggtcatggtcatccttctggcctgtggccgcatcgttggcttcgtcgcccgccacggggtgttcctctctctggtggaatggtctgcgggcatcatagctatgaatcgtaccacaacgtgtcaatgttttctttgattttagcgggtcttgggatatcactaccacctctttcgccaccctttcgaccatgacctttggaccccgaaatgagcgccgataaaacactcgagcacctgcgtctggaaatcgacgaaatcgatgatcggattcatgatctgatcatcgcccggaccgaggtcatcaaacaggttcgcgaacttaaagccggccaaccggtgaagattcgcccggcccgagaggcgcggatcctgtatcgcctgatcgaacgccacagcggtccgtttccgaaaagggaactggtccgcatctggcgcgagttgatcgtcgccacactgtcgttcgaaggaccgttttccgtcgccgtctacatgcccgattccgaatcctcatcgggcccggaaggcgaccgccgttccggtcgctggagcgtggcgcgcgaccagtatggctcgttcaccccgatgaccggccatgtcagcgcccaccgggtgatcgaggccgtacacagcggcgaggcaaccgtcggcatcctgccggtgccccagcgcaacgaggccgatccgtggtggccgcacctgaccagccccggcgagagcacgcccaagatcatcgccaggttgccatttgccggtaactccggtggccgcggcggcgccatggaagcgttggtgatctgcaccgccatccaggagccgagcggccgcgaccggacctatctgaccatcgaaatcgccggcaatttgagccttgatcggctttccgacgccttgaacgcggcagatttactgccgctgtttatatcggcccggcaacaggaaaaccagcccgggattctgctgtttttggccgaagtcgatggtttcgttctggaaaatgaccggcggctggaacaactgggggaaattctcaaagacagcaacccgcacatcaggtccatcggcagttacggcattcccctgaccgaacaggacctggccattgaaggcgcgggcaggagttgaaccatgaacggaaaagacaacctgctggccagcccgcttagaccgcattccggcatcgccgggatttcgccctatgtgggcggtgattccgctatcgacggcgcccggaaaaccatcaggctggcctctaacgaaggggcgctggggccaagcccgaaagccatggcggcctatcgggccgaggccgaaaacattcaccgctatcccgacggcggttgcacggaattgcgcaatgcccttggcgaaaaatatggcctggatgccgggcgcatcgtctgcggcgccggatcggatgaacttctcgacctgctggcccgggcctatgccgggccgggtgacgacgtgctgtacaccgaacacggattcttgatgtatcccatagccgcccggtgcgtcggcgcgacacccgtggcggtgccggaaaccgacctgcacgccgatgtcgatgcgttgctggaaaacgtcacggcgaagacccggattgtcttcctggccaaccccaacaacccgaccggcacctacctgccggaaacggagctcaagcgtctgcgcggcggtttgccggacaacgtgctgctggttatcgacgccgcctatgcggaatacgtcgagcgcgccgattacgacgccggggccgctatggtcgaaggcaacgaaaacgtggtcatgacccggacgttttcaaaactgttcgccctgggcggcatgcgcctgggttgggcctactgcccggccgccgtcgtcgatgtgctgaaccgcctgcgcggcccgtttaacgtcaacagcgcggcccaggccgccgggctggcggcgctgggcgacggcgacttcatcgaccgggtccgcagccacaccgcccggtggtacgactggaccaaacaacagttgctggacctgggcctggaggtgccgtcgcaagtcggcaatttcctgctggtccggtttccccgccaaagcgatccggacaacggcggccgcgacagcgccgccgccaacgctttcttgcgaagccggggcatcatcgtccgccccatggccgcctatggcttgcccgattgcctgcgcatcaccatcggccgggaagatgaaatgcgcgccgtcgtcgatgcccttggcgattttctggaataacccatgaacaccgaaaatcccctgttcgcccgcatggcgttgatcggcatcggcctgatcggctcgtccctggcccgcgccgcccgcctgcatgacatcaccggcgacatcggcatttgcacgcgccgccagacgaccctggacagcgcccgcaagctgggcctgggcgacgactacaccaccgatccgctggaggccgtccgggatgccgatgtggtcgttatttgcgttcccatgggcgcctatggggccgtcgccgaagccatcggacccggccttaagcccggcgccatcgtcaccgatgtcggttcgaccaagcagtctgcaatcgccgacataaagccgcacattcccgatggcgtgcatctggtgcccggccacccggtcgccggtacggaacattccggacccgaggccggcttcgccagattgttcgaaaatcactacaccatcctgaccccggaaccgggaacggacgccgaggccatcggcaagattagggagatgtgggaaaaatgcggcgccatggtcgaaatcatggcggccggccatcacgatcaggttctggccatcacctcgcatctgccgcagctgatatcctacaccatcgtcagcacggcgacggacctggaagatcacctgaaggacgaagtggtaaagtacgccgccggcggcttccgcgacttcagccgtctcgccgcttccgacccggtcatgtggcgcgacatctacctgcgcaacaaggacgccgtgctcgacgtgctgggccggttcaccgaagacctgaccgccctgcaacgggccatccggcgcggcgatgccgacaagctggaagacgccttcacccgcacccgggaaatccgccgcggcgtcatcgacgccaaacaggatttcatcgacgtcaagaaagactagggcgcgaagctacttcagatgcagtttcttcaactttttccgctgtaacggcgtgataccttcggtcgccgccttggcgccgggtttggcgttgaacgccgatttgtagggcttcttgcccttgtttttatcggccggtttggtgccgggcttggtccacttcctggcttggggatcgtctttcggtttatcggtgcgcttttgccattttttcggccggggcttttcgcttgccgggccatcgtcattttttttagcgaacttgcccttcgcttccggcctgacatagacccccgacttcggcccgctgtaaggcgtctttttgacaaacggctttttctccggcgcggcttcgacaggcgcttcggggatgccctgcaggcgggtcagggcgacggttttttcgacgatgtgatcggggccgatggcggcaaggaaattgtcgatgcacccgggagccagttccacatgggtttcgttttgatgtatgcggatggcgccgatatccgtattggatatgtcaccggcgcggcacaacatgggcagcaaccagcgcggctcggcgccgtttttgcggccgatggacagcgagaaccagacgccgtccttgaaatcatcccgctgtttcggtttgcgctcgatggagcgttcccggacccgttcgccggaccgtaccggggaccagtcgcttttcggatcaggcgcggaatcctgcaattcttccggcgccgcatggcttgttgaatgctggcgcaggaaggcggcggcgatttgttcggcactatatcgggccaccagttcctggacgaaggacaattcctcgtcggttatggcatcactcaaggccgggtccgccagaatccgctggcgatcccgcgcaagaatttcatcgaccgatggcgcccgcgcccaggtcgcctgaacattggcgctgtcgagcaggcgttcggttttcttgcgggcgttgttcggcaccatcagcacactgacgcccttgcgcccggcgcggccggtgcggccgctgcggtgcaacaggccttcgccgtttttcggaacgtcggcatggatcacaagttccagattgggcaaatcgatgccacgggccgccacgtcggtggcgacacagacccgggcccgcccgtcgcgcatggcttgcagggcgtgggtgcgttcgttctggcttaattcgcccgacagcgcgaccaccgaaaaaccccggttgttgaggcggctggtcatgtggttgacggtcgcccgggtggcgcagaagaccagggcatttttcgcctcgtaaaaacgcagcacgttgatgatggcgttttcccgctcgtacgacggcacggtcagcgcccggtattcgatatccagatgctgtttctgttcgcctgaagccgtgacccggaccgcatcgcgctgatagcgcttggccaaggtggcgatggaccgcggcacggtggccgaaaacatcaatgtgcgccgttccgtcggggcggcgtcgagaatggtttcgagttcctcgcgaaagcccagatcgagcatttcgtcggcttcgtccaggaccacggccctgaggcctttggtgttgaaggagccgcgtttgatatgatcgcacaggcgtcccggcgtgccgacgacgatgtgggcgccgcgttccaaagcccgccgttcggtgcgcatgtccatgccgccgacacaagaggcgatggccgcgccggtcatttcaaacagccagtcgagttcgcgggtgacctgtagcgccagttcccgggtcggggcgacaatcagcgccaggggcgccttggaatggccgaagcgatcagcaccttccagcaaggttggcgccagggccaggccgaaggccacggtcttgcccgatccggtctgggccgacactagggcatcggcatcgcgcaattccggcgccagcaccgccttttgcaccggggtcagggtggcatagccacgtttgctcaacgcttgttcaagcgccggaacgacgccttcgaattcggtcatgtttttctttcggaatgcggatttcgggcgcccgcgttacggcgttcaaatgaaccgcgatcaagtaccaggcggaaatttaaatatcgggcgtgttgtacttggtgtcggcggcgccgtaaagggggcacggagcctgtgttaacaaatatctgccatgtgtgtcgcgcatgggg

SEQ ID NO: 2495 - DNA, 16887 bp, synthetic construct
  variation 9364: note = n is a, c, g, or t
  variation 9420: note = n is a, c, g, or t
  variation 9435: note = n is a, c, g, or t
  variation 8017: note = n is a, c, g, or t
  variation 9468: note = n is a, c, g, or t
  variation 13502: note = n is a, c, g, or t
  variation 8028: note = n is a, c, g, or t
  source 1..16887: mol_type = other DNA
  variation 8022: note = n is a, c, g, or t
  variation 8013..8014: note = n is a, c, g, or t
  misc_feature 1..16887: note = Synthetic
  variation 9541: note = n is a, c, g, or t
gaaaccgctcagcgcgaccgggacggcggaggcaaaaccgatagcgttcagtcccagcacgatcagggcgcccgcaccgacaaagatcaggccgtaaccgaccgtcacccgcggcgcgcgtatgatgtcctgccatccggctttcagccaggcccagggtgcgtcccggcgcacgtgcttgagatgaaccatggtgtcctccctcggaaattctatgctgggtatcgtcagctgttttgcggcattacgccacactttatttgtgggcttgtccagtcgaagacagcgccagggagtatgcatggcgccggccggattgtcagaactgagccttctgggcggaatgctcgccggattcgcgtccagcctgcactgcgtcggcatgtgcggcggcattgcagcgagcctgtctgtttcgtttggtggtgacgcagcccgaagccgaacccgggcgctcttgctcgctcagaccggccgcatcgcggcttatgtcgtcgccggcgctgtccttgcagcgctcggatcccaagcctatttcgcctttgaccgcggcgaggcccacctcatcctgcgctggctggcggctgccatgctcgtctatatcgggctctcggtcgcgggctgggcgccttccctggcgggtgtcgatcgtctcggagcacgccttctgacctggatgcgggcgccgttttcgggagccttgtcactggccagcccgctgctggccggtttcctgtggggcttcctgccgtgtggcatggtctatgccacgctgttctacgccatgctgtcgggctcggtcgcgacgggtgcactgatcatgctgggtttcggactgggcacgctgccagccgtcactgctgcggcgttcggcgtttccggactgttgtcggcggcacgctcgccccgggttcgaatcgctgtcgggctggcgatcgtggcggtcggtgtggcgtctgccgcgctgccctggcgcacgattgctgcattctgcggcatcgaactcgcctgacgggagaaaacgcgccgaatgcccatttcgccggtgcgtttttcttaacaaagcattatggttcggcgccaatgggataggagttcagcgatgtcgctgtggcacagtcgaatcctcgcgctggtactggcgctgggggccgttgcgtgtaccggtccgtctgacgagacggtcgaatcaaccggacctcaactggagcgacgatccgccgatgcgccgcgcgctgcgaccgaggcgcccgcgaacttcgcattcctgcgctatgcgatcagcgtcgatggtgacacgccggaggtctacctcggcttcacgcatccgctcgatcccgacaccgactacgaaccctatgtcgccgtgacgccgcagcgcccgatcgccctgtcggcatcggggcgctcgctgtgtgtcggcggtctgaccttcggtgacggccagagcctgacactgcgcgagggcctgccagccgcgaatggtgatgccctgctggtggacgaaaccgtcgagatcgatttcggcgaccgcccggcctttgttggcattgccggcgacggcgtgatcctgccccgccgtgatgccgatggtctggccatcgagacggtgaatgtcgatgcggtcgaactcgaagtctggcggatcactgaccgggcgctggccttccgctccatcacgaccggcttcaacgcggcccagggcgaatacaactgggttcccgaagaggagagcccgcacgccgtcggcgaacagatctggcagggccgcatggaaaccgctggcgcgccgaatacgccggtgacgactgttttcccgatcgccgaagccatcggaaccctctcgcccggcgcctacttcgtttcggtacgcgaagacagcgaagcggctgacgatgacgttccggcccgcgccgaacgctggctcgtgatcaccgatctggcgctgacggcctatcgcggtgcggatggtatcgatttcgtggtgcgctcgctgcagaccgcgatgccggaggccggtgtcgaggtgcagctgatcgcacactccaacgagatccttgccacggccatgacggattcgaacggccgtgcgcgttttgacgggccgctgacgcgcggcgagggtgccatggcaccgcgtctcctgaccgcctatggccgcaataatgatttcgcggtgctcgatttccagcgcaacccggtcgacctgtccggtcaggatatcggcggccgccagcgcccggacggtgcagacggctatgtctggctcgaccggggcatctaccggcccggcgagaccgtgcatgccggcgcgatggtacgtgatgccgaagccgtcgcgatttcggaccggcccgtcacgctgacggtctacgggccgaacggtatcgaagccgccgtgtcacgctttgagggcctgccgcaggccggatctgtcttctgggactatcatctgccggtggccgccgcgcgcggcgaatggcgcattgtcgcgacgatggacgggtatggcgatgtcggctcgacccggttctcggtcgaggatttcgttccgcaacgcatcgccctggaactcgacgccgatgacgagacgccgatccttcttggcggcaagcgtgaaatcgccgccaatgtccgcttcctctacggcgctccgggtgcaggactgccggtcgaggggcgtctgcggatcgagaccgacccgcgtcccttcgccgactatcccgggttcagcttcggccggcatgacgaacctttccgcgaccgtaccgaggatctgcctggcacggtggccgatggtgccggtgccgcgaccctgaccgtcagtgcgggcgagatcggtgccgatgccacccagccgctgcgcatccgggccgtcgtctccgccatcgaacccggcggccgggctgtcgccgatgatgtccgcattccctaccgtcctgcgccgctctatctcggcctgaagccgcaattcgaaggccgcgcagaacgtaatcgcgagagcgctttcgacgtgatcgcggtcgatgccggtggtgcgccggtcgcggccgatgtcgaatggcagttgatgcggatcgactgggattatgactggtaccgcaccgatggcgaacgctggcgctggcgccgcacccgccatgtcgtgccgatcgaggaaggtgtgctgtcgcttgatggtgagggcgccgatcccctgtccctgcgcgccctcgactggggcgactatcagcttgtcgtgaccgaccctgaaagcggcatgtccgccagcgcccagttctgggtcggctggggcgggtcttccgagccgggcgtcgaggcgccggaccgcgtcgccctgtcgggccctgaagagcctgtcgccgttggcggcaccgcaaccgtgtcgatccgtccgccctatcccggcgaggccgaggtggtgatcgccagcgaccgcgtgctggaaacccgttcggtcagcattcccgaaggcggtgtcgaactgtccttcaatgtcaccgaggactggggcgccggcgcctacgccatggtgtcggtctacacgccgcgcgacccggtcgaccgtccggccccgcgccgggctgtcgggattctgcacctgcccgtcgacatgtcggaccggacgctggagatcgatttcaacgcacccgaacgcattcatccgcgccagaccgtcgagctggaactggcgatcgatgggccggtgcgcagcggtgcctacgtctccgtggcggcggtcgatgagggcattctcgccctgacccgctttgcctcccccgatccgcaggcctggtatttcggcaagacggcgctcgatgtcgatctgcacgatgattatggccgcctgctcgatccgaaccagggcgccgccgcgcccgtgcgccagggtggcgaccagatcggcggtgccggtctgactgtcgtgccgacgcagaccgtggcgctgttcaccggccccgttgaagtggatcgcaatggccgcgcgaccgtgtccttcgacgtgcccgacttcaatggcgagttgcgcctcatggcggttgcctggagcggccgcgccgtcggtcaggcggcccagccgctgaccgtgcgcgacgatgtgccggccgaactgatcctgccgcgcttcctcgccccgggcgatcggtcgaccgcaacgctgacgatcgacaatatcgatggtgcgccgggcgcctatgccgtggcgatggatgccgaaccgccggtcagcatgtctgccaccgacacgatcgagctcgccgccggccagcgtatcgatcgccgttacggactttcgtccggcgatgtcggcgtgggctcggtggggctgtcggtcgaagggccggacgagtttgccgtcgcgcgcagctatcccatagaggtgcgttcggcctggctgccatcctcccgtgtcgagcgcggacgcgtcatgccgggtgacagctggcgcctgtccagcgatgttctggccggctatctgccgggcacgtccgatgtgacggtgagcttctcgccgacgccgctggacgaggcggcactgctgacggcgctcagccgctacccctatggctgtaccgagcagattaccagccgggcgcttcctctgctctacgccgatccactcgccagcgctgcgggcgaagacccggtcgagggcgcgcgggcacgcgtgcaggaggccattgcaacgctgctgtcacgccagtctgccgatggtgccatcggcctgtggcgtatcggcgaccgcggcttgcggccctgggtcggtgcctatgcgaccgacttcctggcgcgggccagggaggctggatataccgtgccggatgcggcactggaacgtgcctataccggccttgagcatattgcctccggcgagatgtggcgggtcaacggctatgacaccgagatccatcgctggcgcggtcagaccgatacgcccgagcgtctcaatgaccgttccgcggcctatgcgctctacgttctggcccgcgccgggcgggtcgaccggtcgcgcctgcgctacatgcatgacgagcgcctggaggcgatcgaaagcccgctggcccgggcacagatcggtgcggcgctttatctgatcggtgaccaggcccgtgcggtgagtgccttcgatgcggccgaggcggcgctgggttttgagaaccccggcaattactacatgtcgccgcggcgtgacctggccggtgttctggccctggccgctgaagccggccagcatgagcgtgtcgctcgcctggccgagcgtgtcggtcaggatctgccggaacccgcgcgtctcaacacacaggaaaaggccttcctgcttctcgccgcgaatgcgcttcgcgatggcggagaggagatcgcagtcgatacgcccgccgaggccgacggcccgctgcgctaccggctggaagccggcgagatcggtgagggggtcgagttccgcatgaccggcgatgcgccggcctgggtgacccagatcgctcacggccagaccgtcgaggcaccggatgtcgatgcccagggcctggtgatccagaagcggatccgccgcctcgatggttccgaggccgatctggagaacctggtccagggcgaccgcctgatcgtcgatcttgtcgtcgcgccgcgcgaggagcgcctgatcccggccatcgtggaagaccttctgccgccaggcttcgagatcgaggctgtcgtgcggccggaggatgccggcaataccggcgtctattcctggctcgacaatatccgcgagccgcgcgtggccgaagcgcgcgatgaccgcttcgtggcagcactcgacctgcgcaaccggcgggccgagcgtatcgcctatgtcgtgcgcgccgtgacgccgggcacctacacactgcccggtgccgtggtcgaggacatgtaccggccggacacgttcgggcgcagtgcgaccgggcgtgtcgtgatcgcaccgcgaggctgatgccgtgctgggactgccgcggatatactgggccggggtgatcgccctgaccctgtttgcggcggttctcgcggctgaccatgctctgccgccgcctgtcgaggcagggcatgacgtctccaccgtggttcgggacagggacgggcaggtgctgcgggcctttccggtcgctgacggccgctggcggcttgaagccgatctggacggcatcgatccggatttcgtcgaggccctgctggcctatgaggatgcgcgcttctaccagcattccggcgtcgatccgctggcgctggtgcgtgcggcgcgggacagcgccctggccggccgcatcgtctccggcggttccaccctgaccatgcaactcgcccgcctgatcgagccgcgcgagcggacggtcggcgccaagatcatccagatcctgcgggcctggcagctggagctgcgctattccaaacgcgaaatcctcgaactctatctcaccctggcgccttatggcggcaatctggagggcgtccgggcggccagctgggcttatttcgggcgcgagcccgacgcgctcaccatcgagcagatcgccctgctgatcgccttgccgcaatcaccggaagcgcgccgcccggatcgccgtccggacaatgcggtgctggcgcgtggacgcgtgctggaccgtctggcggaggtggggctggcgcgtgcggatgcgtctgccgatgctgctttcgatccggcgccgggacggcaggatttcccggcagatgcctggcacgcggccgatgccctgcgccgggcggccgggcccggggagacggatatcgtttccactctcgacatccacctccaggcgatgttgcaggaggagctggcactggcggcccgggaaaccggaccggacgtgcagttcgccgccatgctcgtggagacgcagacgcgcgccgtgcgggcgatggcgggttcggccagccgggcgcgtcccggcggctggatcgatctgacggaccggccgcggtctcccggctcgacgctgaaacccttcatctacggcatggcgttcgatgacggcctggctgccggcgggacacgcatttccgatctgccgcgccggtttgccggctaccggccggacaatttcgaccggcgttttcgcggcgatgtcacgattgccgaagccctgcagcactcgctgaacgtcccggccgtcacggccctggacggggtgggggcacgccgtttcaacgccgcgctgacctttgccggcgcccacccggaaaggccgcgcacggcgggggccgacagcgggctcgccgtggctctcggtggtgccgggctgaccctgcgacagctggctgtgctctatgcggccctgggcgatgagggtgtggcacgtccgttgcgctggcgcgaagacgatccggccgcagaagacggttatgccgtgctgggtgcggaatcggcggcggaagtgctcgacatcctgcgccgggcaccgcatccgggcggccgcatgccggcctcgctggcgcgcggggcgccggatatcgccttcaagacgggcacatcctacggcttccgggacgcctgggcggccggtgtgaccgggcgctataccctggtggtctggaccggacgggcagacggtgcgccgcgggagggcgtgaccggccgtgaaggcgcactgccgctgctgttccgcctggcggacgggctggagcggatcgagccgggttcggtgtcgcgcgcggaagaccgggcgccggtgccggaggttcccggcacgatggcgcaataccgcaccgacccggcgccgcacatcctcttcccgccggacggggccgaggtctggtcggaaggcgaggggcgcggctttgtcctggcggcccaggcgcgcggcgcgctggactggtatgccgatggcgaaccggtcgaccgcaatgcgctgggcgagccggtctgggtgccgccgggaccgggcttctatgccgttacggccgttgatgaatccggccggatggcgcagtcccgggtgcgtatccgcacgggcggctgagcagccnnggngccgncttgcnggcttgcgccgggcggcgtgaatggcaaagctgaaaccaactgatttggggagatttcatcatgctgcgatctgttctgccggcggcctctgccgcggcccttctgaccctgtctccggcgctcgcggacgacggaaactgggcgcttgtcgtgcatggcggggccggtgtgatcgagcgtgacagcatgacgccggagaccgatgccgcctatcgcgcagccatgcatgcggcgctggagcgtggcgaggcggtgctgtcgcagggcggcagcgcgctggatgcgatcgaggcggtgatccatggtctcgaggacgatcccatgttcaatgccggacgcggtgccgtgttcacggcggccgggcgcaatgagctcgacgcctcgatcatggacggggcgacccttcaggccggcgctgtcgcaggcgtcacacaggtgcgacatccgatcacccttgcgcgtacagtgatgcaacattcgcgtcacgtcatgttgcaaagcgagggcgcggagactttcgcgcgggagcaggggctggaaatggtcgagccggcctggttcttcaccgaacgccgctgggccgccgtggaacgttcgctcggccgcgacggtctggagattccgccgcgtccggacggcgcgccggatccggaaccggtccaggagggcctgctcgagcgcgatgcgctggaacaccgtttcggcacggtcggtgtggtcgcactggacgaggccggcaatatcgcggcgggcacctcgacgggcggcacgacggcgaagcgctggggccgggtcggcgacagcccgatcatcggcgcgggcacctatgccaataatgacagctgcggcgtctcggcgacgggcacgggcgagtatttcatccgcctgaccgtggccagccgcatctgtgcgctggtcgagatgcagggcctcaccctgcaggaagcgtccgaccaggtgatccagcaagagctgacggatctgggcggcgatggcggcattatcgcgctgacggctgagggcgatatcgcctggagtttcaacacgccgggcatgtaccgcgcccgcctgaccgaaggcggcgagccggtggtggcgatctacggcgacgaggaatgacggtgacgggcggcagcgccgcgccgcagatcacggtcaaccggctcttcgccacacccctgatcgaggtgcgtctgcccggcgccgaccggctggtcctggaactcaaacaggccatcctggcgcggcgggccgcctcgccgggcgtgcggcggtcgaacatccatggctggcattccgatatcgagatgctggactggggcggcgaggccgcgntcgagctggcgcgcgagacgatgcaggtctgcggccgtttcacctcggacgtgaangccgccaaaggccgntcgcgctatgaaatgggcatggagatgtgggcnaatgtctcgcccgccggcgcgtccaaccagatgcacgcccatcccggctccttctggtcggccagcttctatntcgacgatggcggcgatgccgaggacggtttcttcgtcgcccaggatccgcgcttcccgatgatccgcatgaccgcccccgacctcgtcttcaccgacgagaccggcgaaaaacagatgtcgcaattccgcgtccgtcccgagcccggcaagctggtcatcttcccgtcctggctcatgcacgccgtccgcccccacaagggcccgcgagagcggatctccgtggcgatgaatgtgctggccctgccggcggggcctccgccggaggggtaggggggaggggcgttagctcaagaaatgaaggcggcccccgaagggaccgcccattttgtggtctaaaccttgttaacggaaagaccgcatgtcctgatcagctaaaccggacggcgactctctagcgccttttcagatggttcgcaagctggttaactcctcaggttgagctgttgagggggggattatggtttggcgtttgggacttgatgtcggcacgaattccatcggatgggcagcagtcgaactgatggaagggcggccgtgcggcttgatcgacgccggggtaagaatcttttctgatggccgcaatccgaaggatggcgcctcactcgcggttcagcgccgggagccgcgatcggcccggcgcaaccgcgaccgctatctcaagcggcgcagcgaattcatggatcgcctcgttgaacatgggctgatgcctcgcgaggacagtgaacgcaaggcgctggaaaatctggacccatggatacttcgtgcccgcgggctggacgaaaaactgtcgctgcacgaactcggccgtgcgctattccatctccagcagcgccggggcttcaagtcgaaccgcaagaccgaccggggagatagcgacaagggcgccatagcagaggcaacccagcgcaccctcgaacggctcgaagaacagggtgcgcgtacgctgggacaactgctcggacggccccgtatggagtgggccgcacgcaatgcgagtttgcctgccggacaacgagaacctcagccggccacccgcgtcagcccgtacaggagcaaggggaagacggcttacgactattacccgacgcgcgccctgatccgcgacgagttcgattgcctttgggccagacagagagagtttcatggaaacgctctgagcgaagacgcgcgcatggccctggccgatacgctcttctatcagcggacgctgaaaccccaacctgttggcaagtgcacgctcgatcctgcacaggagcgcgcgccgaaggccctgcccagcgtgcagcggttgaggatttaccaggaagcaaaccaccttgccatcctgcggcttgacgcaggctccgagcccttgagccgcgagcagcgggacagggtggcggcgaaactgctctcgaccggcaaggtgacattcgactcgctgcgcaagacggtgctgaaactgcccggaaatgtgcggttcaatctggagagcgagaaacgcagacatctggacggtgacgcgaccgcggcagtgctggccgcgggaaagcgctggccggactggcgtagtttgccattgtccgatcaggatcgcatcgtggagcaattgctggaagtcgaagacgaagcacaattgatcgcgtggctttgcgacgaatacgggatggcgcgcgaaacagcgcaagcgctggccaacgcgcccctcccggacggccattcggcattctgccgcgaagttaccggcaagctgctcgcagagctcgaacgcgatgtcatcacctacgacaaggcggtggagcgtgcgggctatccctctcactcgcgtctggaccatgatggtgaggttctggaccggctgccatactacggcgaagtgctcggccggcacgttgccttcgggaccggagagcccgccgatccgccagaaaagcgtttcggcaagatcgccaatccgacggttcatgtggcgctgaaccagatccgcaaagtggtgaacgctctggtcgcccgcttcggtgcgccggacgagatcgtcgtcgagctggcgcgcgatctgcctctgtccggacagggcaggcgcgatcttgagcgccggcaaaaggaaaaccaggatgccaatgacaagcgccggacggagctggaggctctgggtgagcctgacagctatcagaaccgcctccggctgcgtctctgggaagaactgaacccgtccgacatcctcgatcgtcgctgtccgttcaccggcgagcagatatcggtcaaacgcctgttcaccgatgaggtggagatcgaacacatcttgccgcgctcgcgcacactggacgacagcccggccaacaagaccttgtcgatgcgtcgggcgaaccggcagaagcgggaacagtcaccttgggaagcgttcggccattctcccgatggctatgactgggacaatatcgctgcccgggctgccaatatgccgcccaacaaggcctggcggttcgcgcccgacgccatggagcgcttcgaaaacgaggagcgcgacttcatggcccgccagctgcacagcacgcaatacaccgcgcggctggcggcgaactatctggtctggctgatcggtgatccgggcaagctgtgcgtcacgccgggccgtctgaccagcgatctgcggcatcactgggggctgaactccattctggcgggacataatcttggtgaggcccgggccgccgacatcaagaagaaccggaacgatcatcgtcaccacgccattgatgccgtcgtcacggccctgaccgaccgctcgctgcttcagcgcatcgcgacggaggccggcaaggccgagcacgcaggggatgcccgcctcatacacgatcttgacgatccctggcccggcttccgtgatcgcgtgatggaagtcgtctcccggatcgtggtgtcgcacaaacccgatcacggagttcagggtgcgctgcataacgacacggcttacggtctggttggcaacgtcgaaaaatcgggaaagcgggacgtggttcaccgcgtaccgctcgcgacgctgaacaggcctgacaagctggatgcaatccgcgacgattgcctgaagaaggcgttccgcgcagccaccgaaggcttgagcggcaaggatttcgttgatgcgatagtcgccgctggcgaagacatgtcaccacctgtgcgcaaggtgcgtattgtggagagtctcagcgttattccgatccgcgacggcaatggccatgcctacaaggcgtacaagggggacggcaattactgttacgatatttttgccgggtcaaatgggaagtggaccggagaagtgatctcccgcttcgaggccaatgcgccggactttgacccctctggccgcgtcagccggaccggagaaccgcttgttatgaggattcgcgggaatgatctgctgcgcgtcgatcacgatgctccgggacaggtcatgcgggtggtcaagttctccaaagggcagattgttctcgccaatcacaacgaggctgggcgcctcaaggcgcgggacgcggacaagaccgatccgttcaactatctcactgtatcgccgagccgcctgaaggatatcggcgcgcagcagatttacgttgacccgtccggtcgcgcatttgcgaaccccgcaggttcgtcatgatcggccgcatcatcgaaatcgcgtcggacggagtccacatctccgtcgagcggggcttcatgaaggtgagcgaggagggcgaagaaaaaggccgtgttgcactcgacgacatttccgctctgattgtccacggtcatggcgcgaccttctccgccaatctcaccagccgcttggcagagcgcggttgtccgatggtcatctgcgataatcgtcatgcgccggtcgcactggtctggcccatgcaggggcattacgagcagggcttgcgcatggaggcacaggccgctgcgcccctgccgctgcgaaagcgactgtggcgtgatcncgtgaaggcgaaaatccttgcccaggccggagcgctggatgcggccggtgaaaagggtacgcccttgcgcgatctggcaaagcgggtgcgctccggcgacccggacaatctcgaggcgcaggcagcaaggcgctattggcggctgatgatgggctccgggttcaggcgcgagcgtgaccgggatggcgccaatgccttgttgaactacgcctatatgatcctgcgcgccggaacggcgcgatccatactcggggccggcctgcacccatccctgtccctgcatcataccagccgtggcaatgcgctgcgtctcgccgatgatgtgatggaacctttccgcccgtatgccgacctcgccgtgcgcaggcttgtggcagagggaatcgaaacactcgagccggcggtcaaggcgcggctttccggcatcatgacgctcgatctggagggaccacgtggcgcttcgccacttcagacctgtctcgatcgctgcgcagcctcgctcgcgcaggtcttccttggagagcggaaaacactggagttgccgggcgcggcactcgacctcaccctggcggcaccggccggaccgtgagccagctcagcgggtaccgcatcatgtggatgatggtcattttcgacctgccggtcatcgatccggaagaacggaaggcggcttcgaaattccgtcttcatctgaaggatctcggattcgagatggcgcagttttcagtctatgtccgccacacatccggtaaggaggctatcgagggctatatgaaaaaggtcgaagcggccttgcccgccgaaggcaaggtcgacattctgcagtttaccgacaagcagtatgagggaatcacctgtttccgcgggggcggccgaaagaatgccaaaaaagccccggaacagtttgaattgttctgatcatgagcccgactttgtctgccaaaatcaaaaaaaagccccggaaaaccggggcttgtatgaatatggagtttagctgatcaggaaatgcggtccaaccgcaactcacgccacccctacaagcacgtcagtctgagtttagctgatcaggaaatgcggtccaaccgcaactcagggcctcttgcgcggcggtttcggcgagtttagctgatcaggaaatgcggtccaaccgcaacggatctcgtcgggggtcatgccgcagcgatagtttagctgatcaggaaatgcggtccaaccgcaaccacgcacccgacccagaccgggcagcgaaaagtttagctgatcaggaaatgcggtccaaccgcaactgccaatcattctccgtcgccggactgcgaagtttagctgatcaggaaatgcggtccaaccgcaacgagatggaggccaagaaggccatgctcaatagtttagctgatcaggaaatgcggtccaaccgcaacgttcagagcatggcaaaaaacggacgccaaagtttagctgatcaggaaatgcggtccaaccgcaacggccgccgtacagcatgttcatgatcgtagagtttagctgatcaggaaatgcggtccaaccgcaactcgatgaagacgcggccgttgctggtgactagtttagctgatcaggaaatgcggtccaaccgcaactgcatgcggacgcgcaggccctggcgctttagtttagctgatcaggaaatgcggtccaaccgcaactctgcatgggagcgagcgtcgctagtctggagtttagctgatcaggaaatgcggtccaaccgcaacgtctcccctgacctcagccacataccccagagtttagctgatcaggaaatgcggtccaaccgcaactctaagcggccaggttcgtccggttctcacagtttagctgatcaggaaatgcggtccaaccgcaacgattcccattcgcgggtctgccggcggttcagtttagctgatcaggaaatgcggtccaaccgcaactgggatggcgatgagacgcggcacctagatagtttagctgatcaggaaatgcggtccaaccgcaaccaccggggagatcgatcgcgcgaactccaaagtttagctgatcaggaaatgcggtccaaccgcaacgcctgcggctggccggcaccggcggaaatgagtttagctgatcaggaaatgcggtccaaccgcaacggcatcgccattcatgaagagcaggtggcaagtttagctgatcaggaaatgcggtccaaccgcaacatacgccgccacgtcgatgccggacaccgccagtttagctgatcaggaaatgcggtccaaccgcaacttgagccgcggcacgggcacgccctgcttgagtttagctgatcaggaaatgcggtccaaccgcaacgggggcaccgctccccatccaggtcgcggcagtttagctgatcaggaaatgcggtccaaccgcaactctgggtggaggcacatcagacattgttgaagtttagctgatcaggaaatgcggtccaaccgcaactttgacctccttcatccacttcttcaggagagtttagctgatcaggaaatgcggtccaaccgcaactcgatcgggcgattgtgcgtgtcgtgggggagtttagctgatcaggaaatgcggtccaaccgcaacgggcaaatcgtatcctacaagtggcagtggagtttagctgatcaggaaatgcggtccaaccgcaactagtgccgcgcgggtttggtggtgtctggcagtttagctgatcaggaaatgcggtccaaccgcaactaatgatatgaccccatcatcagctcggtcagtttagctgatcaggaaatgcggtccaaccgcaactatggagctttgctgatgtcctcgcaccacagtttagctgatcaggaaatgcggtccaaccgcaacatgcggcccatttgcagcgccgtttcgaggagtttagctgatcaggaaatgcggtccaaccgcaacattgtggaagagcgcgatgggctccagcagagtttagctgatcaggaaatgcggtccaaccgcaactcaatgcaatggctggtctgggacaagggcagtttagctgatcaggaaatgcggtccaaccgcaaccaacagcgctgacatacgcgcgcgacatggagtttagctgatcaggaaatgcggtccaaccgcaacgctttacggtaggaggcgagagcggactcgagtttagctgatcaggaaatgcggtccaaccgcaactgtgtggcgcatcatcggacaaagccgcgtagtttagctgatcaggaaatgcggtccaaccgcaacgaacttgttaggtatctccgcgattggtcagtttagctgatcaggaaatgcggtccaaccgcaacggcatcgccattcatgaagagcaggtggcaagtttagctgatcaggaaatgcg

SEQ ID NO: 2496 - DNA, 15409 bp, synthetic construct
  source 1..15409: mol_type = other DNA
  misc_feature 1..15409: note = Synthetic
ccggcgagatcgccgatacgcaaagcccttatccgaacatgcttccctcgcctgaaaaattcaccagccgcgtcagcgcgttgggccttggggatggctgccgcatcgtcgtttacgacgccgccggtctgatcagcgcagcgcgcgtgtggtggatgtttcgttttttcggtcacaaggacgtcgccgtgctggacggtggcctgccaaaatggatccgtgaaggccgcgccattgatgacgcgcatgttaccccgggccgccgccactttacggcctgcatcaacaatcttctggtgcgcgataccgatcagattctggccaatctcgacagccatgacgaacaggtcgtcgatacgcgaagcgccgaacgtttccacggaaaagtgccggaatcccgtcccggccttcgcgccggccatatcccgggcagcctcaacctgccttacccggatattctcgaccccagggaaaaaacgctactgcccgccagtgaattgcaacgcaaattcaccgatgccgggattgaccttaagaaacccatcgtaaccagctgtggctctggggttacggcaggcgtcgtgacgttgggcctgcatttgctggggcttgaggacgtccccgtctatgacgggtcctggtccgaatggggcagccggaacgatttgccgatcgcaacctaagacgtgccaccggaggagggcttcggcaaaaaccggtgaacaatcgccgcccctgtcgcgtcgccccagacgttcaccgccgtgcggaagcggtcgaggaaccagtcaaccgcaagcaaaagcccaagcccctccaggggtaaccccacggccgtcaacacgatgaccatcgtcaccaggcctgcctcgggaatgccggcggcaccgatggcggcaagggtggcggtgatgaaaaccagactctgggcccccagcccaagatcgatgccataggcctgggcaatgaacatcgccgccgccgcctcataaagggcggtgccgttcatgttgaccgtgcttcccagcggcaggacgaagcggatcgctttttcgtccaccgcctgttcgcgcgcgcattccatcgtcaacggcagggtcgccgacgaactggccgtgccgaacgccgtcagaagcgcgcgcatcaggcccagcagatagcccaacccccggccgcttacaaagatcatcagcagcaccagaaagagaaaatggatcgtcagcccgctcaacacggtcacgacatgaaggccgacggcgctcacctcggctaaaaacgcatccccaccccctgcctttccaaggcgcgcagcgacaagggcgaagataccaaccggcgcaaaatacatcagccagatgaccaccttcatcaacgcttcgttcaacccgttgaaaagcccgatgacatgctcgccaaccggccccaacgttgtcagggcggcggaaagcaggatggaaaagaagatcaggggcagaagctgcatttctgcggcggacgcgatcaaattcggcgacacaatggaaagcaggatgtccgtaaagccgatttcccttttcgccgcgaccgcttcgggcagactttgtacttcgaagtcaagcccaacgccgggctgaatgagattgacgacgacaagcccgatgaccaccgccaccgccgtcgtgccgacaaagtaaagaatggtaatgccgccaatacgccccaattttcttatgtcgcccagggaagccacgccgctgatgacggcagcgacgatcaggggaataatcagcatcttcagcgcgttcagaaaaagttcgcccagccaggcaacggcaagcatgtcttctccccagaaccagccggtcacgacgccggcaagaacgccaagcacgatcagcagaagaagaatggtggcgtgagtatggggcatgcagcaccttcaatcctgtttccggcccatcatcttagaaagggcggcgttctccaagcccaaaagcggacgccttgaccggccctgccagtcactttacaagcggaaagatcgggcatcgcggtaaagtggacaggtttcagatgaaggaagacacgcgcatcgtcaatgccgggcggaacccggaagaaaatttcgggatcgtcaatccaccgatctatcgcgcctccaccgtgacctttccaagccttgcggcgcttgaatccttcgacaagcaccccttcgacggggtctattacggtcgccacggcacgccgacgacctttgcgctggaagccgccatcgcggagcttgaaggcggcgatcgcagcatcgcaatggcgtcaggccttgccgccatcgccgcatcgcttttcgccttcctcaaagcgggcgatcaccttctggttgccgacagcgtctatgggccgacacggtatttttgcgatcaggtgctggcgcgcttcggcgtcgaaacgacctattacgatccgcttataggcgccggcatcaaggatttgctgcggtcaaacacgaaggtcgtctttgtcgagcaacccggatcgctgaccttcgaagtgcaggacattcctgccatcgccaaagcagcccatgaaaaaggggccgtcgtcatcctggacaacagttgggcgacgccgctttacttcaagccgttcgaccatggcgttgacgtttcgattcaggcggcgacgaaatacatcgtcggccacgcagacgccatgcttggcgtcatcaccacccttgagccacatttcaagacggtccggcagacggtcgccagtctggggggctgttcggcacctgaagaatgctatctggccctgcgcggcctgcgcacgctccacatccgccttgaacggcatcagaaaacggcgcgcatcctctgcgaatggctgaaagagcgacgcgaagtggcgcgaattctttatccagcccttcccgaagatccgggccatgccatctggaaacgcgacttcaccggtgcgccggggcttttttccttcatcctcagggaccgtccgaaaaaagccatcgccgccatgctcgacggcatgaaactgttcgccatcgggtatagctggggcggctatgaaagcctgatcctccccatctacccagaaacaatccgaacggcgacgacctggaaagaagggcctgccatccgtatccatgcggggcttgaagacccggacgatttgattcaggacctcgacgaaggcttcaagcggctaaacgccgctggctagaccgcccctataattcgtagaaaaccgtaaaaatcgtccggacgtcaaaattctcatcgctggtaagcggtgcgccaaggccaaaacccagtttgatgtcttcgttttcaaaaggcgcgcttaaaaaaccaatagtggcgttgatcactgttttgttgtcggtgccttttgcgacccccttgccatcgaattcaagcaacggcgtgaatttcggcgagagcggataaagaaaagcgagattgaagccgatttcaagatcgacttcgtccgcttcttcttccgattggttcataggaatcccaaagctgagttgggccgtcatttgcaggccgcgcacttgccagcccgcattcagaaagggttccagctcccattcacggttgctgccgattgccttgctttcatccccggtgggtagcccgatttcaagcccaccgccgaaggcgagcccttctgccggaaagataaagggcgcgaattttagaccgatttcgattgtgccgaggttcgaacggcttggcccatcgcccggatctaaaaaagcgtatggcacgccaagttcaaacccaagccagtcattgaaagcgtattctgccgtcaacccaagggtgtgttccgtgcctgctgcccgattgcgaaagcggtgatcgaggcgaaggctcgtttccagcgttggcgtttcgccaataagaggatcaagaaaatgcagggattccggtgaaggctttcccttctcatgagcaatcgccggagtgcccgccaggagaagacatagaaaaaaccctgagacgtttaagaatttcatcgttcgcaactttcacatttctttcttctgccgcgaggcagaaaaaacgcttccagaaaacagtaaacttggaaaagctagagaatgtgcgtgcgtggcggtgcgcggcttggaggccgcgtcacaaggaagctgtctgtctgccgcaccgccggcagaaggaatgccagagccgtgaaagatggcaaggcaacgaaagaagctggaacgaatgcgagcggtgacggtccctgcagacagcaaagcgaacacgcaatcgaccccggttcgtgtggtgaagacggcccttccccgcctgcgtggcggaggccggaaccggagcaaattgtctgaagcgcgatcgcgagatcgccaggcatctcccccgttacaggggccgaagccggcctcgcctggcccgcaccggaaaggatgaggcaaaggatgccgaaaacggcaagggcgttaccgagcttattaaagatgggactgcgcatgggcgacgggttccttctttcgccccgccatataacccaaggcaccaaccggcacaagcaggcttgccgcaaagatcaggaaggccgtggcggcgattgatgggccggacggcgtgtcccaagtgaacgagccccagaccccgccaatgacggccgcgacgccaagaaaggcggcaagcacagccattgcctcagggttacggacaaagcgccgcgccgtcgccgccggaataatcagcatcgacgtaatcaaaaggatgcccacgatcttgatcgcaacgacaatcaccaacgcaatcagcatcatgaaacaaatctgcacccggcgcaccggcacgccctcgacccgggcaagttcttcgtggatcgtcatggcaaggagcggccgccagatcgccacaaggagggcaagggccgtgaagccgccgccatagatccagagaagatccacatcaccaacggcgaggatatcgccaaagagatagcccatcagatccacacgcaggccttcgagaaaggccagcccgaccagcccgaaggcaagcgccccatgggcaaaaatcccaagcagcgtgtcggtagccagtcgcttttgccgctcggcaaacgcaagcgccagggcaatggcaacggccaccgcaaaaataccaatcaacgcgtcgagatgcagcaagaagccaagtgccacaccaagaaaggcagaatgggccatggtgtcgccaaaataggccatccgccgccagaccacgaacacgcccagggggccggcgacaatggcaacgccaatgccagccaaaatcgcgcgcagcaaaagatcatccatggcttagacctccggtccgggggtcggccccccggtaggtggcacatcggaggccggtaaaacatttccggcctcgtcgtggacgtgatcgtggtgatgggtgtagacggcaaaacgcgtctcatcggccacttcgccaaacagggccagatattccggatgccggctgacggcttctggatggccggcacagcaaacgtggcggttcagacagataacctcgtccgtcgccgccatcaccaggtgcagatcatgggaaatcatcagcacggcacaaccctgcttgcggcggatatcgccgatcaaccggtagagttccgactggcccggcatatcgacgccctgaaccggttcgtcaaggacaagcaaattcggccttctgagaagggcgcgcgccaacagaacccggcgaagctcgccaccggaaaggctttgaatagggtgggtcaagatatccccggcgccgacgacggcaagcatctcgcggacatccgccgcccccctccccgccatcgccaaaaaccgtcggacggtaaggggcaggttcgggtccaccacaaaagtctggggcacgtagccgatgcggaggccgttggcctttttgattttgcccgcctcggggtcgataagaccgagaaggacccggacgagggttgtcttgccggagccgttcgggccaatgatcgtcacaatctcgcctttatggacggcaagatcgacgcgatccaacaccaaaagcccgccatggcgaagcgtcagcccctttgccgagatcagcacggggccctgcttcaaatcctgcccggtgccggacaggttctgcgatggctgtggtggtggtgcctccggcggcattttcaacgcctccggcgatacctcatggcggcaatcgcggcaaaacccatggacctcaattgtggcaccaaccagttgaaaatctttcgccctggccccggctgccaaagtcgtttcgaccgcccgattgtccagttccgtaaccttcccacaatcttcgcaaatcaaatgctggcttgggtggggccgcgacggatcgacgcagccgagataggcgttccgggattcaatccggtggattagcccctgctctctcagaaaatcgagggcgcggtaaaccgtcggcggccggacggacttgcccgcctcctggaggcggtcaagaatggcataagccccaaggggcatatggctgtcccagatcagttcaagaatctgacggcgaagcggtgtaaaacgcacaccgcgctgctggcaaaggtccgccgccaccgtcatcgcctctgtcatacagcggcgatgatcgtgcccatcgtcgggcggtggagcttttggccgcgtttcttgaccggacatcgacttcatcgcttctcgcataaaaaatctatatttttcagggaatagatgcctgttatgctataacataccttctatagaaacaaggcgaaggacgtcgtacagacgcgcctttaaagacgaaaaagtaactatatttcatgccgttattaaaagtctttaatgttctttctgttttggtcgtttttggcctagccatccaaccggtcaaagccacaccgcccgctgtgactgcgccacccgccgtggtcgcaccacccgctgtggccgtcagcatcccccccctgcattcccttgtcgccgccgtcatggaggggatcggaaaaccggctcttctcagccccggcggcacctcccctcaccgcgcgatgctacgcccatcgaccgccaggcacctcgcagaggcagatcttgtcttctgggtcgggccggaactggagaattttctggaaacgcccttaaagcgtctgtcggaaaaatctggggccaaaatcatagcccttctgcacgcaccgggcatattccgccgtgaggcgaggcatctgcatcgggataccgacagcgaatctcacaatccggacgcaaattaccaattggacccccatttctggctcgacccggaaaacgcaatccggattgtggcaatcgtcgccgaacagcttggtgaagcgaacccggaacggacggccatctatcggcaaaatcgcgacaggacaatcgcaaggctgcgcgccctggacctggaaatacggcgaaagcttgcccccctcgccggcatcccgtacctcgtttttcacgattcctatgcctatcttgaagggcgttatgacctcggcccgtcgcaagccgtcgccattgatcccgaacgccgggccggcccacgccggatcgtggcacttcgcaggaaaatcaccgaaaacgcctttcgctgccttttccacgaacctcaattcaccgcgcctatccttgcgcgcttgcgtgagggatcggatatttccaccgcgccgctggacccgctgggaagtggtctgacaccaagcccagacctttacttccagatgatgcaaacaaacgccacgtcgctgcaaaattgcctgatgcccgcgcgggacggttgacagggcgcgcccctttagcgcatccctcaagaagacagaacgaacaaacgccgcctaggagaacaccgatgccaagcgcatgggacgatgctttgccagaaattctggaaaccgtccttttcgatcaaaacggtcttgtcccggcaatcgcccaacaagacggcacgggcgaggttctgatgatggcgtggatgaaccgcgaagcgatcaaaaagacccttgcgaccggccaggtccattattggtcgcgatcccgcaagcaattgtggcgaaagggcgagtcatccgggcaaacccagacgctgatcgactttcgtctggattgcgacggcgatacggtgcttgtaaccgtcgaacaaaaaggggtggcctgccataccggcaggcaaagttgttttttccgcgcggtgcgcgggggaaaactcgaaaatgtggaagatgtccttgtcgatccgaagaacctttacaaaagctagaatgcaaaagggcatcttttgcgtttttgcactcgtggtgctgtgcattcccggcacgcttctcgcggaagcaccagaaagagtgataacgccggttaccgtttacgcgcccacaagccttaccaacgtgctgcaagtcgtttccgagcgttttgctgcaaagggtttgggggcggtgctggtcacctttgcctccagtgccgagcttgagaagcgggtttcaaaaggtgcgccggttgatcttctgattacggaccggccggagtggaaagaggctcttgccgcttacggcatcacgcccaccggcaaaacctcggaaatacgtggcaacgggctggttttcatcacccgcaagaacagttccattcagctcggcattccgcttggcctccacatcacgaagaacctgaaagaccggacgatcaccatcggcgagccggacaacgtgcccgccggaagctatgcccgcgaggcgctttcgcagcttgaactgtgggaagcgttgacgcccaactttcttttcgcaagcgacgtgcgcgaagcccttaccctggtcgaacgcggccaggcggatgccggcatcgtctatgcgacggacgcgctgatcagcgaccgggtgaaagtgatcgccgtcatcccggcaacgacccatgcgcccatccgttaccaccttgttcccattggcacacgcacagaaccggcggtgacgaatttctaccactttctgcgcgagccggaagtcgagaaaatctttaaacgttttggctttcacccgagctaggccggacgtgcgcgcgccgctatactgaccccttgggatgcatggtcggaggcaaaaatccggtgcgcgcaagcaaggttttgtttttctttctggcctttgtttttcttgccgcaaggtcggcggatgcctgttcgcttccccaaggcaagttttcttatgacatcctgaacgacaatacccccatcggcggcgcatggatcgacttcgaacgcgagggcacgcgcacgaaagtttcgaccctcatcaaggtgaaggtcacgcttctttatctgatcccgctgctgaattaccgccatcaatccgaagaaatctgggagacggatgtttttcagagctttgatggaaaaaccgtcgacaaccgccgcgaagtcgccattcgcatcaaaccgaacagtcatggaccgaacggacagagtttgaaggtgaaccggaatggcagcctttcagagattgaaacgccgctgttttctcaagttatctggtgcaaggaaaccctgaggcatgcccagcttttcagccccctaaaggggcgcatgaaggccattcgcaccgaggatatgggccaagccgccatcaccatccggggacagacgcatcaggccaaggccttcgcgctcatccagatgcgcaagggcaaacccgtgcgtaccgacctctggtatggcgaagacggggtgatcctgaaggcccgcttcccgtcgaaacgcggcaccatcgttaccttccttcggcattagacaccggaaacaggaaaacccgaaaaaagaaaggcggccccgaaggaccgcctattttgtgaatctttcatcttgttaacggaaagacctcgtttcctagtcagctaaaccagtccctgatttaaccacctttacccgcattcgcgcaaggggtttaatcaaccactggttgcggcttgagagggaggaaagtcatggcatggcgtttgggactggatctggggacgaattcactcggctgggcggcgcttaaactagacggtcaaggccggccaaccggtttgatcgcatcgggcgtgcgcatcttttcggacgggcgcaatccaaaagacaagcagtcgctcgccgtcatgcgtcggctgccccgccagcaacgcaggcggcgtgaccgttatctcaagcggcgctctgaattcatggagcgcctgatcgaacacggcctgatgccgaaggacccggctgaacgaaagcggctcgaaaagttcgacccctggtacttgcgtgtacgcggccttgacgagaaactttccctccacgaactcggccgggcgctgttccaccttcagcaacgccgaggcttcaagtcgaaccgcaagacagacaagggcgccgaggatgaaaagggcaagatcaaatctgcggcggaaaacgtaaaaacggtaatgaaaaacgcgggcgcgcgaacccttggcgaatatctcgccaaaccgcgcgttaaaaatccgaaagatttcgaaactcgcaaagccgctcgcaaagctgctcacgaagccgcacaggaacacccggttcgggcgcggcttcagggttccggcgccaaggcattttacgacttttaccccacccgtgacatgatcgcgcaagagtttgacacgttgtggaaagcgcagaaaaaatttcatgacgcggcgctgtccgatgccgcgcgggatgcgcttcgcaacacccttctctttcagcggaagttaaaatcccagccggtcggcaaatgttcgcttgatccttccgagaaacgcgcgccgcatgccctgccctcggtccagcgcatccgtatctatcaggaggttaatcatctgaacgtgcggctgcccggcgaggctgagcgcaacctgaccctggaggaacgtgattctcttgtcgcatgggccctcgcacatcagaagcttgaatttcagaaggcgcgcaagctcttgaaactgccggacgaggcgcgtttcaatctggaaagcgaacgccgcaagcatctcgacggcgacaagaccgccgccgtcctcgccaacaataatcgctggggaccggggtggcgaaaaattccggccgaggcccaggaagagatcgtcaagcgtctgctcgaagaggaaaacgaaaaaacactcgttgactggcttatggccgaacatagcctttccgccgaagccgccgagaaggtcgccaacgcgcccttgccggccggacatgggcgactgggccgcaccgccacgcgccgggttctggccgaactggaacgcgccgtgattacctatgacgccgccaaggaggcggcgggctatgacgaccttgatttcgacggcgaggtgttcgacgcgctgccctattacggcgaggtgttggaacgtcatgtcgcgttcggcacgggcgagcccgccgacttgcctgaaaagcgcgtcggcaagatcgccaacccgaccgtgcatgtcgcgctcaaccagcttcggcgtgtcatcaatacgttgataaaagcgttgataaaacgttatggccgcccgaccgaaatcgtggtcgaactcgcccgcaatctgccgctgtccgccaagggtaaatcggaactcgaacgacagcaaagggacaaccaggatgccaacgacaagcgccgcgccatccttgaagaacagaaactatccgatacttacgaaaaccgcctgcgcctgcgtctttgggaggagctaaacccggctaatccgctcacccggcgttgcccctataccggcgaacagatcggcatcgagcggctgttcaccgatgaagtggagatcgatcacattttgccgttctcgcgcacccttgacgatggcatcggcaacaaaaccgtctcgatgcgcatcgccaatcgcgtcaaggggcagaaaacaccttatgaagcctttgcttcctcgccagaaggtttcgactggccagcaataaaggcgcgggccgccaatctaccaaataacaaaagctggcgctttgggccggacgccatggcgcgctatgacaacgaagagcgggacttcctcgcccgccagcttaacgagacgcgctacctctccctcctggccaagacctaccttctacgcacgggcgcggatgtctgggtgacgccgggccggttgacagccgatctgcgctggacctgggggcttaattcggtgctcgcgggtcacaatctggaagaggcggcggacccggcaaagaaccgcaacgaccaccgccaccatgccatcgatgccatcgtcgtggcgctgaccgaccgtggcctgctgcaacgcgtcgccacggaagcggcacgtgcggaagaaaatttcgacagacgcctgctggcagggctgaaggagccatggcggaatttccgcgaagatgtccggacctccatcaaccgcatcaccatttcccacaaaccggaccacggcgtagaaggcgcgctgcatgaggaaacggcctacgggatcgttcgggatcctctaacgggggaaccgcggctcgcaacccgcaagcccgtgacttcgctcacggcggcggaagtcaagcgcatcggcgatcttgggatccgcaagacattgatggaacgcaccaaaggacttgaaaaaaaggagcttcaggccgaactcgaacgctgcgtcaaggaaaccggtacacaccgtgtgcgcgtccataaggtcgaggcggactacaaggtcatccgccacgggaagaatggagaatacaaggccgtcatccccggcgagaactattgtatcgatatcatcgaaacgccggacgggaagtggcgcggctatggcgtgacgcggttcgatgcaaaccggaaggactggacgcccccatggaaacgcgaccaccccgatgcgcgcccgatcatgcgggtccggaagaacgatctgctccggcttgagaaggacggacgcgagcaggtgatgcgggtcatccgcctcgcaccaagtgcgaattgtttctacctagccttgcataaagaaggaggggaactggaaaaacgccataaggattcagaggattcctttcgttgggatttcgcgaacttcagcaaactcaaagaccgctgcgcgcgcctcgtccacgtcgatcccgccgggcgcgtcttcgatccggggccgccccgatgatcgggcgcatcgtcgaggtggcgaccgatggcgtgcacctctcgaccgaccgcgggttcatgaaactgtccagagagcgcgagccccttggccaggtggcgctcgacgacatcgccgcgctggtcgtccacggccatggggcaactttttcggccaatcttgccgcccggctcgccgcgcgcggcgcccccatgattatctgcggatcaaaccatgcgccggttgcctttctcctgcccatcgacggacattttgaacagggcctgcgcatacaggcccaggcggaagcctcaaagcctgtgcacaagcgcctctggcgcgatctcgtcaaggctaagattactgcccaggcggatgccctggacgttgccggcgagcggcccggcgcgctgcgcagcctcgctcgccaggtacgctcgggcgacccggacaacatcgaggcgcgggcggcacggcgctattggccattgatgatgggacaagccttcaagcgcgaccgtggccgtggcggcaccaacgcgttcctgaactatggctatatggtgctgcgcgcggcgacggcgcgctccatcctcgccgccggtctgcatccgtcgctttccattcatcacaaaagccggggggaagccctgcgccttgccgatgacctcatggagcccttccgccctttcgtcgatcttgcagcccggcggcttgcggcagaggggcgcgaggcactggaccgcgacgccaaggcggcgcttgccgccgtgacgacaatggaccttcaggggccgcagggcgcctcgcccctgcaaacctgcctcgaccgcctggctttgtcgctggcgcaggtctatctcggcgaacgcaaaaagctggaattccccgggtcaccgctgccgctttcggcgacggcatcgtaatgcccctatgagccacctcagcggatatcggatcatgtggataatggtgctgttcgacctgcccgtgatcgagcctaaagagcgcaaggccgccacggattttcggaattttttaaaggatcaggggttcgaaatggcccaattctccgtctatgtgcgctatacttccggcaaggaggcggtagagacgctgaccaaaaaggttgaatccgtgctgccatccgggggcaaggtggatatcctgcaattcaccgacaaacaatatgagaacattgtcagttttcgagggcaaagccgtgaaccacaacgaaaaaacccggaacaactcgtgtttttctgaactctgcgcgcctgtttgccattgccgaggctggttttttgcccatcagaacaagaaaaacgcccttgaaatcaatcgcttgaccaagggcgtagtttagctgattaggaaacgcggtccaaccgcaacccatggattggctccttgtctgtcagatggagtttagctgattaggaaacgcggtccaaccgcaactttttcggtcatgtcggtgggttccttttcagtttagctgattaggaaacgcggtccaaccgcaacgaagccaacaccgcagctattctttcttgaagtttagctgattaggaaacgcggtccaaccgcaacataagaaagccacgctcgcgcggatactgaagtttagctgattaggaaacgcggtccaaccgcaaccggttgacgatcccagcgcgcgcgcaaaaaagtttagctgattaggaaacgcggtccaaccgcaacctttgtggcgcgcggtcatggtgacgacgcagtttagctgattaggaaacgcggtccaaccgcaacgggtttcttcgcgctgcgtggcaaaagacgagtttagctgattaggaaacgcggtccaaccgcaacaatccgtcaaaccatatatttacattccgaagtttagctgattaggaaacgcggtccaaccgcaaccttttggaagggcctcgccataggcttctaagtttagctgattaggaaacgcggtccaaccgcaactgcggagaaaatgggatgcgtggcttaactagtttagctgattaggaaacgcggtccaaccgcaactttggggcggcgcggcggttgcgttggcggagtttagctgattaggaaacgcggtccaaccgcaactagagacacactcacacatcgctagagtaaagtttagctgattaggaaacgcggtccaaccgcaacccagttatagaacgccagcggccagtccttagtttagctgattaggaaacgcggtccaaccgc

SEQ ID NO: 2497 - DNA, 8765 bp, synthetic construct
  source 1..8765: mol_type = other DNA
  misc_feature 1..8765: note = Synthetic
ggatcgaactgttcgcggccaccaccgccgtccccgccgcggtcccgccaagcgtggtgatgcgttcggcgatctcgtccacgtgccccatcacagcgccgtgaattcggtcgaacaactcatgcagcgcaatgaaattcggccccttgacattccagtgcgcctgcttcatctgcgtcgacagatcgaccgcattggccagccgctcattgagaaggccgatcatcgcggctttggcatcgtcggggagatcgattttggaagggtgcaggtgttgagacatcgggaccacctcgtctgagcggtattggttttatagccctattccggggcaaactcaagcggcgccatggaggcgcaggtcgggctgcgttccgtgcttccagccgaagcggcgagtcgcggacgcaacggtattttgcgctggtcccacgaatcgcccgcacgctgtcgggcatgatgacaggacgcatgaagagcatcgggtgggtcttctcagattccgtgagcgatgccgaggatgccccaagggccggaacaggtccgggcatggacacgcgacgtttcatcccgggcaactgaaggttgagcagcgcgcccggcttcaggatgcgaccgtgcttgaggagcggatacgtgaaccggccttttcttgcatgcgcgaaaccaaagttgcgaacggggtcaggatttggttcgatgtgtgcgaacattctcctcaacccctcattcatcggaggactgaatcatgtcatcgtactctcggtacgcgatgctgctgtgcggcgcaatgaccgtcggcggcgctgccggacccgccctggcccagatcccgcaggcgcagcaaatcgaggaagtggtggtcaccggtacacggctgcgggaccccaacgtgatcagttcctcccaaatcacgacggtgcaggtcgaagacatctcggaccgcggcatcacccgtgtcgaggactacctgaacgatctgccccagatctcgccgggccaggccatcacggcgtccaacggctcgaccggaaccgcgacggtgaacgtgcgcaacctcggctgcgagcgcacactggtcctgctcaacggtcagcggctggctccgggcacgaccggcggcggcaactgcgccgacctgaacgccatacccacgctgctgctggagcgggtggaagtgctcacgggcggggcctcctcggtgtacggctccgacgcggtggccggcgtggtcaacttcattctcgacgacgatttcgaaggcttcaaggccaactacctgcacagcttctaccagcacgacaacgacaatcgcgagttgcgcgacctggtcagccgccacgactaccggttggcggacgagaacgtgaccgccggggaaaccggcaagctcgccgccgccttcggcggctcgatattcgatggtcgcggacacattaccgcctttgccgaaaggaccgatacgtcccctatcctgcagggcgactacgacatctcggcgtgcgcgctgaccggcggcaggagcgcctgtggcggctcctcgaccattccgccgggccggtgggcggacttcggcgggtacaaggcactcggatacgtcaacaccgcggacccgtcgatcacgggactcgatctgaaggtattgggcgatgaattcgtgccccgggacggacagacgttcaactacaacccgacgaatttcttccagcggccggacgagcgattgaacgccggattcttcggccggttcgaagtcagcgacaacattgaggggtacgccagcatgcgctcgatgcaatccgaatccaacgcgcagattgcgtattccggaacgttcggcaacatcacctcgataccctgctacaaccccttgttgtcggcgcagcagcacgagaccgtctgcggcaattgggcccggatgggcggcgatcacgcgccggacttcgccagcgccgccgaagcgctcgcttacatctcctcgctcgatattgcggtcggcgacggcgacatcatcgggtacagggcgcccctgtattccttgaagcgaaatgtcgaaggcggtccacgacaggacgtcacgacgttcatcaacgtcgtatcgagtgtcggcgtgcgcggcgatatcgcggccggctggacatacgacgtctcctaccagttgtccgatatcgaatacaccagcgagtaccgcaacgacctgtcggtcattgcgatgaatcgtgcgatcgacgtgatcagcgtcaacggaacgcccacttgcgtgaccgcggtcaacggcaccgatcctgagtgcattccctacaacctgttcaagggcggcctgcccggcgacggcggcatccagggcgtgatcgacggcggggccgaattgcagcgctacatcgccaattccaccttcgtgcgcgggaccgggaggcaaagcaccgttcaggcggtggcttccggcgagttcccgtttacgcttccccgcgccccgagcccggtttccgtcgccctcggtatcgagagcaaggaactgagcacggacttccggcccgaccgtcccagccgcacgggcgaccgctccggttccggcggcgccaccttgcccctggccggcggatacgacgtcagcgagtacttcgtcgaactgggtatccccgtgctggctgacctcagcttcgatgccggttaccgctacgcggactactcgaccgggcactcgaccaacacctacaagctgggcgctttttggcgcgtttccgacgacgtggcgctgcgcggctcgttccagtccgcgatccgccacgccaacctgttcgagctgttccgcgcgcagggcttcgatttggtggaccttgccgacgatccgtgcggattgtcaatgagcgcaagccaggccgcgtgcgccaacaccgggttggccgagaacctgtacggaacggatctgaaatcgccggcggaccagtacaacattctggagggcggcaacgccatggttgcgccggaggaatccgcgtcgtttaccgccggtctcgtcgtcacccccgggttcgtcgacgggctgacggtgaccctggactacttcgacatccgcgtggagcaggggatcgactcgatacccgccgccaccgcgctgcagaagtgtctggataccggcattgccgcgttctgcaacctgatcaaccgccacccggtcaacggttcgctgtggattcagggcggcttcatctcggcccagaccacgaatctcagcgaggagaacgttgaaggtgtcgacatcattttcgcctacgacctcgacacgccgatgggtccggtggagctgcggggcgtttccacgtacgtcatgacgtcggatctgatcgagctgcccggcgaggcggcgctggagtgcgccggcttctggggtgcggcctgcgggaagaatccgcaacccagattcagcggcaactacaaggcgacgctctacacgccggccgatgttcgggttgcgcttgcgctgcggtatctcggcggctccgacgatctgggcgtcaatgacatcgacttcgattcggagacgtactgggatctgacggcgcaatggagtgccaacggcaattacatcgtgaccggaggcatcgccaacctgctcgattcggacccccaggtcagttccgacgcaggcaccgcacccggcaacggcaacacgttcccggcgtttttcgatgcgctgggccaccatgtgtttgtcaacctgggcgtcagcttctgaggataaactactcggcagagcgctcgtgcgacaagcagggcaacgaacgaaaggcccaacccagtcccggtcgttttccggacagatcagccgcaagacattccgcggtgtccccgcggaccgtgcccgggatggtgacgcgaacagttacgtttaccgcaggagagagccgtaacaggtcccgaaaggccgacctgagccgtccggatgtcgagtcggggacgccgtcttcccgaccgaacgatttcagactgctcgatcgtcggcgatcggctggccgtcggttcgcggcagctccgccacgcaagcctgttcctgagccgtggacgccctgtccagcgccttgttgcgatgcggaatgcggcctgggtgggccacgacgtcgcggtgctcgcgggcaaaccaggtacggtgatgctcgtgggcggtgtcgtgctggcgaatgggttggcgtcggggagcttgacaccggtgctgtctgaggcaaaccgccggctccatgatcgccgcctacaacctcattctgggtgtgccgctgcccgcagtgggccgcttgctggcgcgctccgaacggcgctggcacacggttgccggcctggcgtgcgtaatggcggccactgtcctgttgctgaacgcactgctgtaagtgttctggccgatgccgtaagggcgcggagagaaagcggttcatgctccaaaaccatgcggattcggccaagcagaatgcctcgttcgattggcgttttcgtcgcgtcgcggcaagtcaccctgcgagtgattggcttggcgttttgtcccgggcatcaccagattgaaccggacgagacggcaccggcgaacatcgcgacgaaaaaggggtgccccgaaggccaccccttttattttgtggatctttcaccttgttaacggaaagacacacgattcccgatcagctaaatcagagagaccgaagtatatcgccagcaacccgggccatcaaacgctacgctagaatggcatttcctatactggcgagggaaccaaatgaattggcgcctcggcttgggtattggtacccaatccatcggctgggcggcgttgtcgctggcgcaggagccgtgccgcagaaggcccgtacgtctcgagtgcgccggcgtgcggattttctccgatggccgcgacccgaaggaccgccaatccaatgcggtcgcgcgacgcctggcgcgccaggaccgcaggatgcgcgaccgctacctgaaacgccgcggccgtttcatgaacgcgctgatccggcacgggttgatgccggaggattcggatgcaaggaagcagctggaaagacttgacccgtgggtgctgcggctcaggggtctggatgaagggttgacgatgcacgagtttggccgcgcgctctttcatctgcagcagcgccgcggtttcaggtccaaccgcaggaccgcaaggaaagccgtcgaggagaccggcaagatcaagtccgccgccaccgcgctgcgacagaaaatggatgaaagcggtgcgcgcaccccgggcgaattcctggcgcggcgccggctaaggaacggccgtgcggatcaccatgcagccgccaaccatccggttcgcgtccggctgataggaaccggcgccagggctgcctacaacttctaccccacccgtgaattggtagaggaagaattccacgccctgtggaacgcacaacgtcgatgccacggtgatttgctgacggacgccgcccgagatgagttgcacgatattctcttcttccagcgcaagctgaagccgcaaccggtggtaaggtgtgtcctgaatccttccgaaaaacgcgccccccgggccttgccatccatgcagaggctgcgcatctaccgggaagtcaatcaccttcgcattcagatgccgggccgggccgcgcgcaaattgacacgcgccgagcgcgatacgctggtccatcgggcgctgcacgtaagaaaactcaactttgccaccgcgcacaatcttctccacatgccgccgggctcgaagttcattctccagggcgcctcgcgcaagcacctcgacggggaccagacagcggccgcgctcgccgccagaggatcgtgggggcccgggtggcgcaggttgtccgcttcggaacaggagcagattgtggagaagcttctggccgagcagaacgaatcgaaacttcgcgactggctgatcgggcagtacggactttcgtccgacacagccgatgcggtcatggccgcgcacttgccggaggggcacgccctgcttggccgaaacaccgccgctcgcgtgctgaaagagctggaaccggaagtcgtcacgtacgatcgggccgtgcgcgaagcgggatttgacgaacgttcgccgctggatttcgatggcgaggtcctggacaagcttccctactacggcgaagttcttcagacccatgtggcgtatggttcgggggacccgtccgacaacccggaaaagcgtcacggcaggctcggcaatcccacggtgcatgtcgcgctcaaccagcttcgccgcctggtgaacgaactcatcgaccggttcggccgaccggacgaaatcgtcgtggaactggcgcgagatttgcccctgtcggccagaggcaaggcgaagctgaaccgcatggatcgacagaatcgagcagccaacgaccggcgccgggacacactccgggaactgggcgttgccgatacctacgagaaccgtttgcggttgcggctttgggaagaactcaatcccggcaatccgtcggaccggcgttgtccgtatacgggcgaacaaatcagccgcaaccgggttttttccggtgacgtgaagatcgggcacattcttccgttctcccgcacactggataacggcgtcgccaacaagacgctgtccctggggcaggcaatccggttcaaggggcgccgcaccccctacgaggcgtttgccgcgtcgcccgccggatacgactggcaggcaatagccgcgcgcgccgccgccatgcccggcagcaagtcgtggcgcttcgcaccggacgccatgcaacgcttcggggacgaggagcgggattttctggatcgccagctcgacgatcccaggtacttgagccgaatctttagacgctacttgatgcacacgggcgccgatgtccgggtcacgccgggccgattgacatcggacttgcgccgggccctgggccttgattcggtcctgaaacgagatgacagggaccaagcggccggtgcggcgaagaaccggctcgaccacaggcgccacgctgtggatgccgtcgtggtgggcctgaccgaccgtgcgcttctgaaccgtgtggcgacccttgccggcaaggccggggagccacttgacgatcgccctctggccggtctgccaactccgtggccgcgttttcgcgcctctgtgcgggaatgcatcgaaagcatcgtcgtcagtcacaaacccgaccacggcacccagggtgcgtttcacaacgacaccgcgtacggggtcgtgcatgccccggacgagctgggacgttcgaaagtcgttcaccgcgtaccgctgtcccgactcaggcccggacaaatcgattcgattagagaccccgtgatacgggatcgcctgtctgcagccgcaacggggctcaccggagcggcgttcacccgggaattgatcgatgcaggcgagaccctcgatccgcctgtcagacgagtgcgaatctgcgaaacgatgcgtgtcatcccgaccgtgatcgatgccgacggacgcgttctcaaagcctacaagggcaatgccaactattgctacgacatcttccgcgaggacggcgggcaatggggcggtcgcgtggtgtcccggttccaggccaatcgcggcgaattcaatcccgatgaccgggaaacgccggacggcacgcctctgctcatgaggctgcgagtcaacgacatgatcgcgaccggtcgcggaggcgaaaggcgcatcctgcgcatcgtcaagctcagcagggggcaggtcaccctggcggatcatttcgaggccggctcgttgaagtcccgtcacaccgacaggaacgacccgttcaggtacctgttggcttcaccgggccgcctgcaggcgttgaacgcgcgcgcggttcacgtcacggcatcggggcggttgttcgaccccgggccgcccgcatgatcggacgcatcgtcgaggtcactgctgacgcggcgcaccaggcggtgtcgggagccggcaactcctcaccgggatcgttttcttgttgcaaccaccggaagaaacccaccgtgttatcggcggttcgtccgcaggcaaaggctgagctgattgggaatcgcgatcctaccgcaacatgcagggttccatcggcgattcgattgggagtatagccgatcgcctattcagatcctggcgtaaccgttccacaagtccagccgattcggaatcgcggtcccagcgcatcacgatctcctccccacgatctgccgaatcgaccggttcgtcgcgccaggggtttctgatagcattcgctcatggaggccaacgattggaccaacggttgaaaccattgctgaatcgccctcgtccgcgcgaacgtcgcttcggacgggtctcggtttcaatccgcgttatgtgcggaccgattgacaaccggttacgtttctcgtcttgaaccggcgagatcggccatacagtccaatgaccgccggcaggcccggtgccctgccccatccggacaggccgaccggaattgtcggaatcgaatcgcgcgtcggcagggaatgccgcggattcgcactcgaagaacccccattcttcttgatcatcgtcacggaggcgtgacagccatgcgcgttttggtcgtgggcggtgcgggttacatcggctcgcacatggtcaagttcttgggcgaagcgggcgttgaggtcacgacattggacaatctgtcgtccggaaggcggcgtgccgtcacgcatggagacgttgtcgagggcgaactgggcgagcgggcactgccggatcg

SEQ ID NO: 2498 - DNA, 5358 bp, synthetic construct
  misc_feature 1..5358: note = Synthetic
  source 1..5358: mol_type = other DNA
aactttctggggtctttgtgccccagcctcattgaagcgacgacaatcagccctcctcggagaaaatggttgatagaaagtaaaagttgttgtacagttgtaatcaggcgacggtttgaagttgggcacctctaaaaacagggtttttaggggtatattcgccttgtgggcctacaagcttggtgctcctcccaccatgtcgccttcagacggttgatggtcgatgatgacagaccttgtgcagcgggcctaacaagcgcggacagcgcctcgccgaaatcgcccgtcgaaatgcccttgaggtacacagccaaggctcaaactcttccactgacctcgccttacgcaaatacagcggaacctgatcttcgttccatcagggttcgactcgcggtcgcgcacgcgcggcatcacaacaggcgccgcaccgattcccgtcatcacacagcgctcaggcaaaaaaccatgccgcaccaaacgctggcagctctttttgtccagaaggtgagtatgcccagcaatgaacgccgacacttcagcttgaaccgccacgccaagcagcttgcttggctccggcccggatcacctcagtcaggggtatgatacaaagagggcgggattccagaggaaccccgcccaattttgtggtcttaaaccttgttattggaaagaccgcgtctctcaatcagctataaggagactcgaccaagctacacgtctcaatttcagattcaacccacaaattgcagtttctcaggggtgatgtataatcggtgctttcaatcgacagacaggagcaggctatggcgtacagattgggcattgatatgggaaccaattccatcggctgggcggttcttgagcttgaaaacggaaccgtgagcgggcttgtggatgcgggtgtgcgcattttctctgacggacgcaaccccaaggatggcgcctccctcgctgcacagcggcgacagccacgcagcgcccggcgcaatcgggatcgcaaactggtgcgcaagcgacaactgttgaccgctctcaaggactacggcttgttgccccgtgatgatgagcaggccaaaagcctgcaacatctcgatccctggattctcagagccaaagggttggatgccccgctcactccgtatgagctgggacgcgcgctttttcaccttcagcaaagacgcggttttcaatcgaaccgcaaaactgaccggggtgacaatgaaggcggcgccatcaaagaaggcgctgcgcgcgctgaacaaatgctgctggaaaaaggctgtcggaccctgggtgaactgttcggaaaacggcgactggaagcacaaagcgaaaatgccgaacgccccgaaggccaacgcgatcctcaaccccctgcccgcgtcagacccactgccaaaggaaacaagatctcctatgactattatccgacacgcgccttaatcagggtagaattcgaggcgctctggcaggcccaagcgcctcatcatccagaacttctgaccgataaggccaaagaaaaagtcgcggatgcgatctttttccagcgcccgttaaagccccaagttgttggtaaatgcactttatgccccgacgaagatcgcgcgcacaaggccctgcccagtctacaaaggattaggatatatcaggacgttaatcacttgagctatcggcttcccggagagaaagcccaaaccctgaccttggagcaacgcgacgcagttgtcagaaaactgctttccaccggcaagctcagttttgatgcgctccgcaaaactgttctgaaactgccgccgggaacgagattcaatttcgaggtcaaccgtaaggacttgaaaggcgatgaaaccgccgccaatctggcgtccaagaaacgctgggggccggattggcgaaaccttccactagatactcaggatgctgtcgttgaacgtctgctggaagatgaagacgaggacaagctggttcaggatttaatgtcagaacacgggctgtcggaggaaattgcccgcaatgtttgcagcgcgcccttacccatcactcgcgcctcgctctccctcaaagcggcccggacgctgttgcccgccttgaaatcaggagtgatcagttatgacaaggctgtaaacgacgcttttggacaatcgcactcacagcttgatcatcatggcgagatattggacaggctgccgtattatggaaaggttctgcatcgtcacacagtcggcggcagcgggcgcgcccacgatcgacccgaggtccgttttggcaaactggccaaccccaccgttcacgttgccctcaaccagttacgacgtgttgtcaacgatctgacggatcgctttggttcacctgaagaaatcgttgtggaactggctcgggatcttcctctatcagccaaagggaaaagcgaactgaaaaaacagcagggcgataacgaaaaggccaacgataagcgccgggaactgctaaaagaattgggtcaggacgatacgtacgccaaccgattgcgtgtgcgcctgtgggaagagctcaatcctgatgacccgcttgaacggcgttgccctttttcaggtgagcaaatttcaaaggcgcggctgttttcagacgccttcgagattgagcatatcctgccaaaatcgcgcacgcttgatgacagcccggcgaacaagaccctgtccgcccgcgccgccaaccgctacaaacgtgagcacagtccgtatgaggcattcggtcaaaaccgggagggttatgattgggaagatatcgtccagcggtgcgctattttgccacccaacaacgcctggcgtttcgggcccgacgccatggaccggtttgaaaacgaggaaaccgatttcgcagatcggcaacttgtatccacccagtacatcgcccgattggcggccagttatcttgtatggctggtgggcgatcccgtaaaagtctggcccattcccgggcgcatgacatcggatttgcgtcaccattggggcctgaatacgctgctgtcgaaaccgggcaaggccgccaagaaccgcgacgatcatcgccatcacgccattgatgccatcgtggtgggattgaccgaccggagcctgatgcaggccctggcgcgagacgctggacgagagcgtgaagagggcgatgcccggttgattgaacgtattgcagagccttggccggattttcgcagtacggttggagaacaaatcggaaaaatcatcgtcagccacaaacccgatcacggcattcagggttccctgcataacgacaccgcctatggactggcgagtgaggccgataaggacggcaggcacgatgtggttcgccgcgtgccgctggaaagtctaaaaaccttcgacaaacttgatctcgttcgtgatgacacgattcgccaacacctcaaggatgcgactgaaggtttgagcggaaccagcttcaccaacgccctgatcaaggcaggtgagaccatgaccccaccggtccgccgtatccgtatcctggagagaatgaaagtcatcccgatcagccatggtcggctccatcccttcaaagcctataagggagatggcaactactgctatgatgtctggatgggccccaagaacaaatggacgggcgaagtcatctcccgttttgatgctcatcaaccgggttttgatccgcaatcttctttctctcggtccggggggcgcctgcttatgcggcttcgcgttggagatatgatcgaaattggcaacaaatacggtcaacaggaaattatgcgcgtgcagaaaatgacagcaccttcaggaggcgctcctacattgactcttgccgagcacaatgaagccaatgtcgacgcacgaaacagagacaaaggcgacctgttcacataccgtaactgcacccccagcgcgttacagaagcacagggctgtacagttgcgcatctctccatccggtcgagtttatcgagatcggcgatacggtcttacttcatgatcggtcgctttgtcgatatcgcctcggacggtctgcatttgagcgtgacgcgagggttcatgaaactttcccgggaccgggaaacagtgggtcttgttcctctagacgacattgccgccgttctcgttcacggtcatggcacaaccgtatccatgaatctcggcgcccaactggccgaacgaggcggagttatggttttgtgcgaccggcgtcatcaacccatcagctggctgctgcccgtctccggtcactacgaacaggggcggcgcatgaaggcccaggctgaggccagtcttccccgccgcaagcgcatttggcgcgatcttgtcaaggcaaaaattcgcgcccaggctcgcgctttggaacataccggccagacaggcgcggctcttgaatctctggcggcacgggtaaagtcaggtgaccctgataatatcgaagcacaggccgcccggcgttactggcgcgcttttttcggccctgattttcgccgggatcatggagctgacccccacaatggcctcctcaattatggttacacgatactgcgtgcggccaccgctcgggccattatcggcgcgggccttcacccctcactctctgtccatcacaaaagtgcgggcgacgccctttgccttgccgatgacgtgatggaaccgttcaggccctatgtggacctgctggcgcatcagatgatcgaatcgggatgtgagaatgtcggaacgacagaaaaacaaaccttggggcagttgacggcccttgatgtagaaggaccgcgaggcgttatgcctgtcctgacagcccttgaacggctgaccttgtccattgcacggatttttctgggcgaagcaaaaaacctcgatttgcctggcccgcccctgagcctgtctgtcgccgcgcttgtgaaaggcggcgcggcgccctgaacatgcgctgatgggcgagcttagcggatatcgcatcatgtggatgatggtgttgttcgatttgcctgtggtggaaccggaagaacggcgcgccgcctccagattccggctttatctcaaggatctgggcttttccatgacccagttttctgtttatgtgagagtgaccgcaggcaaggaagcggtggagacctatgtgaagaaaatcgaggcggccctgcccccggagggaaaagtttccatccttcagttcaccgataaacagtatgaaaacatcatcacattcagatcccgtcagcgcaacgaacacggtgaaaaaccgcctcctcagttgcaattattctagattcgcgtctgttttttccactttcgggaaagaaaaaccctcgccaaatcagaaacttggcgagggtcaggttatagctgattgagagacgcggtcaaaccaaaac

SEQ ID NO: 2499 - DNA, 5252 bp, synthetic construct
  source 1..5252: mol_type = other DNA
  misc_feature 1..5252: note = Synthetic
ggcaccatcccccaataggctgtgatcgtttcggaccgggttggcttttccccggctgctgctgcacgcagcttcatttggcacaccgtgcaacacaaggccggaccatccttgtcccatccgatggccgtgccacaaatcaaaaccgttcaccgccctcacgcagccccttccaaggcgcttcacgcttcaccacaagggccggaaaagcaactgctcccgccaaaatcccgggaaggtcattggcggcccggcagatactggattggcctgacatccgtttctgggtccgcacagacgctgaaagcgaaaaacgaaggcaacctgccccaaaggactgcttgccttcgcaaaatacattttgtggactatccaaaaaaaggacattgtccttgttaacggaaagcccggcttttccagagtgccaaaatgcgattcctgtttagcgcaattatctgctaagttcaacttcaatcttgttggtcggtaatttcgggggggacatgacctggcgtttggggatagatctggggacaaattcacttgggtgggcggcgctgaaacttgaaaaggacggcgaggcatggacacctgttggcctgatggacagcggagtgcgcatcttctccgacggacgcaatcccaaggacaagcaatccaatgctgccaaacgacgcgaaccgcgcggggcgcgcaagaaccgcgaccggtcaaagcggcgcagcgcccgcctgatgcggcaattggttgaatgcggcctgatgccgaaagacattgaggcgcgcaagaaacttgaaatgggcacacgcagcaccctgaacgaaaccgacccgtggattttgcgttgccgggctctcgacgaaaaaatcaccccccatcagttgggccgggcgatttttcatctgcaccagcggcgcgggttcaagtcaaaccgcaagactgacagcaaggacagtgagagcggcaaggtctatgatgccataaaccggaccgaaaaggcattggccgaaaagaacgcccgtacgcttggggaactgttcggccgcccgcggcttgaagcatttgagttcaatcaaactgccaggaagggcgagcgcataccgcaacctctggcacgggttcggtcgcgcggcgtcggcgccaaatcccaatatgattattatccgactcgcgcactgatcgtggacgaattcgaccggatctggaaaaaacaacgggagttttaccctgatctcaccaatgatgccaaagcccgcatggaacaagcgcgcaaagacctgcgccataccattgaatggcagcgcctgctaaaatctccgcctgtcggcaagtgcaccctgatccctgaagaggaacgtgctccaaaggctctgccttcttcccagcgggcccgaatttttcaggaggtcaatgccctccgctacggccccgccggtgaggcgcaagtccccctgacgctggaacaacgcgatattgtcgtgcaaagcctgttgcgcccaacaagcaaaagcgccaagcgcaccttcagccaaatccgcaaactgcttggtttttcggaacgcgaccatttcaacactgagtcggaaaaacgcaaggacctggtcggcgatgaaactgcggcccggctgatgcagaaggactgctggggacccgaatggcttgagcttgatctggcaacgcaggatgaaattgtcgagcacctgataaacgaagaggagaaagacaggctggttgcctggctgtgcgatgtgcatggcctggataaagagcgtgcgtttggcgttgccgattgcccgcttgttgccggtcatggcaatctgagcaaactggcgctggacaggatattgccgccattggaagcggaggttatcgtttactccgatgcggttaagcgcgcagggtttgacagtcactcccaattcggcaccgataaagtgtttaacgaaaaactgccctattacggggaaatccttgagcgatcggtggcccttggcagcggcgaccccaaggattctgatgaaaagcgttatggcaaggtcgccaacccgaccgtgcatgtagcgcttaaccaagtacgcaaggttgtcaacgatctgatggcgcgcttcggtgcgcccgaacagatcgtgctggaactggcgcgcgacctgccgctgtcggccaaggggaagaatgacctggagaagatccagcgggacaaccagcaggccaacgacaagcgacgcgaacgcctcgcggaattgcgccagtctgatagctatgacaaccgcatgcgcctgcgcctctatgaggatctggaagctcttggtggaagatgcgtgttcagcggtgaacaaatcggaacaacaaagctgttttcagccgatgtagagattgagcatattctgccgttttcgattacctttgatgacagttacgccaacaagaccctggccatccgccaggccaatcgcgacaagaaaaaccgttcgccctatgaggcctttggccattcaccaaccggctatgactgggagcaaatctccctgcgcgcagctgaactgccgcccaacaaacgctggcgctttgcccccgacgcgatggataggtatgaaaatttcgagggcggctttctggcccggcaactgacggatacgcaatatatctcgcgtctggccaaggcctatctggaagccatatatggcgggcagggccttaagggatcgcaaaaccatgtctgggtcgtcaacgggcgcttgacggccgatttgcgctggcagtgggggctggacagcgtgctacatggacacaatcttgaaatatcagaggcccagaagaaaaaccgcaacgaccaccgccaccacgccattgacgctattgttgtggcctgcacggaccgcgccatgctcaagcgagcatctgacaaggcaaaagaaaacgagagcaagtttgccgaaggcctgatgaaaggcaccccgccaccctggggcggggaaggcggccagtttcgcaccgatgtggaaaattgtgtgcgaaacatcatcgtcagccacaagcccgatcacggtatcgagggggcgatgcacaatgacaccgcttacggtatccccaagggcaaagagggggagcccgacaacaagggcgttcgaaaagttgtcacgcgcaaaccccttgatagcgacagtttcaaatcgcccaacgaccttgaaaaaatccgtgatcatcaaatcaagatggggctgcttgaagaaacctatggactaagcggcagggagttcaaagaagcactgattgctgctgccgaagcgatgacgccacccgtttacaaagtgcggattgaagaaaaccttcgcgttatcccaatcagggacaaggagggcactgaatacaaagcctacaagggtgacggcaactattgctacgacatctggcgcaacgaaaagggcaaatggacaggtgaggtgatttcgacatttcaagcctatcagttggcgcgcaaggatgagaggtggtggcaacagcccgttggccggaacggccagaagctcatcatgcggttgcgaaaaaatgactacttgcaaattgagcatgaggagaaaatcataattgttcaaatagcaaaactgtcacccggaatgattgcaatggctgagcacatggaggcaaacgtcgatgcacgaacacgcgacaaacaagacgaactaaaatatattttcaaatctccagcttctctgcaaaaatccaaggcaaaacgcgtgaccgtttcgccctccggcgtggttaagatttacgattaacccggaaagggttcgcggccccgttgtgatctccctaaaattcttgtgggagggaacatgcaaaaccgcgtgattgacatatcctcggatggcgcgcacctcagcgtgtcaaggggattcttgtcggtcaaagtcaacggtgagaccgcgggcaaagtcgccattgatgacatttccgccctgataatacgcgggcatggcgccagcctgtcggtcaatatctgcgcgcgactgtcaagggccaatgttcccattgtcatttgtggttccaaccagtcgccggcttctgtcatctggccggtctccggacattttacccaagggctgcatatgcaggcccaggccgtggccaacaagccgctattgaaacgcctctgggcgcagctggtgaaagcaaaaattacggcccaggctgatgtgctggaggcatttggtctaaatggtgccgatataagggcaatggccgagcgcacgaaatccggcgatagcgacaatcaggaggcccaggcggcaaggcgctattggccgcgccttatgggcgaaaccttcaggcgcgacaggcaggaggaaggcgcaaacgccgccctgaattatggctatacaattttgcgcgctgccagcgcccgcgccattctggccgccgggctccatccatccctgtcattgcatcatcagagccgtggcgacgccctgcggctggctgatgatcttatggaaccttttcgccccttcatcgaccaggcggtacgccaaatgcgggatagccaggcccggaatgaagaactgcaactcaatcagcacaccaaggcggcactggttggcgtgttgtccctggatttgaatagtgcccacgggtcaagcccgatgcaactctgtatgggcaggatggcgcaatcgctggtccgggtgtttctcggggaagaaaagattatggaacttccgggtgcacctctgccgctggtttcggattcgcaagggcagaccaatgccgaataaccggttcacacaactaagcggatataaattcatgtgggtcatggttctgttcgatttgccgacaacaacaaagaaagagcggcacgcctacaatcaattccgcaacttcctgctcgacaatggttttgaaatggcccagtattctgtctatgtccggcacacgaacggcaaggacgcggttcaggcaataattcgaaaagtggaggccgcgatgcctccggaaggaaaagtcgatattctgcaatttaccgacaagcaatatgaaaacattgtttgtttaagaggcgcgaggcgaacagattcgccccaaaatcccgaacaattggtgatgttttgatgaaaaacgggacaaatttgacgattctagcatcaaaattgtcccatttattcagtcacttatgctgcgatcggttgtagcactctggaaaagccgagccaaccgcaacaatgagctccagggctgacacccacccatcgttg

SEQ ID NO: 2500 - DNA, 4761 bp, synthetic construct
  source 1..4761: mol_type = other DNA
  misc_feature 1..4761: note = Synthetic
ttcgtatcatatcacaccaaaacattcgggttttggagtaggatgggtataatactacgtacgtatattgcttccatcctgcttggctcatatgcttgggatcagatgcgatagaaattgctatgaattgtcaggagtaatcatgcgtaaatcatcaatttttccaggtgtgggtggatttgtcttttccatcatgatcggttttgccttgttggttgctgaacctcttgttgtaacaagtgatgttcaggctgaaggttatcattatggtgctgttcttgcgggaaaaagagcatccagaacacgtgcgattacaaaccgggtaggcatttcaagatctggtgttcgatatggaaagtatcgtcgttaccataaacatcatcgtctcaactaccgtcttaacaagcgtaatcgcgagattgctcgttacaacagacaagtagagcgcaacaatgagttgagacgattgcgtgcttcaacacggcgttctggccctaatggtcgtttcttgtcgcgcggagaacgtgaatatctactaaatggcggatatgttggccctgtatttaacgaggggttacaaggctcggcggttagaaattcaaatgtatgcccatcaggtcatgattgcggctaccggatttattctgatggcaccgggcctcgaataattactccgggtgtgcgtcttggcaaagggttgccaagctacgatggattgcgtgggccaaaagttattacgctagactagtgattacatagtttagaaaaagcctcatcttcgatcgaagatggggcttttattttgtcaatttttggcgacttatataaagtgccaaggctgccgcattggatacattaagggatttgatttcaccaggcatatcgagtttggcaagttggtcgcaagtttcctgcgttcgttggcgcaagccttttccttcagcgcccaagaccaaagcaatcttgctttgtggttccaaaccttcaaatggaattgcttcttcgctatcaaggccaacagtataaaaaccgttctccttcaaggtttctaatgtatcggccagatttttgacttcaatatggtcaatgatatccagcgcgccagatgcagacttggcgagaacaccactttcaaccggggagtatctacttgtagtaatgattgcgccagcacctaatgcaacggctgatcgcataatggcaccaacgttgtgtggatctgttacctgatcaaggacaagtagaagattactttctttcagatcaccaaggtcctttgtaggaattggggcgacttcgagaatagttccctggtgaaccgcatctgatccaaccatgcgatcaagttccttgggcagtttttcgatgacttcaatatccggagcatcaatcaaatcgaattcaagccttagaatgccgtttttcgtggcatatagacaaagctttttacggtttggatttgcaagtgcctgacgcactgtatgcagaccatagagatagagtttgtcgttgttgtcccgcgccacattgggacgtcgagggtatctcttgtcctgcgtattttgcatagcatcacggcgcgcacggcgtttttctgcatgatgagaattatgctcatcgctcatgatttttggtggtgttttcttgctcatgtgcatggcgtaacctttgtttgggtgtacgtctataaatatgttttaaaaaccaatatatttttgccttgaggggcgttcttgtgttgacactatgactgcatgattgcataacgccgcaggctttgatttgtaacctattcaatgtcacttccttttgtttttgatattaaacaatcaggaatgaaatctcaggctctgccatattatggaggagtgtccgagtggttaaaggagacggattgtaaatccgttcgctatgcgtacgctggttcgaatccagcctcctccaccataggccgagccgcacaattgtgttatgagatgtcatataagtcttgggtaaccgcgggtatagctcaatggtagagcagtagccttccaagctaaatatgcgggttcgattcccgctacccgctccatttcctatttatccttcgaaaaatcgcctagtgaaccatcgcagtggggacaatggtgcaaatctgccttgtctttgaccttctgcgtggactcccgaatggcatttgcaacgctgtgacttaggcccaattccttgcgaaggtcttcaatggcatcttcttcatcatcatcaatgtgaccgtctaccaatgctatgcgaaatttgtctgtcatgagctcgcgtttgcggcagttgatcaaatttggcctgatgccagaagatggaaccgaacgcaaagcgctagagggcgggaaaggaatttctcaaggcgacagtgacccttggattcttcggttcagagccttgcgccagaaaattacaccttatcaattgggccgtgccctgtttcatcttcaccagagacgtggcttcaaatccaatcgaaaaacggaccgtggtgacagtgagagcggtaaggtttatgaagctattactcgaacaaaggaaaagctacaggaacaaggcgcgcgaacaataggagaattgtttggcaagcaacgcgcgaagacctttctggagaatagcaaaaccgagaaggggaacagaaatccgcagccgttagcgcgcgttcgacggtcaggcgatggtgcaaaatggggatataaatattacccgacacgtgaactggtgttggatgagtttgatcagctttgggccaaacaactagaatttcatggcgaattacttacagagaaagcccgttcagaattacgtgacaccattgaatggcagcacgagttaaaaccgcagccgattggcaaatgtaccctgctgcctgagtttgagcgtgcacctaaagctttaccgtcatcacagcgtgcccggatttttcaggaggtcaataatctgcgcattatgcctaccggtgaatccagttatccgctatcaaaggaagaacgtgatatcatcgcagaaagtctgctgcgaccctcaagcaaaaccgcaaaacgcacctttgatcaattgcgtaaactcaaaggtctttctatctatgacagttttaatctggaatctgacaaacgcaaatatcttgtaggtgacgaaactactgcccggcttatgcaaaaagatcgatggggggagagttggttcaaacttcatcttgtcgagcaggatgaagttgtcgacagacttgtcaatgaggaaaaagaaggggttctcattgactggttgtgtgatactcacggccttgatcgtgaccaagcttacagcattgcagattgccctttacccgaggggcacggaaacctgagtaagcaggcgcttgataaaatcatcccctttcttgaatgtgatgtgactgtgtattccgatgcagtcaaacaagcaggtatggagcacagccagttcgccaccggcgaagtgcacgatctggcactgccctattatggttatgtgctggagcgttcagtggcatttggcacaggtagccccgatgacgcagatgagaaacgttacggtaaaatcgccaatcctactgtgcatgttgcgctcaaccaggttcgcgcagttgttaacgaccttatcaggaggtttggtgcaccggagcaaatcgtgttggaattggcccgcgacctgccgctttccgcaaaaggaaagggtgaacttgaaagcacgcagcgtaaaaaccgtgaagccaatgaacaccgagcaaaggagcttgaagaaacttacggcaggcagcccaacacgtatgacaatcgtatgcgcttgcgcctttatgaagaacttgatgctttgggcaaacgctgtgtgtttactggccagcaaataggtccgcacaacctcttctcagatgaagtggaaattgaacatatcctccctttttcccggacgtttgatgacagtttttcaaacaaaacactttccatgcgtcaggcaaaccgtgataaaggcaatcagacaccgcatcaagcttttggtcattccccaagtgagtacaactgggaagaaatttctaaacgcgcagcggaactttctccgagcaaaagatggcgatttaacccggatgctatggaacggtatgagaattttgaaggcggatttctcgctcgtcagttaacagacacacaatatatttcccgccttgctaaaacctatctggaatctatctatggtgggcaggggtttattgctggtacgaacaatgtttgggtaatcaatggccgactgacagctgacctgcgtcactactggggcctcaacagcgtgcttctgggtgacaatcttcccgaggcggaatcgcagaagaagaaccgcaatgaccatcgtcatcatgcaattgatgccattgtggtgggttgcactgaccgttccatgttgcaaaaggcggcccgtgaagcgaaggaaaacgagcgagagttttccaaccggttattggccggcaccccgccgccctaggaaacatttcgagctgatgtggaaggggccgttcgtaatatatttgttagccataagccggaccatgggtttcaagatgcgatgcataacgacacggcttacggaattccaaagggcaaagatggagagcctaataaaaggggggtgcgtaaagttgttacccgaaaacctttggaaagctttgagaagcctatactctgagtccttgaaaatctgattatttggggttgacgtttcaggcttgag

SEQ ID NO: 2501 - DNA, 23216 bp, synthetic construct
  misc_feature 1..23216: note = Synthetic
  source 1..23216: mol_type = other DNA
aaacgtctgctcggggggtataaacgtccgagtgtggggtgtaaacgtctgcttgggggtcgtaaacgtacaagtctgggtggtaaacgtctgtttgtccctcgtaaacgtctgcgcggggggtgtaaacgtctgctcgcccctcgtaaacgtccgggcgggggtcgtaaacgtctgtttgccgggtgtaaacgtcccggtgcgcccggtaaacgtctgtttggggttggtaaacgtctttttcctgccgataaatggttgagcaaccagtccgaggagaatttgtacagaaaggaacgaagctaactaaggaatctcggttttttaaatccgaacttcgtttccttcgtttgctgctgtgatttctcaccggcaaaatatgggatgattaatatataaatttggttctcgctattaagcagctaggcggcgataacaaggtgtcgtaaaaaatttatggaatattatcaagtctaccaaaaccgggccgtgcaaacggcggctgtcgttacccagttcattcccaccctcaaggtcggcgccgtggacgctccgggcttgctcctgcagtcccatgcgctcgatgggttcgcgcagaaacgcgacgacgcgatgggcgcccacatcgcggctgtgaacgcggagaacctgggtcagtccacgctccatgacctggtactgcaactgccgcgcgcagccgagggtgaactaaatgacactgtgccggcggaatcggcgttgttgaatctgctcgcgccggtttacgccctcgttccacgcacgacggagctgaccttggagcgtggcatgaagctcaagagcgcgttggacctgatcaacccctatctcgcggcgcagacgcccgcacgcggaccggtgacgagcggcggcaagggcgtgacggacttgaacgcgttgatcaccggtcaaccggtcttggtacaagccatcgaggacacgagcgccgggttgacgtcggcgcgcacgggtttgcggacgccggccaccggggtggaccgtttgaacaaacatttttatgcgaagctgcaatcggaagcgcgcaccaatcccgcgctggaagtggcgcttggccagattgacacggaatccatgaacctgccggtcacgctcggcatcaaaagtgttttgcaaggcggcacggaccagttgcatctgctggtgaactatgacaacgcgagctacgacgccacactcacgagcaccatcgaatggcagcgggtgggtacggacgctaaattttcaaacagcctgccggtggacccgagcggcaacacgctggggccattcgcggtgggccagacggtaaatgtccgcacccgcgtgaagaacggtatcggcacgacgacgggcagcatccgctccttgaagctgctcgccccgacggcgtgaaccagcgggatgatttcgcaacgccgggaatgaagttcattcccggctttttagtcgccttaatttattttccaagattgccaagttcgcaccaatcacgctaaataaagggaatgtcaacggttgccgaacaactccgctccgcccgtgaggccaaaaatctcacggtcgagcaggtcgccgaaaccaccaagattcgcaccgaccacatccgcgccatcgaggaaggcaacttcgccgtattctccgcgcccatctatatccggggttccgttaagaattatgccgccgcgctcaagctggacaccgccgccgtgctggccgcgctgacggcggaactcagcggctcgcagaagctcagcgagccgccgccgctgtcggaatccaaaaaatcgttcgtggaccacatcacgctggtgctggcgaaggtgaactggaaggtggggctggtcggcctggcggtcatcgcgctcgtggccattttctcaatatctttctgggcgtggcggcatcatcagaagagtgacccgcttaagaacctgccgcccgccgtctatcagcccgccggtgccgacgatacgctgccactgcacaaatgaagaagtatgaattatgaatgttgaatgaagaaaccgggccgcatccgggtggccgcaaatttcacttcatcattcagcattcatacttctgcatttcggctcaaacgtcttcgagatagagcgcgcggttgcgccagaggtagatgattcccgagagtgcggtcagcagcacggtgagccacagcatcgcgtccgcaaaggacggggcccactgcacaaataagttcttcaatccatccggccattcctggcacgcatccaccacgagcagcgcgatgatacagatgatttgtgaaatagtcttgtgcttcccgtaacgctccgccgcgaggacgatattcttggatgccgcgagcaagcgcagcccggtgatggcgagttcgcgcgagacgatgatgatgaccatccacgcgccgactttcaccggcgcagcgggatgcaggcgcgtgctttccacgaaggcaatgaacgccgagcaggtcatgatcttgtccgcgagcgggtccatgagaatgccaaagctggtgatgaggttgcgcgagcgcgcgatgcggccgtcgagaaagtccgtgacgcccgcaagacagaaaaagaaaagcgcgaaggtattgcggtagggaatattccacggccagaagagcgccaccaaaaaaaccaccgtcagcgcgaaacgcgagacggtgagtttattggggaggttcatgtgaatttgcgatgttagatttgcgatttacgcgaagcaattcaaaagggcgcgtcgaccgcaaatcgggcatcgtaaattcttcaggcgccgaacttgtcgaacatcttcgcattcgcctgcatgaggcggatgagaaacttcgccgggaagatgccgagcgagccgatgttcgccccggtctcggtgaagcgctccagcttgtccgaaccgctcgcagaggaatgcaacagcagcggctgcggatgccatgaatggcctttcagcgagcacggcgtcgaatgatcgccggtgatggcgatgacgtcgggcttctttttcaaaagaatcggcagcgcggcatcgaaatcttcaatcgcttttttcttcgcagcgaaattgccgtcttcaccgtatttgtcggtgtacttgtaatggatgaagaagaaatcgtagttgtcgtattcagcgagataacgctcgaactgctccttgatggtctgcgggccttcgatcttgaccatgccgacgagttgcgcgaggcctttgtacatgggataaaccgcgaggcaggcgggcttgagcaggtagcgatcttcgaacaagggaatctccggctgatgcgcaatgccgcgcatgagaaaaccgttcgcgggcttttccttggcgataatcggcagcgcggccttgtaaaagtcggcgatgagctttgcggttttcttctgctttagatttttcgcatcgcgcggcttcacggtcgggatggcaaaaccttcgcggttcggatcggcatccgtcagcgggccttcgagacccttgccgcggaacacgacgacgaagcgatgctctttaccgggcttgatgatgacttccgtgtcgccaatctttttgattttggcggaaagcttggccaccagtttctcgcagacttcggtcgcaatgcgtccggcgcggcgatcggtgacaatgcctttcgcatccagcgttgcaaagttcgcacgggcgcagacgtcgccgggcttgagttcgacaccgaggccaagcgcctcaatgacgccgcgaccgacctgaaattcgagcgggtcatagccgaacagaccgagatggccgggtccgctgccgggcgtgatgccgggcgcggcaggaatcatgcggccctgcgcggaatccttcgaaagcttgtcgaggttcggcgtgtaggcggcttcgagcggcgtgaggtagccctgctccttggttgccaggtcgcccagaccgtcgaggacaatcaaggcgagtttagttttggttttgagagtcagttcagaataaagcgcatccaaattcatccgggcattttacattttcggcggcggggtgcaattcgttttagtaacagtccggcaacgatggtgaaaactttaagtaaaacgaatactgcgacgtttccagcttcgaagacgatgaatccggcgccgacaggttcaagccactttactttcggtgcttcatggcgcaatttaacgccacatgacgcgaccgtttttgagtttatttattatcgtactggcggcacagatggccgtgggtgcgaacgcggcggaaaccgtgcctctgacggcctcgctgttggaaaatgacgtgctgcggctccgcgtcgcccatctgactggcaatttcgcagaggaattcctggccgcacagccgaccaaccggctggatggcatcgtcctcgacctgcgctcggcggacggtgacaaaaacgcagcggcagcggcgggcgactttttagcagataagaaattaccactggtcatcctcgtaaacggtcagacgcgcggggcggcggcgacgctggcggtggatttgcggatggcaggtgacggcgtgctcgtcggcagcaccaatttcgccggtaaaagtccggatatcgccgtgatggtttccggcgccgatgaaattaaatttctcgccgaccccttctttatccccaccgcaaccaagccagcctttacggcgggtaccaatgatttcacggaatatgtggatcacaccagcgaggcggatctcgtgcgcaagcgcatcaaagacggcgaggaggaagacactaccagtccacgcgtcgcgcctgcccagcccgtcatccgcgacccggcactggcacgcgcggtggatctgttcaaggcgctggcggcgctgcatccggcgcgcggttgatttcgcattgacgatttgcccttgaacaaccaccttttccgttcgcgcttgggatgaaaactattctatttctttgcaccggcaacgtttgccgcagtccgatggctgaaggcctgttccgccatgcggtcaagggccggggcgaattccagattctctcggcgggcctcggggcggtggatggcgacctgcccacgcaccattccgtgcaggcgatgcgcgagattggcatcgatatatccagccagcgcagccgcgcgctcacggccgatttggtcaagcaggcggatttgattctcggcatgacgcacagccacaccgacacagtggcgttgctgtatccgaaggcagccgaaaaaacttttctgctgcgcgaattcgacgaaacgctggagccctacgaaaaagacatcagcgatcccatcggcagtccttatcacatttatgtggaatgccgcgaccagattgaacaaggcatcgtcacacttttgaaatttatggaacaacataacttcctctcgaaagacaaaaacccggccacgtcatccgtaatcaatttcgctctcggcgccgatcacggtggcttggaactcaaggagacgctcaaggcctttttgcgtgaacgcggcctgacggtcagtgatttcggcgcgaccaccaaagacccggccgatgattatcccgattacggcaagctcgtcgctgaagccgtggcggctggccaagccgaactcggcctgctcgtttgcaccagcggcgtgggcatgagcattaccgccaacaaggtttccggcgtgcgcgccgccctcatcggcgatgaagaatccgccactctctgccgccagcacaatgatgtgaacgtcctttgtttgggcggcaagaagacttccgccgagcttggcaaaaagattctcgccgccttcatcgcggcgaaattcgaaggcggccgccacgaacgccgcgtattgaaaatggatgcgaagtttcctgccgccagtctgcgtttggcgaatgttgatccggatatcgctggcgccattgaacacgaacgcacgcgccagcaagaaaacattgagctgattgcatcggaaaacttcacctcgcccgccgtaatggaagcgcaaggctcggtgttgacgaacaaatacgccgagggctatccgaagaagcgctggtatggcggctgcgaaaacattgattccattgagcagctcgcgattgaccgcgccaagaaattattcggcgcggaacacgccaacgtccagccgcactctggttccggcgcgaacatggctgtgtatttcgcgttcttaaaacccggcgacaagatgctcactatggatttgagccacggcggtcatttgacgcatggcaacaaggccaacttctccggcaaattctttgagatcgtccactacggtgtaaacaaggaaaccgaactgattgattacgaccagatcgcttcaatggcacgcgaacataaaccgaagatgattaccatcggggcgagcgcatatccccgcgtgattgatttcaagcgcatgggcgaaattgcccgcgaggttggcgcgtatctgctggcggacatcgcgcacatcgccggcatggtcgcagcgggtgttcaccccagcccgatgggacacgcggatttcgtaacgactaccacgcacaagactttgcgcggcccgcgcggcggattaattctctgcgcggaaaaatacgcgaaggaaattgattccatcgtttttcccggtatccagggtggacccttggaacacgtcatcgctggcaaagcagtttgtttccacgaagcgctgcagccttcgttcaaaagttatcagcaacagattgtcaaaaacgccgccgccctcgctgacggcatgaagcgtaacggctaccgactcgtcagcggtggcacggacaaccaccttatgctcgtggacgtcggggccaaaggcattactggcaaggattcgcagatagcgctcgatgaggccggcatcacggtaaacaaaaatacgattccgaatgagacccgctcgccgtttcaagccagcggcatccggctcggctcgccggcctgcaccacgcgcggcatgaaggaagcggagatggcggccatcgccgacatgatttctgaggtgttaatggacattaagaacgtggacgccgcccacaaggtccgcgcccgcgtccgcgagttgacggcgaaatttccgctgccatattaataagcaccatgtttagcgtcggtcaaaaagtagtgctcgtagatgacaagtggccggagacggttaagcagctttacctgcaattgccggtcttggagacagtctatgtcgttcgcgccgtgcgcgtcggggtccgggcagacgaactgatcatggacatgcggcgtgtgctggagcaatccctgctgctggtcggcatctacaatcccaccaataagctcggcgtcgaggcgggttttgccgccagccggttccgcgcgttggatgaattgaagcagtccgccgtcgaagaaaaagaagctgtgaccttctgatacgccgtcgcgttccaatccgatttaccgcctgaaagccagacgccccgcgactattcgcggggcgtttggtttaggccggcagggtttcggtcgtaccccggccgcgtccgtgattcaggttgatgagctgccgggtttcggcgacgtagccgacgatgttgaacttaccaatgggcgcatgctttgccgcttcgaaggcagcgccggtggacggatactgtcggccggcggctaaagttttggtccagtgattctcgtagttgaggtattccgggctgtcagcgttctcgatgaggatattcatgaactggcaacctaacagacaatccgccgcaacccgcatcatatcgcgaattatctttaatccagcgccaccgaccggcgcgcggctttcttgccggcgtgatgcgatttatcggcgagcatcttgtttttggcgcgccgcgagcgcttgcgtttctggcggcggatcttttcaatctccgcgcgctgggcggcgatgaagccatgcttccgctcttcaatcttgtcgaggagcagccggcgggcgatgaagcggttcagcccctgctggcgggtttcctggcatttgaccgacacgcccgtcggaccgtgcaccagcatcacgcaggtggaaaccttgttgacgttctgtccgccgtgaccgccggagcggacaaaactctcctcaatgtccgcctcgcgcacgccgagcgcggccatgcgctgcgcgagctggctttctttttcgaggctgacgggaaatgcacccatgcaggaactttaacggcattgggcagccagccgccatctaaaaacaatttagcgggaaaatgcaccagagaagtttgcccgcagatttcgcggataaacgcagatggaaaacaggagatggcagatgctggatgctaggtgttcggattttgcgaatgaacgtactcgagttattggaagttagtccgaattagctttaccgcaggcagtggccgtccgcaaggacagaaccgggcggtgggttggccaattattctctgctctgacgcttggcatgtgcccatcgaccggcgattgcgccgtggagataaatccagtggcaaatttttctacaagttgtgagtttgagttatgggttttgagttgcttggcggtttcggctttaactcatcactcataacccacaactcataactatttaatcaggtacacatgagcgacaccgtggcgctccacggaccgtagcgcgtggctccgccgacacctcggacgcgcacgccatacaccgtgcccggcaggagatcggtgaggataatgttcttggtattcggccagataccggcatccagccagccgcccgtcgccgtgcaatactgcacgtgatacgccttggctccgggcaccgcttggagcgagactccgagttgcgtggtcatggaattatccaggcctaggatcaacggcgcggtcagcgtgattgcgttgtgcgaataagtcactacgtcaaagcccgacagcagcacctgcgcggcggagaggttgagcgattggatataagccgcaatcacgcgtaaggccacgacgagatcggcataggcttcccgcattgcctgcgtatccgggggaccgccgatggcctgcgcgttcagggcggtttgataaaccttttgcaaggcctggagcgccacgagggttacggggaggttgggaaacagcagcgcgttttttcccagacacacgagcaccaacagcgcgaagctgttgaagtcgtttttctttagtctcgcaaaggcaaggctcacctgtactggttgtagttttttcataccatttagagagacctgaaagaatccaactgaccgccgacaggcaatcaattgtgcgtaaaataataacgagcatcagcgatgccacatttgtgaaaaatttcacaaacgacgttttgccggcaaaaacgacggcttgaggcaaaaaggcagtgcaggaagaaaacaccgcagtaaaatgacttaaaaaggcagtaatgaggcaaaacagcgcagtaatgtgaaaataaccggcagtaaaatcattttacaacgcagtaaaatgacaaaacaaggcagcgaaatgattttgcaacgcagtgaaatcatttaacaaggcagtgaaatcaaaaacaaaggcagcactgacacaaaaaccggcagtaaagtcacatgacaccgtgttcattgaacaaaacaccgcagcgaagtcaaaataaaccgttgttttggagcgataaccggctgtgaaacggctaaaaagtgaaataaacgctgatttcttcaatttatttttaacatcccggtttcgtcccagaacgggacggttttaattttcccaaccgaccgttaatgggacactgtaaaataaaacgggacactatcgaccacataagggacagttaaaactcgccgatttcgaactcagaactcagcactacatttatagatgtactcctatctcccaatttcgattgacctgccggggcatcggcgtagccttggctagacatctcatcgggaaatctggaaacgtggcttggctatgaaagattacattctgaataaaaaaccggaaccggcttcaaatgaaatggtctgggcgtttgacctgggcaaaggttccatcggcgaggcggtgcggtgcggcaacgaatttctgcacaaggcctccctgctcatcccggcggaatttgccgaaaccaaaaccgccgccggtcgccgccggatgttccgcacccgcgaggcacacaaggcacgcgaacgatggctgaatgaagtcatgcgggaagcgggagttgaagttttacacggacgcaattacgacgcggcgggaaattggaaaccaggcgaaccggcgggcaaacgccttgagcaagagttccccgcgcccggcgacgatacttgttacacatcttgtcttttgcggatcaaattgctgcgcggtgaaaaattggagccgtggcaagtgttcaaggcatttcattcggcgattcagcggcgcggttatgataaagatattccgtggaaaacccgcgaaacacgaaaagccaaagatgcggacgatgacgatgccggcacagaacagcggatgcacaagtttgaacaggacttggaaagcatggctccgggcaaaagtgaatttcacttccccgcctacttcgatgcttaccaaatggggttatggaatcccacgaagccggatgatttgaaactgcggagtgattgccacgccaagacaacgcgcaaccagattgtcccacgcaaattagtcgaagctgaaatccgccagatggtcgagggcgcggccaaacattatccggcattggcgggcaaggcggattatctgctctatggcatcgcccagcaaagctacgcctctaccaagccggaactgcgcgagaaatttaagctgcgcgaaggcggcgcaaccgactggcaaggtgtcgtcggccaaaagattccacgctttgaaaaccgcatcattgccaagtgtgctttgattccccgcttgaatgtttgcaaactgcgcgaaggtgaaaaaggccagccgcatgaaaaatcgttggtagcggtggaagtcgcctttttgatgaagctgaaaaatctccgtgtgcagcgtcctggtggtaacggctggctatccgcgaaagagattcgcgccattcttgaaaacccaaaacgcacagattggaaattcacaaaatctgcgtggaaaaagttatgcgtcaccatcggcgcaatcccattgcccggacatgatgagattgagtcaccgcgtttttctggccgcagccggttttgccgcccggcattggaagttttgaaacgattgattttgtccggtaaaaaaccgtcagagtttttgcaggaagaaatcgcacgcctgaatggaaataaagacccgctcaaaggtttggttgaagccgacctgaaattcatcggcgacatggcggcaaagaacgatacttgggaagggatttatattccgaaccagcagttggatgcactggtagaactttccaacaattcagacgaagccatcacccgtttgattggacagcagaacgatccgattgtccggcatcgtttgggcgtgttttacaaacggcttcttgagcttgaaaagtccacaaaatcccggcctgaccaagtggtgctggaattcgtccgtgaagacttcatgggtaaaaaagcgaagattgaatattttagcttcataaaaagacgcgccgaggaacgcattaaagcccgtgaggaagccgccagcgttggtgctacagaaaaatcggcgggattaaaactggaactgcttcgcgcccaagacggttgctgtctttacaccaacgaaggcttggttccttccaagttagacgaataccagattgatcacattgttcctcggtcaaaaggtgggccggatgccgtggttaattatgtgctgacaacgcaaaaggccaacgaagccaaagccgaccgcactccttacgattggttccatcaggaaatgccggacaagtgggatgcctatgtcaaccgcgtccgctcacgcgccacgcatttacggaacaagaaagtgcaactgcttgttgccctgaacgccgccgagcttgctgacaaatataccgcgctggcggaaaccgcgtggattgccaagctcgcgcaagcaatcgttggtttgcatttcggttggcgcaatggcgtggatgaaaatggaaacaagcgggtcacggtgatttccggcggactcaccgggcgcatccgtcgcaaatatgcgctcaatcaagtcctgaatccgaacgccaaaaccgaagaagaatccgaaaagaaaaatcgtgatgacgaccggcatcatgcgttggacgcgatggtgatcagttttattccaagctgggtgcgggatgcgatgaaagaaaaattcttccgcttccccgaacccatccaccaaaacgccaagggattttttgaaaaggaaatcgcatccgttgttccacgtaacctttgctttgaaaaggcggctttggctgaaaccatttacggcgctcgaaccgatcacgggaaaaaagtaattgtccagcgggcagagttggtgttgttgggaatgaaacccactacgccgggcaaatcggtttacgatctgaaatatgctgtcaaacagtctcaatctatccgcgattcaattattcaagaaagggtgctggaatttctaacaaccaatccagatgaagtggcatggcgaaagttctgcgcggaattccgccttaaaggcaaagacgattccagtggttcgcgtgtgttgttcgtcacagtgaacgtcggtgagccaaccgaatataaagatatgtcgaaggacggcacgggtgcataccgcaaagcattgaagggacacaaggggcagattgtatattgggatgcggctggagaattgtgtgtagcgccaatttatcctcacgattcgttatttcagaagcgtgagaaaataaattcccttggtggaaaatcaaagttctatggattctttcaatccgactgtccagtgcggacaaaaaaagaaattccgatggagagctataagctcgtcataagaaacgaagccaaacagaaacgacgaattgtggctgaaaaaccattgccgccttgtgagttgacacttcggacaattattacgaaggacatgataggtgaactaactctggcagataacaccagagtcgttgcgtctcttgatgtttgggttgcggctggtctcgaacgaatctaataaaatttatgagccaccacatccttcacgtttttcagcacggcgcggttttgggccgggaacgcggtttcatcacctgcaaggcggacgggcaggcagaacggcggttgccgttggatgatgtccgggcggtcatcatcgcggcgcgcggggtgacgatctcgtccaattttctttccggcctgctggagacggatgccattgtgctgcattgcgacgagcggtatcagccctgcggctggacggcaccgctggcgcggacggtggatttgaagacgtttcaaaatcagacggccaagcccaaacgcctgaatgaaaaactctggcacgagatgttgcgcggcaagacgctcaaccagtcgcgcgtgttgcagcacaagcagcttcgctcgccacacctggaactggcgctcaagcaggaggtgtttgacgagggcaattgcgcgcggcgttactggcaattgtattttccggccatcggctggtcgtccagccggcgcgaccgcaaggaggacaccgcgccgaaccagatgctcaattacggttacgcggtgctgtcggcgttgtgtcatcgcggcctgctggttcacgggctgctgccgcaactgggcgtgtttcacaagccccgtttccgttccgaaccgctggtgtatgacttgatggaggcatttcgtccggcggtggaattgatgctcgcggaattcatgttggagccggatgtttccatgaaagcgtgggccaaaaaggtcggcacggaattgcgcgagcggcgggtgcagcatcaggcttacacgctgaaattgatggatgcaattgacgcctcggccaattcgctggcgcgggcgtatgaggaaaattccgtgcagccgttctgggtgccggaactgccgttgctggcggtaaattaagtagcagccgacgtgagtcggctctgactgaataatgagcggattgacatccgctgctacggacggaacggatgaacaattcgccttttagtatgggctggttgatggccatgtttgatctgccggtgatgaccgacaaggagcggaagatggccacgcgcttccgcaacgacctgattgaccacggttttttgatgattcaattttccgtttatgcgcgcccgtgcgtgaattttgagcaattaaacaagcatcttggcatcattgaaaagatggtgccggaagcaggtaatgtgcggctgatttatatcacggatgagcaatgggccaagagcgtgacggtgattgggccgaattacgaccaaggcaagcgagcaaacaacgccaaaatccccaaccaagtggagttttgggaataaaaagaaccgagttgccgtgtgcaagcacagtgggcaactcggttcatattcagttaagccttccccccagaagtgcgtcaactgcaactaacataaccaaaatcaactggttctgacaaacctattttatccgatgcacttctggggggaaggcaaaacgtgtggattgccgataacatcttgcaagctattttatccgatgcacttctggggggaaggcaaaaccacatccggccgataaaccaccgagccgacattttatccgatgcacttctggggggaaggcaaaacatggactgggttcatcgtgcagccttcgcaattttatccgatgcacttctggggggaaggcaaaacagcaatgttgaatgcggcagaatcttgccaattttatccgatgcacttctggggggaaggcaaaacttgaggtgaacagtagtggaatgaagggtaattttatccgatgcacttctggggggaaggcaaaacccgtactgacgggtgccagaatcaaagctcaattttatccgatgcacttctggggggaaggcaaaactacgtgatgccgtctgcacaacgcctgcaaattttatccgatgcacttctggggggaaggcaaaacgttttttggtctgctaacagcggaaggtttattttatccgatgcacttctggggggaaggcaaaaccggtgccgcatcatcaacaacaaccttctaattttatccgatgcacttctggggggaaggcaaaacggccaattacgatccgggcgcaatcttgatattttatccgatgcacttctggggggaaggcaaaacgcggcgtgctcacgggctgatccacgccgtattttatccgatgcacttctggggggaaggcaaaactggcgtagctgattggaaagaacccaatgcattttatccgatgcacttctggggggaaggcaaaacgcggtccagtacggacccgttccctgtgggattttatccgatgcacttctggggggaaggcaaaactgcacagcccagcacaaacgcagttacaggattttatccgatgcacttctggggggaaggcaaaacgcaaatgcggacaggaacagatattcaggaattttatccgatgcacttctggggggaaggcaaaacaggaccctcagcctcaaacgtcaccagctcattttatccgatgcacttctggggggaaggcaaaaccatacccccggcgtcaatcgcaatatggtcattttatccgatgcacttctggggggaaggcaaaactagaaggcatttggggtgtcgcgagcaacaattttatccgatgcacttctggggggaaggcaaaacgctttcaccgcttcataatttcccgccgcaattttatccgatgcacttctggggggaaggcaaaacgttggtgctccgggtagcattgtccgatacattttatccgatgcacttctggggggaaggcaaaactaatacctaagacatcccatgttccaccccattttatccgatgcacttctggggggaaggcaaaacgcgtgacgacgccgacagacgaaccgtcggattttatccgatgcacttctggggggaaggcaaaacgacgggtccaccgtttctaccgaagatggtattttatccgatgcacttctggggggaaggcaaaactaggaatcaactcacagttgcaggcagtcaattttatccgatgcacttctggggggaaggcaaaaccgcgggtgatttgcaggctcgtgccgtgcgattttatccgatgcacttctggggggaaggcaaaacctcaaatgcgtccgcgccgacggcctgcccattttatccgatgcacttctggggggaaggcaaaacatcgaccttttccgggtcctgagaaactagattttatccgatgcacttctggggggaaggcaaaacgttcacccagacgcggaacagctcgatgctattttatccgatgcacttctggggggaaggcaaaacgagttcgtggaagctgaactgaaaggcctcattttatccgatgcacttctggggggaaggcaaaacctcgagttctcatgagtgccactcagcatcattttatccgatgcacttctggggggaaggcaaaactaaaaccggcggcgggcaagccgctgcggaatttaaaaattgtattggttcagccaatttctggccgaattattattaggcagcggcttgcccgccgccggttttaatttcccccgcccaaagcatctagaatccacagaatcagcgcgtttgcaccaagacgcggaaggcgcggcccaagtggtcgggatgcgtaagggtctggaactgtcgaacttgcttcgcatccagtgcggcgaaggatttatccgtcacagccttttgcaagacgctcgtgaggaactgcggctgggtgcaaaactggtctgtctgtaggcccgccgcctcgcctgcctgctggatggcggagaaatcgacgtgcgcggtcaaatcctgttcccccggctgcgccagcagatcatcgctgacatgatgcctatgataggcgcggagcgtcccacccgtgcggttgggggaaaactgttcgtcgaagccaaagccgtaatcaatggccaacagtttgccgcgcgccagtatgcctgcggcttcgcgccaccagttctcggcggcgggtgaatcttcaatgacgtaaccatcgggcaggacttccaaaagcgaggatggaagatggcggatggaagatggcagcaccctctccccgtccgatggggcgagggaattagacattcgcgtccaagtaaatttatcgcaggtgagcgtcacgccccattcgaaccagcttttttctttggcatcccagccaaaacggcggacggggaaggcgtcgagcaactcgttgccgaacagcactccttgcagttttgagttttgggtattgagttttaagttatcaaaactggtgaaccagcggacgcttgggaaactttttaaggtttcctgctgccatgcttgccgccgttctgacggttcgaggataacatattcgatctcagcaaggagttctgcgcggtgcgtttgcagccagcctagaatgtcgcgcgccagtttgccgtcatgcgcgccagcctctacaatttgaaatttaagatttgagactttaaattcttggagccattcggcgaactgaaaggccaacagttcgccaaacaaacagccggtactgacgctggttatgaagtcgcccgcctgtccgacggtgtccttttttgtctcgtaatagccagtttcgggacagtaaagcgccagttccatgaagcgcgcgaaggaaattgcgccgctttgctgaatttctgcacggatggcgtcagtcggcattttcattgcttgcagtgtaccatggcattggctagtgtcgtttcacgagagaggatttatggctaaaattgacgcgttttttaatctgatgttcgagcagaaggcctccgacctgcacatggcctccggtaacccgccgatgatgcgcatccatggcgaactccagcgcgtggattatccgccgctggaaaacgatacgctcaaggcgatgctctacgaaatcgcgccggattacaaaatcaaacagttcgaggaaaccggtgacgtggacttcggctacgaaatcccgaacatatcgcgtttccgcgtgaacttcttcaaccagaaaaatggtgtgagtgcagtgttccgccagattccaagccgggtgctatcgttcgaggattttgaaaagttggaggcgcccttgccagcggtgtttaagaaattcgcgatgttgcatcgcggcctcgtggtcgttaccgggccaaccggctccggtaaatctaccacgctcgcggccatcgtggattactgcaatcgcaaccggaaagaccatatcatcacgattgaagatccgattgaatttgtccacgaaagcaagaactgcctcgtgaaccaccgcgaagtcggcgtccacaccaagtcgtttgcgtcagccttgcgcggcgctttgcgcgaagacccggacatcattctcgtcggtgaaatgcgcgacttggagaccatcgaactcgccatcacggcggccacaacgggccatttagttttcggcaccctgcacacgcagagcgcggccaagacggtggatcgtatcatcgacgttttcccggcggaccagcagaacaagattcgccagacgctttcggaagccttgaaaggggtcgtggcgcagacgcttttcaagcgttcggacaagaaagggcgtgtggccgcgttcgaggttctcgttttcaacaccgccgttgccaacctggtgcgcgaaggcaagacgcaccagatccagggcatgatccaggtcggcaagaaattcggcaaccagcaactcgacgaccatatcatggagcacgtccggatgcggcgcgtcacgcctgaggacgcctacgacaagtcactcgacaagaaaaaattccgcccgctgctggcccacccgccggatgacgacgatacaatgtaatttgttatgcgccgaccggagctggaccaaatgttaacaacgatgctagcctcgcagccggaggtttctgatttgcttttcacggtggaccgaccgccacaggtcgaggcttacggcgaactcaagcccgtagtattggatccaccgattgaaaaactgacgccctttcaagttgagaccatcgcgatgaacatcatcggcgacaatctttggcacatcgaggacctactgcggcacggctcttgcgatgcgtcttattcgctttcagacaaagcgcgctttcgcgtcaacatattttcccagcgcggcagcttttccatcgtatgccggcagttgaacgcctcggtgccgacgttggagaaattaaaatttccagaaatcttcgcggagatacccaaagagaaaactggtctggtgctcatcaccggcgcaactggctccggcaaatctaccacactcgcggccatcctcgacgaaattaaccgcactaagccagtacacatcgtcacgctcgaagacccggttgagtatctgcacaagcatcaggtggccacgttcaaccagcgcgagctgggtttggattttgatacctacgccaacggtttgcgcgccgcgctgcgtcaggcaccaaaggtcattctcgtcggcgaaatgcgcgaccgtgaaacggtcagaattgccctcagcgcggcggaaaccggccatctcgtcttaagcacgctgcacactatcaacgcgggtgagaccatcaaccgcgttctaggtatgtttgagccggatgagcaggagcaaatacgtacgcggctttcggattcactccggtggattgccagccaacgtttggtaccgcgactcagtggcggacgatttgccctgattgaactgatgggctccaacctacgtactcaagaaaccatccggctgggcgaaagcgagggcaagacgttttacgagatcattgaggccagttatcccttcggctggcgtacgttcgacaatgcctgccttgaagcctatgagcagggacacatctccgaggaaaccgccgtactctactgcaccaagcgcagcgtcgtctcgcgtgggattgataacatcaagaaagctcgtggcgaaatgagtgccagcgccaactcgcttcgcatgaaaaaccttaaggctggcggcgatgccgtgaccacaccaccagttttaaaattaaaatgaatggcaccttcgattttgtcagcagcgcggacaaaccagcgttgattgctttttcaacgccggaatggatggatgccactaaagccgctctaaatgagttgggctacaaggtccacaccgccgccacacacagtgacttcctaatccgcttcactcaggcgcggtatcaggttgtgattgtggaagaacttttcggtgccaacaaaattgaagaaaacctcacgctcaaggcgctacaagagatgctggtcaaccagcgccgaaacgctaccgttttgctcatcggcgactcctttcaaaccttcacgccgatggaggccttcaagcacagtgtccacgccgtcatcaatagctcagagctattcctgctccggcaactgatcgaaaaggccgtcgccgacaacgacattttcctgcacagctttcgcgaaatccaaacccgcatcttgaccagcggcacccggttctgacgtgacgcgactagatcaggcgctcgtcgagcgcgccctctgcgacagccgcgaaaaggctaagcgtctcatccttgccggggctatccgcgtcaacggtcatcccgcccaaaaagccagtgacaacatcaaaaccgacgatgagattaccgtggaggcagcggagaaatttgtcagccgcggtggccacaaactcgaacacgcgctcgcccactttcaagtcaacgtcgccggcctgaacgccattgacctcggcgcctccaccgggggctttacggattgcctgttgcaacgcggcgcgcaaaaagtttatgccgtggatgtcggacaaggccagctcgcgtggaagctgcggagcgacccgcgcgtggtggtcatggaaaaaacgaacgcgcgcttccttaagccagaaagtttccccgcgctggccgatatggtcgtggtggactgctccttcatctccctcaagaaaatcctgccgcccgccgtgcctttgctaaaaccgggcggaaaaattgtcgcgctcatcaagccgcagttcgaggcgggtaaggcggaagccgacaaagggcgcggcgtcatcactgataccgccatccacgagcgggtgctggcggaactggaagaatttgtgtccacacagactggcctttgctggcgcggtatggttgaatcacccctgctcggccctgccggcaataaagaatttctggctctgattgaaaaagaccgctgaccatttccagcgcattggcctcgtcggcaacgcggagaaacccgccgccgccgccaacgtccgcgccgccgcgcagctcctgcgccgcgctggtaagaaggttttcgccgaagccatcaccgcgcagactgccaaactcaaatgcgagatcctgcctaacaccgccacgctggccggcaaggtggatctcctcctcgtcttcggcggcgatggcacgatgctccacactgcgcgacagattgccggttcggagacacccatgctcggagtcaatattggcggacttggctttcttaccgccgtgccatccgacgaactggccaccgctttaaaactgctctggcgcggtgaattccgctatgaagcccgcgcactcatcgaggccacgggcattgcgcatgagaaaaaaatcaaggccgttgcgttgaatgacgtggtcatcagccgtggggccgcctctcgactcatcgcgctcgacgtgagcgtgaatggcgaacacatcacgcgctaccgctgcgacggtttgattgtcagttcacccaccggttccacggcgtattcgctcgcagcgggcggtgccatcgtgctgccgacggcggaggtgttcgtccttacgcccatctgcccgcacgcgctctcgaaccgttccatcattttaccgctatcggccacgctgcgggtaaaggccgtgaagaccgagccagcgaccttcctcaatgccgacggccagatcatcggcgaattgatgaacggcgacgaaatcaccattcgccgcagccagagcacggtgcgccttgtgcatctcgcagacggctcatttctggaagcgttgcgccgcaaactgcattggcgcggaacttatttgtgaaggttgaaggaagaattatgaattatgaattaaaagcaaagacgacagccgtcaacgcggtaattattcccacttcatcattcatcattcacacttcatccttctgaaacatggttcgtttaaaagatattgctcaaatcgtcggcgtctccgtgatgaccgtctccaaagccctgcgcgatgagccggacgtctccgacgccaccaaggccagaatcaagaaaatcgcgatggacatgggctatgtccccgactccagtgcgcaaggtctccgcacccggacgactaagctcttcggtctggtcatcccgtccacgaccaacccgatttacgcgcgcatcgtgtttgccattgaggaacgcgcgcatgatctcggctacgacctgcttctgtgccatacttataacaaaccggagcgcgaagatgcctgcctgcgccgcctgctctcgcgtcgcgtggatggattattcatcgccccggtctatcgcttcgaggcggaggcgcggatctatcaggaaattgtcgtgcgccagactccgactgtcctgctcggagcgcccgcaccgttctgcaagaattttcccgccatcgagattgaagaacttgtggccagctataacgccacgaaacatctcatcggtctcggccacaaaagaatcgcctacttcaccggcccacccacagccccgtgggcgcatgaacgctttgaaggctttcgccgcgccctgcgcgaagccaacctcgaggtagacgacaagctcgtctttcaggccggcaacaccattgaggatggcaccaaagccgcgttgcaaatgctgaacgaaggcattcaacccactgcca

SEQ ID NO: 2502 - DNA, 14441 bp, synthetic construct
  variation 6290..6299: note = n is a, c, g, or t
  source 1..14441: mol_type = other DNA
  misc_feature 1..14441: note = Synthetic
aaggcgatgcccgcacgattgagcttcaaaccgggaatatgtccgaccgcgatcccgacataggtcacggcgaagatcgccaggatgattttgaccggctccatagttgctgcccgccaccttatgctttaccgccggcgcacgcgaatcaaattcgtcctgccgcgcctgccccgccgacctgtctcggcgaagcaaagcggagacctccgtcccctgccttccagtttcagctttcagaattttagcttttattttcccccgccgggcgtagcatcgccccatcaccccctgtcgggaaaactggaaacgtggattggctatgaatgattacgttctgaataaaaaaccggaaccggctgcaaatgatatggtctgggcttttgacctgggcaaaggctccatcggcgaggccgtgcggcgcggcaacgaatttctgcacaaggcatccctgcttatcccggcgaaatttgccgaaaccaaaacagccgccggtcgccgccggatgtggcgcacccgacaggcgcacaaggcgcgcgagcaatggctggaaaaagtcatgcgcgacgccggcatagagattctcaaaggccgacaggtcggcaaggtggatggcaaatggacagaaaccgccaaaggcgatccgcgcttggaacgggaattccccgcgccgggtgacgacacctgttacacctcctgcctgctccgcatcaaattattgcgcggtgaaaaactggagccgtggcagatcttcaaggcgttccattccgcgattcagcggcgcggttacgacaaggacatcccgtggaaaacgcgcaagtccagcacagtcaaaaaagatggcgatgatgaagatgtcggcactgaaaagcgaatgttggattttgaactggcactgggaaaaatggctcccggtaaaaccgaattccaattccccgcctatttcgatgcttggaaaatgggattgtggaatcctgccaaaccagacgaattaaaaagccggactgactgccgcgctgaaagcacccgaaatcaaatcgtttcccgcaatcgggtggaagatgaaattcgcgaaatgatggaaggtgcggccaagcattatcccgcactggcaggcaaggcggattatctactctatgggccaacgggaacatcttacgcctccaccaagccggaagttcgtaaaaaatttccaatgcttaaattgcgcgaaggagcggtcacggattggcagggggttcttggccagaagataccgcgttttgaaaatcgtattctaaatgattgcgctctgattccccggctgcatgtatgccgtaatccaagccggactgaatacaaagaattgccggaggaaaagcttcttccggcgcaagtcaccttcctcatgaagttgaagaatatgcgcgtcgaagaaaagacaccgcagcgcaaacagcgtggtttgacagcagcacagatcaaagagatttttgaaaaatataatccggcacggaaatacagcctgactccgactcaatggcgaaaatggtgtgaggagtttgatgtcattccgattaccgatgcgagcgaaaaaggaaaaagagcaagcgacgaagccgatgatgaaaagaaaaagggagaaaagaatatcatcgaagcaccggcggacagcgggcgcagcagattttcacgcccggcattgcgaattctcaaatctttaattttgagtggacagaagccgtcagcgatgcaccaaaaactacttgggcgcgacaccagtttgctggctgaaattggaatggatattctggataaaccgccgatcaaagaaaaaaaagacgcgagcagcaatgttgttcagaattatacgaaacaaccccggccttggctgttggtctcggacttgtcatttctactcgcaatgcggaaaacaggagcaaacgaggatacatgggaagacctgtttataccgaatcaacgactggatcaagttgttcatgaaatcactgccggcggcaactctgacgcaaaagcagagcggcaacggagagacaaagccattcaaaaactcatcggctcgcaaaacgacccgaaagttcgtcaccggcttgcaacattttgggagcggctgcagcttttggaaaaagaacacggaaagccggaacaaattgttttggaatttgttcgtgaagatttcatgggagaaaaagccaagaagaaattggaacagtttcaaaaagatcgggctgaatcccggaagaatgcgcgcgatcatggcggactaaagtttgaactttatcaagcccaaggcgggctttgtctctacggcaaacaagtcatcaaagatggaaaatgcgtttatcttgaaaatggtctgccgatgccaggcacgccgggatgggacaatttggtcattgaccatattgttccgcgtgaagctccttacaatgggccggacgcgaccgtgaattatattctgaccacatcggatgccaataatgcaaaacgcaaacgcactccgtttgactggttccagcaagaccgcttggccgaatgggatggctataaaaatttcgttgcatcgaaaatcggcgctcttggcggcaagaaggttcaattgctgactcgttccgatgcggcagaactggttggcaaatacacctcgctggcggaaacggcatggatcgccaaactggcgcaaacgctgattcgcctgcatttcgtctggcctttggaacatgagcgcggccaagagcgtgtaaccgtggtgccgggcggactgaccggacgcatccgccggaaatatctgctgaacaccctgcttgatgaacggttcaaaaatctgccaacctgtcagattaaacccgaagacgaagaggacgcgggaaatgaccgcaaagaccttcgtcatcatgggttggatgcaatgttgatcagttttttcccggattggatgcggaatccgcacaagggagatttctttcgctttccacagccattggatcagccgtttccgggcaagcgaaacaaactcgccgtccgcgaatttttcaaaaaacaacttgatgaagtcctgccggaaaatcttttcttggaaaaagcgaaattggccgaaactgcctacgggcgttcgttccaaccggaagaaacagcggccaatggcgagacggtcaaatacaaaaccgccaaactgccacttgtcgagcttgcttacataaaagacccggatggcaatgcgtcttttgactacacgcacgcgcgccggacggcgcgaggcatttcagacgaaaaaatacgcgcagttgttgaggagtttctaaaatgccagcgagcagaagcagattgggctgtattttgccagaagttcgaggcagagcttgccagccagcagacacccggcaaggccgtcaaaatagaagtgcggaaagttgaggaagttcgtgctcatcgtgtttccgtcaaggatatggcgtatgagcaaggcaactcacgccaatatgatgttttgtatgccacagaaaatgtgaacgagattgtcgcagatttgccggaacaaaaaatcatcaaagcaaaactgcgggaatttttcgccggcactccaagcgaggcacaatggaaaactttcgccgaaactctcaaaccgattgatcggtgcaaattgcgttcagaatttgatgagggcggaaagaaaagcaaggcgcgcactgtaaagttcttggtatttgcccatcgtccgattccgatgaagttcaacctcgaaaaggctcatgcacgcatagataaaatttgcgatgagtatgtccgccagcgtttgcgtgctttcatcaatcaaaatccagtgcccgaccagtcagcttggaatgccttctgcgattcatttgcgcatgagcgaaaagatgaaaatggcaacttactcaaggatgccaaaagtaatgttctatatggcgcggcaataaaaaaggtgcgcgtcaacgatggcagtcctgacgaatacaaggatttttcaaaagatggaaccggcacgttttacaaaaacaagaaggagcataaaggccagtttgtatatgtcgtggatgacggcacgccagacggcgcggtcaatgtgcgtcccgtatatgtgtttgaatctgtgcaggcagttaaaacggccgtggaatcagttccaaaattcaagagcctcacaggatacttccaatccggatgcaccatcggcatcaaggaacctgtgccagcggatagttacaaattagtggtttggaatgacgagaagaaaaagcgacgaattgcggctaccataccgctggccgccaatagcaaattcatgttgagcacaattattacggcttcgcaggcagccgaaatgcagacggctgatggaacggtgattgtcttctcgtcgcttgaaccgttgatcaaagctggattgcatcgcgtgtatcggaaatctgaaactgaatgaaaagttatgagccaccatattcttcacgtcttccaacacggtgcgattttgggtcgggaacgcggtttcatcacctgcaaggcggacgggcaggcggaacggcggctgccgttggatgatgtccgggcggtcatcatcgcggcgcgcggggtgacgatctcgtctaattttctttccggcctgctggagacagatgccatcgtgctgcattgcgacgagcggtatcagccttgcggctggacggcgccgctggcgcgaacggtggatttgaagacgtttcaaaaccagacggccaagcccaagcgcctgaatgaaaaactctggcacgaaatgttgcgcggcaagacgctcaaccagtcgcgggtgttgcagcacaagcagcttcgctcgccgcatctggaactggcgctcaagcaggaggtgtttgacgagggcaattgtgcgcggcgttactggcagttgtatttccccgccatcggctggtcgtccagccggcgcgaccgcaaggaggacaccgcgccgaaccagatgcttaattacggttatgcggtgctgtcggcgttgtgccatcgcggcctgctggttcacgggctgctgccgcagttgggcgtgtttcacaagccgcgtttccgttccgaaccgctggtgtatgatttgatggaggcgtttcgcccggcggtggaattgatgctggcggaattcatgctggagccggacgtttccatgaaggcgtgggccaagaaggtcgggacggaattgcgcgagcggcgggtgaagcatgaggcttacactttgaaattgatggatgcggttgacgcctcggccaattcgctggcgcgggcgtatgaggaaatgtccgtgcagccgttttgggtgccggagttgccgctgtcacccaattaagtaggagacgaggtgacgaggctcaaatcaatttggagtttggttttcagatttcggaatttaagatggagcctccttacgtcggctgctaccagcggcagttatgaacagttcgccttttagtatgggctggttaatggccatgtttgatctgccggtgatgaccgacaaggagcggaagatggcctcgcgctttcgcaacgacctgattgaccacggatttttgatgattcaattttccgtgtatgcgcgcccgtgcgtgaactttgagcaattgagcaagcatctgggcgtcatccaaaaaatggtgccagaggcgggcaatgtgcggctgctttacatcacggatgaacaatgggccaaaagtgtgacggtgatcgggccaaattacgaccaaggcaaacgtgcgaacaacgccaaagtcccagatcaagtggagttctgggaataaaaaaagagcgttcggacgtgacaaagcagtggtccgaacgctctaaattcagttaagccttccccccgaaagtgcatcaactgcaactaacataaccaaaatcaacggcttctggcaagcctttttacccgatgcacttccggggggaaggcaaaactgaaaccggcggcggggcaagccgctgcggattttagatttgtcatgatccagacaatttccagccgccattttttccggcagcggcttgcccgccgccggttttaatttcccccaccccggcaatgattcttccaaaacaaaaaaacgcttttagaattttatttttcagagccgcgtcaattttttgaaagaaaacagcccagccaggattggctgggctgcattcgtcaaaaggcttggggaatcagcggccgacccacagcacgtcgagattgccgggaccgccgcgaccgccgccgccgcgccgttgtccgggaggcgcattggtggccggtnnnnnnnnnngaagccgcattccggacagaattttgcgccgtgagtttcggcgctgcatttggggcagaccagttgccggtcgcgtttgacatcaagcttggctccgcgcgacttgccttcggcctaccggtcaatccagaccatccgctgcccggtagtcaaacccatgtgaaaaaatcccacgcgacaaggtctggccagccgctgcgagttgggacaactcgcgctccggccaaattgggacactgccaagcttcaaagaaacgtcacggttcttcaaagaagtgtcatacttctttgaagatctgcgaccggtctttgaagaaatgtcacggttctttgaagatccgtgaccgatctttgaagagatggcgcagttctttgaagatccatgaccgatctttgtagaaatgtcacacttctttgaagatctgtgaccgaccttggaagtaagacgacaaattaagccagtatggcgaaaagtgtccaaacaacgagatgcaccatgtctcgcaacgggacaatggctatgcgggtatggtttgcgccggaagacctcaagagcggaaggaaacttcacgagcagctttttgaagccatccaaattcatgaccgtctgctagtggtgctttcggagcgcagcatccaaagcgaatgggtgatgaccgaaatccgcaaagcccgcgaggcggagaaaaaggaaagccgccgcaagctgtttcccatccggctgaccgattttgaaaccttgcgcgactggacttgttttgatgccgacaccggcaaggatttggcggtggaagtgcgcgagtatttcattcccgacttttccaattggagaaaccatgatgcctttgaatccgccttcgcccgcttgaaaaaagacctggaggctgaaaattcaaaaaaaccatgaaccagctttccggcctgctggagacggatgccattgcgctgcattgcgacgagcagtatcagccttgcggctggacggctccccttgcgcgggtggtggatttgaagacgtttcaatatcagacagccaccatgcccttgtaggagccgaggtgacgaggctcaaattaaaaggagattagagactcctcacgtcgtctcctacagcttcgctcgccgcatctggaactggcgctcaagcaggaggtgtttgacgagggcaattgcgcgcggcgttactggcagttgtattttcccgccatcggaacatccaattaactctcacttggaaatcccttcggcgttgatgtaggcaacgccaaccagaaactaaaaacccaaaaaatcatgaatcgtaaattataaattcccctgaggcagttgttgaaaccacttcaaccgcgtggcatgcatctttcgccagttgaacagcacaatcgcgcgggcctgctgctcaggcgtgaattcagaaaaccccttgtcgtcaccccagccgttcgtcagcgaaaccgccgcctgataattccgcacgccaaaatcaatccatggccacttcgaaagcggccaccagcataccgaccagagcacgttgcgataattcgggaaaatgccgtaagaccagttgagcggccggcaccaactgtcctgatacgtcccgtgcgacaccagcgcgcagggcacatcgccaaacgaaccgagatcgtccgaactcaacatcgcaatccgcgtgtgatgccggcgattgtattcgttgaacaaggcggtgatgtcgcgaacaaaccgcatcatttcgcgatcggcatagccgggccacgcgtccgtgcccaactgcccgcaatgcatgtgaaaggtttcgtcccagaccatggcgtccacatccggcccgaactcctccagcatggctttggcatagttcatgtaaaaagcgcgcacgttcggattgagcggattttgaaagtaactctttcctttcgaatccggtccctgccatccaccatagcgcagcacgcgatccggggaaaaatccggcaggccgtcgcccgcgttgaggccgtcggcgaaataaatcccaactcgaaatccgcgcgagcgcgcgtatcgcaggcgttgatgctcttcggcgagcgacatttttcttggtttggagttgccgaatcccgattggacttttgtcccgccaatcatcgtagttcgctgtttcgagacgttgtcgtagtttgaaaatgacgtccattccttgtcgaacttgcccgttttggaatcaaaacaataacggccgaggaaatcataacagccatgcaggcaaaggaacgcctgccgccggtcttccctggaaaacgctgacgaaagcgcgtcaatgtcattgaaccacccctgccctccgtcgctgagataatcgaaatccaccagcgcaatgtcgtgcagccaagccggacccggctcaacatctgacaagaggattcgaaaaaacgcggcgagcgaatcatcggccgaacctttatgaaccgcgacggcaatcgtccgcttttcgcaaccgttttccagacctcccttcgccggataagtccactcaatggcgccggagcggaaccgggtcgagaagtaaggatctgtcgcaatcaggaggcggttgttcttatcggcaggcatgctaatcatgggaatggcgagcgccacaccatcgcccggaagcttgccggccagccgataaatggccgcttcatttgtgcctaactccgcgccggtgccattgaccagcggcagccacatattggcgggaagcggccctggacagctttggagtgacaccgtcagatcagaggccagcttcgcattgccgtggatttccacgttgcgaagccacacgagagttccgtgatttttggcaaaggaatggtgaatcgtcaccgtcaactccggcactcccggccaccggtaagtgaagctcaattggccggcggcgtttgaaatctgcggggattcgagcggaaggcttatgtcattacaacgaactttcccggcgaaggcgcgtggagaatttgtcactgaattaaactgtccggtccagccaacgaggacgccgttggtattgaacgtcagccgggaactgccggaacttaaaacgaagtcagacgcccgcacgccgcaaacagccgatgcgaacaaaagaatggcgagacaactcctgaaccccgtcaagacgcggaggggcattgatttcatctttgtaaaagaacgattcactctaatgaagtcaagccagcgattctgccatcaccgattcaaactgtctataaagcaagaatacacaggctcgattttcgggacagcaggattaattttcttttgcgctggcggaagacaggcgtagtatcgcgaacagacaaccaaacaagccggctcacttgacggcttcaaatcggaatcgggatatgaaagattacatttttaaaaacaaaccggaaccggcatcaaatgaagtggtctgggccttcgacttgggcaaaggctccatcggcgaggcggtgcggtgcggcaacgaatttctgcacaaggcatccctgccctggcgcgacgactcgtctcgccatagcgcagcgacagcggaagtgaaacgaaggcggctcatcccggcggaatttgccgaaaccaaaaccgccgccggtcgtcgccagatgtggcgcacgcggcaggcgcacaaggcgcgcgagcattggctggccgttgaacaccaaatttgatgttgctcgtttatggagtttgaagtagttttctatgaaactgtgaacggccattcgcccgtgcgggagtttctgttggaactcaaggccagcgatcgcgacgattttgcggcggtggcggcgggactggaaaaactgcgcaaccgccagtatcaccgcgagccgctgaccaaggcgctgggcgacggcctgtttgaactgcgccatgtcggcaagttgaacacacgcgtgctgtggttttttgtgaaaggccggcgcatcattgccgttcatggcattcgcaacaaaggccaggccatcccggcccgcgacctcgacactgcggagaaacggatgcgcgactggcaggaaagaaatgatttatgagcaaaacgaactttgacctctttttggaagaacagctcaaagaccccgactttgccgcgcggttcaaacgcgcgggcgaggcatgggacgtggccttgcaacttacggcgctgcgcgaaaaagccggcctttcccaaaaagacctcgcgcgcaagctccacacctcccagcagcagatcagccggctggaatcgccggcctacgaaggccactccttgagcatgttgcgccgcgtggcggaagtcctcggcgtcaccgtccgggtcaccctcgcgccgaagggaacctccgaacccatgattctgtcggaagccaaaattccttaccgcaccggcagaaaatcatgaactctgaaaccatttgggcctttgacctcgccaacccgccgttcaacatgagcgattggggcggcgaaaacctgcggcaggacgtgccacctgctgtagtgtatgctgtccgtgaaagccaaccccaaagaagactaagcgatgaatgcgaaatcagatttgtcgccgattaagcagatacccatcatcgaggtggcgaaaagactcggcattcaggttcgtggaacgaaggcaatgtgcttcatggggcatgacaaagcatcgccaagtctgtcgtttcacaagaaatggaactcttggaaatgctttggtgcttgtggcaaaggtggggacaacattgcattggtgagggagaaggaagggctggatttcaaaggtgctcttgattggttcgcgcgtaactttgccgttgatgtctctcggccatatcgcggtcagtcgcgtcgaagtcgcctggcaagagccaagaagcctgtcgtagttcaaacagagataccggaacaacaggagtttgccgccgaccctgagctttatgaatggctgattggcaagtgcgcctcggtttccaacccaaccggagtcaactacctggatacgcacgccatctcgcaggaatgcgctacgcgtttcaacattcgggaactacgcgacccagtgcgtgcgtttcgcaagctcctcgaaaagtggggcgagcagcgcgtttaccgcagcggggttgcttggggaagcgatgggcgtccattgcgcctagtttggagttcatacgcactcctatttccattctacgcagaaggagttgtcacctacattcaagcacgcatgtttcagggcgaccgtaaatttctaaatccccgaggtattgccttaccgatgttcaatgtggacaaacttcgcgaactgaaacctggacgcttggtgcatctttgcgaaggtgttcctgacgccgtcgcactagagtcgcaaggtttaacggcagtgggcattttgggagcaaactcttttcgtgctgagtgggttgatcgttttctaaagttcaaggtggtcgttctcggtgacggcgatcctgctggggcaaagtttgcgacggccatttccacgttcttcatggaacgtggcaaggcggttcagtgtaaaaccctacccaaaggcaaggacgttgcggacgtgctcacgcaggctaggaggtccaaatgagctttcttgaagatgtcacagaccaactgaatctacgttgggcttgggagaaagtgcgacgcgcttcaacgccgggagatgtctggattgacgaaatcgaactcgccggtttcgaggttcagttggagcgcaacctccagagtattgcggcggagatacgaaaagggcgctaccgccttcgtccgttgcgaccaatggcattccccaagaacccgaataaggacggcgagcagcaagtgcgccagtatttcaaagtcgcagttcgtgaccaggtcgcatggacggcggtggtgaacgtggttggtccgcatcttgacctgctaatgcccgcgtggagttatggcaaccgccttttccgcagcatttgggtggacgaggatgacggggttcgtcgccgaaagattggccggtatcggcattcatccgggcgaatatacctatcgtttgggcaaagctggccggtgtttcgccgccatgtcttcctagcgacatcggcaatgaccgccaaagcaggaaaatcgtcatcgagtcaaatgacggacgaggatgccaaagaactggaattgcaggaagacccaaagggccaatgccgctgccccttcgttcggaaggagtattggaatgaacgcgagccggtggtaggcaaagaagatctgttttggtgcagcgtcgatttggagaaattctatccatccctaaagctggatgtaatccgtcaaaacattgttgagcgccttccagcggactacacaatcgaggccgaggctttgctcgcttcaatgctgcacttcagggtggatacggccgggtgggcgaaggaggaattgaaggcaattagtctcaagccacggcagcgagcattcaagggtatcccaactggcctatatgtggcggggtttcttgccaacgcagcacttctcaaagtggacctcgatgttgctgaacggttgaagaaaagaaatgtcgcccattttcgctttgttgatgaccacgtcgtcttggcttacagcttcgaggatttggtgagttggattgatgagtatttggatttactggccgcttcaaataccggcgcgaaggtgaatcctgagaaggttgagccggaggcattggcaacttttttcacttcaagaagcagctctcggaaaagatataaagatgatactggcaaaaggcttaaagcggctaccgtcgcagctgaaaaagcctgcaagctgaatccccagttcccgactccgttgatgaccaaaactctcgcgttagtgtcggctattgcgagaaccgatttcaatcttctcgaagaaacggagctggttgcgcttaccgatcaacttgaacacatgctcttggttgagcttcccgaagccgagattcctgagaagacacgactgtcattcgccgcaaccagactcatgcggttggcggagtgtcgcctttccaacaatgcccggtcggctgagttggcctgtcgccgcgaggcgctagatgccgagttggctgacagtgagctgccacccgagcgccgcgaagtgttggaggtggagaacaaagagaatcagagttcattgcaattccaaaacacgaaactcgaccacgaagtcggcagagcattcagcctcctgcgtaaagtgctccaagagcgacctgatcgtgtgcgactttggacgcgagcgattcagatgtgccgtcaaaccggggtgcaaggactgaaggacattctggaagacatccacaagggtgaacgtgagcacaaggcgatggagaccaccttggctgctgagtatttgatgggcaacacactcgcactgctgggttctgaagctctgattgctgcacgaatcgtgtgtgatcccgaggtcgcggagtggcgcaggaaggcggcaactgcatttctgaaggatatttctgctgcaccaattaaagcaccagcaacatccgggcggcggtggtttctgaaaaccagttgggagcaattctgcttcggcctgttttgtgcaaatttgattctcaagtcatcgcggccagaggaagatagcttcgacttccggcttccagacgaattcctcagaattggtgagcaacggctcggcagccaggatgaagctgaatacccggtgagttgggcgtggtgggctgcgcgctcgtctttgcgtgagctttcgtcccgcgccgaaggctgggttgttgagattggtcgccgactgccacctaccgtggagtcgtattctttctggcgcttctttccgtttgatgttccgcgtgacgtattgggggccatgcgttacgaccgaacccatgcaaaaaatctctctcagatggctggctggtggcacgatgcactcagcgcacaacctaaaaccgtaatctcgcttccgccgaaccgcatgaaccgtgacgttgcccgcgcaataaagaatatcaagtctgccagcaacactcggtctgtgtcgttgcaagagtggtgcaacgagattcaggcaacgtcctaacagaacacggcagacccgctaaccggcgagtgggctgctttggaaattgttcgccaaatt

SEQ ID NO: 2503 - DNA, 6831 bp, synthetic construct
  variation 6568..6621: note = n is a, c, g, or t
  misc_feature 1..6831: note = Synthetic
  source 1..6831: mol_type = other DNA
gcaaagaaatttgaccggaaggatttgaaccttgaccacgtcaccccgcgcgatcgcggcggcccgacgacgtgggaaaacatcgtctgctcctgcatcacgtgcaacacgcgcaagtccaaccgcacgccggccgaggccggcctgcacctcttccgcaaacccaagcgcccgaaatggcggccgttcgtgcagatcaacttcacgctgcaacaccacgacagttggaaacatttcatcgacctcgcctactggaacgtggaactcggcgaggacatcgggtcgtagccgcgcacgggccaaatcccgcttgttttttccgcgcggatggacgaagatgcagcaccgattccaaacgcggccgccaccagcgattcaaacactttttatcatccaaacactttgccgggccatgcccggacaaaaaagggagccggctcgcgtcacgagccggctcttgttagtgagcggcggttatttgaccgccactgtctgcggcaccgtttccggtgctgtctgtgaaaccgccggagtggtctggcccttgcgggtcaggccgctcaggcgtgcgctggcttggacataacccatggccgagtagaatggactgtcttctccgtcgtccgggtcgcctttgaccgagttcaccaccagtttcgtcagtccatgactggacgactctgattgccgccgcgtatcgcgtgcctgtttcaactgatcgcgcaggctctccacctgctgctgcgaatccagcgtcggctgcactttgccctgaaactgcgcgagagtcatgccggcatacgatttggttggccgcatcgtctgccaggcactcactactcgttgcgctttttcagcgatttttctggagctttttgtgctcactttttccttcacctccttcaggttgatggttatggtttgttggcttactccggacattcgcgcccggagaaatctgtaaaaacatcaaataataaaaaattattttgcaccggcttctcgttgccaccacatctggtagcggtaacattcagaggctaatacaaccggtgggtgtcagacaatataaatatgagacaatgtagagaaatcatttattgacgtttaaccattttatcactaaatttgcaatcgcatgacgtgaattccaaaactttgcagcaatatcaattactgcgatatgaaattctgagtggccgggttggacattgagtcagccatgtcggccgagtcttgggctggggcagcctcaactgtggccgcatcggccagcgtccgagccagaccggtttcgacacaagccggggctgccattagttcaggccaggccggccttgaccaaaaccgggttggccagcaccggagccaagccggcttcgacacaagccagaccggccaacgtcgaaagtcggcctgcctttgatcagagccaggctggctgccaccggagccacgctggcccgaactgcgaccagcctggcttgaaccgaagccagctcggcttggaacggggccaaacctgttggcgatgcatttagcgcagccgtccccgatgcgcgggccggaaactgacggctggacgcctgcgctaaataattaaagccggtggcggttacgctcccctgccctgttgcatcgtttcggattacagccggtcggttggatggccaaaatgaactgttgccgtcatcccgccagcaggcatagcatcattcgcgcgcgagaaaccggttgttaaaaatatgataacttatgaattaaaaaaggtggcgctccaaaatcaaactgacgaaatcgtctgggcgtttgatttgggcaaaggctccatcggcgaggcggtgcggcgcggcaacgaatttctgcacaaggcatccctgctcatcccggcggaatttgccgaaacacgaaccgccagagatcgccgccggatgttccgcacccgtgaggcgcacaaggcgcgggaaaaatggttgtgtaaagtcatgcacgaggcgggcattgaaattttacatggacgcaactatgacgcagcgggaaactggaagctcggtgaaccagcggaaaagcgtttggaacaggaatttcccgcgcccggcgatgacacctgctatacctcctgcctgttaagaatcaaattactgcgtggtgaaaaattggagccgtggcaggttttcaaagcgtttcattccgcgattcaacggcgcggatacgacaaagatattccgtggaaaacccgcgaatcacgcaaccctaaagctaaagacggcgatgatgacgatgccggcacggaaaaacggatgcacgattttgaactggcactggaaaaaatggctccgggcaaaaccgcatttcatttccccgcttattttgatgcccatgaaatgggattgtggagtccagacaagccggatggattgaagttgcgaagtgactgccatgcgaaaactacccgcaatcagattgtcccacgcaaactggtcgaagctgaaatccgccagatggtcgaaggtgcagccaaacattatcccgcactggcggacaaggcggattatctgctttatggtatagcccaacaaagctacgcctcttacaaaccggaactgcgacagaaatttaagctgcgtgaaggcggcgcaaccgactggcaaggcgtcgtcggccagaagattccacgttttgaaaaccgcatcattgccaagtgtgctttgattccccgcttgaatgtctgcaagctgcgcgaaggcgaaaaaggccagccgcatgaaaaatctttggtggcggtggaagtcgcctttttgatgaagctgaaaaatcttcgcgtgcaacgacccggtggcaatggctggctttcagcggaagaaattcgcggcattcttgaagacccgaaacgcaaagattggaaaataaccgagtctgtttggagaaaatactgtgtgcgaattggcgcgggttggcttctgggacatgaagaggtgaagtctccacgattttctggccgcagccgattttgccgcccggcacttgaagtcttaaagcgattgattttgtctggccaaaaaccctcaaagtttttacaggaagaaattgtgcgcctgaatggaaacaaagacccgctcaaaggcttggttgaagccgacctgaaattcatcggcgatatggcggcaaagaacgatgcttgggaaggtatttatattccaaatcagcagttggatgcgctggtcgagctttccagcgactctgccgaagccatcactactttgatcgggcggcaaaacgatccgattgtccggcatcggttgagcgtattttacaaagggttgcgtgagcttgaacagaccacaaaatcacggcctgaccaagtggtgttggaatttgtccgcgaagacttcatgggcaaaaaagcgaagattgaatatttcagcttcataaaaagacgtgccgaggagcgaataaaagcccgcgaagaagcagccaatgctggtgccacagaaaagtcggctggactgaaactggaactgctacgcgcccaagatggctgctgcctttacaccaacgaaggcttggttccatcgaggctggatgaataccagattgaccatattgttcctcgttccaaaggcgggccggatgccgtggtgaattatgcgctgacgacacaaaaggccaacgaagccaaagccgaccggacaccttacgactggtttcatcaggaaatgccggacaagtgggatgcctacgtcaatcgcgtccgctcacgagctacgcatttgcggaacaagaaagttcaactgctcgttgccctcaacgccgccgaacttgctgacaaatataccgcgctggcagaaaccgcgtggattgccaaactcgcccaagccatcgtcggtttgcatttcggctggcgcaatggcgtggacgaaagcggaaacaaacgggtcacggtgatttccggcggcctcaccggaagaatccgccgcaaatacgcgctcaatcaaatcctgaatccaaacgcaaaaaccgaggaagaagcggaaaagaaaaaccgcgatgacgaccggcatcatgcgctggacgcgatggtgatcagttttattccaagctgggtgcgggatgcgatgaaagaaaaattctttcgcttccccgaacccatccaccaaaacgccaaaggattttttgaaaaggaaattcagtcagttaaaccccgaaacattgcgctccaaaaggctgcctttgaagaaaccatttacggccagcgaacgattgacggtcacaagttcatagttggaagggaaagccttgcaagtctggcgatcaaaacaacgcagaacagtcaaaccatcaaaaaagtttctgacattgaatttggtcgcatcgtggatgcccggatacaaaaggacgtgaaggagttttgggaatcaaaccccgccgccactttggagtcttggaaaaaatggtgcgctgattatcggctcggcgcaaatggcccactggttaatttcgttttggtaaaaaagtcaaaagaggatgctgttgaggaatacaaaaatgtttccaaggccggagtttcatctgaacgcgggcaatacaagcggggagccaaacaccgaggctattatatttatgagcgcccggctcccacgcgcaaggagccaaacaaaatgcaagttgaagtttgtcccgtctttgttttccaaagcaagaaggctgtgcaagaaaatttgctaaagcaaaccgggataaaaatgcacggctattttgagtcaggttgccaagtgcgaacgcaacgagaatgggaattccaaggtaaaaagtatcctgcggatgaattcattttgggcagcgtttgggcaaatcgtaatgccaagtttaggcatccgatccaccaagaaatcggcccggttggactccgcattttgcttgatgcaggttttgaacgcatttgattttaatttatgagccatcacatccttcacgttttccaacacggagcgattcttggccgcgaacgtggcttcatcacctgcaaggcggatggacaggcggaacggcggttgccgttggatgacgtccgggcggtcatcatcgcggcgcgcggggtgacgatctcgtccaattttctttccggcctgctggagacggatgccatcgtgctgcattgcgacgagcggtatcagccctgcggctggacggcgccgctggcgcggacggtggatttgaagacgtttcaaaaccagacggccaagcccaagcgcctgaatgaaaagctctggcacgagatgttgcgcggcaagacgctcaaccagtcgcgcgtgttgcagcacaagcagcttcgctcgccgcatctggaactggcgctcaagcaggaggtgtttgacgagggcaattgcgcgcggcgttactggcagttgtattttcccgccatcggctggtcggccagccggcgcgaccgcaaggaggacaccgcgccgaaccagatgctcaattacggttacgcggtgctgtcggcgttgtgccatcgcggcctgctggttcacgggctgctgccgcaactgggcgtgtttcacaaaccgcgtttccggtcggaaccgctggtgtatgatttgatggaggcgtttcgtccggcggttgaattgatgctcgcggagttcatgctggagccggatgtttccatgaaggcgtgggccaaaaaagtcggcacggaactgcgcgaacggcgcgtgaagcatgaggcttacacgctgaaattgatggatgcgattgacgcctcggccaattcgctggcgcgggcgtatgaagaaaattccgtgcagccgttctgggtgccggaactgccgctgttggcggcatcaaattaggtagcagcctaacgtgagttggctctgactaaataatgagcggattgacatccgctgctacggatgctcggatgaatgaacaattcgccttttagtatgggctggttgatgaccatgtttgatctgccggtgatgaccgacaaggagcggaagatggcctcgcgcttccgcaacgacctgattgaccacggctttttgatgatccaattttccgtttatgcgcgcccgtgcgtgaacttcgagcaattgagcaagcatctggtcgtcatccaaaaattggtgccggaggcgggcaacgtgcggctgctctacatcacggatgaacaatgggccaaaagcgttacggtgatcgggccaaattatgaccaaggcaagcgcgcaaacaacgccaaagtcccggaccaagtggagttctgggaataaaataagagcgttcggacgtgcaaagcagtggtccgaacgctctaaattcagttaagccttccccccgaaagtgcatcaactgcgactaacataacccaaatcaacggcttctggcaagcctattttacccgatgcacttccggggggaaggcaaaactgccgtattccgcgttcgtgccgaatgacgattttacccgatgcacttccggggggaaggcaaaactgggcatagccaacgccactcgatccgctgattttacccgatgcacttccggggggaaggcaaaacnnnnnnnnnnnnnnnnnnnnnnnnnnnnnnnnnnnnnnnnnnnnnnnnnnnnnnaacaaaaaatgctttttaggattcttcccagagtccccacccgcgccgcttattgagactcgtagaatggaggccacacgtttgacgcgagtggaacgcgacgttcacgctgccacgaccacccgacgcgccagattcgtgttttcagacatccgcaaccgacgcagtgccaaatgagattaatttgtttttattcttccgaacagttga

SEQ ID NO: 2504 - DNA, 23249 bp, synthetic construct
  misc_feature 1..23249: note = Synthetic
  source 1..23249: mol_type = other DNA
ggacttttctgtgctcaggaacatagattgccgtttacctattagaaggtcctggtaacggtactcccaggcccatttattgttggcccgcgcaaccttgcgcagggtacctcgctgaaaacgttgccgtgtgaacttcaagaccgctgctcctgtccagtcagcacggaacggttgggtgtagctgagtttaactcgttttccagccacagattcagcgaactgagccgaaacttccagcgtttccccaccttcatggcggggatttttttgttgcgggcaatccaagttctagccaagcccctcagttgtggagtgccaacctctttatgccgggaagagaaatctcacgatctaacactacgtgtgcagttgaattgatgagcgtgactcaaccataaagacctgatgcgattcccggactctctttgagcggaaagctacccctctaccggcgactcaatccgtctgttccttcggaacggcttgctttttgagcgcggctttcttgcgcggccgcccgattggcatcggaacaaatgcctcttcctccgagcgccgcaccagcatacaaccgccaatttcacgagccgataagcgattccggcggatcagtttggcgatggcttgcttggatacaccccttactcccagaagttcaagcccgaaccgcaacagccactctggctctagattgtcgatgatcgtaccgtagcgatacagcggagagaaccgttcgatacgccttcggacaggggaaactatgtctcacgcggaatttacggaagatcggctgcctgcagggtcgtggtccggcttgtcgcttttgcggaacgcctgcgaaaccattccaccagcgacaagcggatcggcgtttcgaagtaatggaaactcaacaaacccaggcctatgcagagggcaagatagaccggatacgaccacagggccgtccactgaaaatgcaggaaaatggcgaggatcgacatgtgaatgaggtagagggagtagctggaattgcccagcgccaccagccattttccgcataaccatcgcgacaacggcgtggagaccgcggagagcccccagatgattccggcgaataggggggccaggaatccattgttataaagtccagggatgtgcataaaaggggacagccatatgctcagaatcagtccgccaaacgatagcgcaagtactgtattggcccaaagcacgcgcacggtcggcttatcctgtcgcgtttgctgcagcgactgccagcgggcaagcagtatcccgagcatgaatgtggagagatgtaacaccggccaacagaatgccgtgattggattgagatggtgtagtgccgtcaggaagagtgcctggcccccgagatacacaaccagcatcattagccaaagccgtcttccgtgcaacttccacagccaaacgccgaggagcgggaagcacaggtaaaagaagacttcgccgcagagagaccaactgggaaggttgatctggttaagccgaagaggattccaggcatgcagcagcagtacattggcagcaaagatttccgccgtctttgtgaggccgatcgacacgccatgccgatgtagttcggtgaagaaaagctttggcgtgtcgagtatcagaatgacgatgtagagcgggtaaaggcgtgcgaaccgggcggcgaaaaattttcctttgtcgatgacctgccccgtatgcaggtatacaaagctcagcacgtatccagagagcagaaaaaaaaagctgacggagatcgaaaaggaaaacgaaaggatgccgaggaagtcgtgcgggggcggggcatgatgagcgcgccgattgtcgaagccgggcagaagcaccaccgaatgatggaacagcaccaggaatgaggcaaagaaacgcaccgaagtcagtggatagctcttctttgtatcagatagtacggtgcggctcaatgagagatccttcagagcaatattggttcggctttagctaaagccgcgagggatgcggcacacattgcaacttgagttccggcggatgatggtcggcgtagctgactacgctgccatccgcatagttgcagtaaaaagccagcagcttcgtctctcccagcgggatcgctcctgtctgatagcgttcgcgtgttcgagctcctatccggtcagttgacccacttcggtgtcctgcttccatccatcgtgactattcaccactcaagttgtcttttcccttgttccgttggacatttcagttgatccaggtgacgcgttgcgatgtctttgcgaaggtagaagccccatttgtccggcataccgaccgcagaatccggcacatagcagtaggcgtactcccccgttattttgctattggataaaagatagggagcatgggttagggaattcgctcttgtctccgggcgagtggggtcgattggaccgcctggaacgatcgcttgcggattccacttgtccagggttttgctgacgttccatttgttgtgcccaggcattccgccgggattggttttgagcgtcgcgatcgattcatccgccagcccattgaagtcagcaatttcaaatcgaggcagatcgtagctgaccccaagatgaaagaatccgatggagccgtccccgggcgtcagattgcttgcaatccattgcgaaatgaaaaattgttgtgcggtcagcgactcatagaacgaattctgtgtgacgacagcgctcttgtggcgttgcgcaataagagaagccaagctgcccaggacgactaccgtcatgaaggcgaggaacgcgcgaaaccccgccgttgtgtgctgagagggcgaagcggaaggttgacgcaggtacatcggggcgatgtccagcagttctaccagccgacgtttggatgaggagaacaacgcgggggatgaaacggcgatcaggactgccagtacgcatactggcgaccaaatcattcgcgcaccgcctagccagtcgctgttatacaacgcgatagccgctgtcaccaggcagcaactgataacgatgaggccttttgctctgggcaccgtggttgagaaggcgaagtagaagaccgtcaacatcaccaggagtgtcagaacgctgtaagagaggagtccattcgcgacgatgtatttgaggatgtagccaagagagggtgcggcgccgaacttgagtctcgcggtcgtcggtgtgagatggccaaactgatggagattcagagcgagagctgcacctaccagcaccatgtacggggctgctccgaagaggatgaattggcgggaccttgtggctaagtaaaggactgcgagaattccaagcgaaaggatgaggccgtctggccggcacagcgtgccgagaaccagaagaaaggatgcggccaacattctgcgggaggtcattccgggctgcaaggacaaggcggttgcgaatgccaggaagaatccctgaaaaaggtgatcccagccattgagagcgaacatgaggttggtcgaggtagacaggagcaataacacgagaagcaatgcgttggtggtggagcgtgaataccagacgatgatcgtcgctgtacccgcgacagaaaagaggcctaacagtgcatagaaaacaatagcgacattcggtcgaagcaactctaacaaaccggcaaacagatacggagcgatataggacgtcgatggctgagctacatcaatccggttgaacgccggtatacctcgctcacgcagaatatagccggttctgaggatgatcatgacgtcgtcggagaggcgaacgggcgatgtgaggtgctgccgcggtggctcaggctgagacgtgcgggcaaagtcatagatgtctggccaagttgcgcatgcaactgtgaaaatacatgcgaagacaaacgtgaggacagccgcaagtcttttgtcgtttgcgacgcgaaggaggcccaagaccgagttattttcgcttttcacagtattcccctacacgtctcttagcgaagacggttgcgacggttctcgcccgtatccctgaggtatcgttagcgggacctaacgaactttattcgaaaccgggcacccaagttgtcatggaaaggtcaagaccttaagcgaatatggtggatttctacatgaaggcgacgaatcttagttgcctgctctattttgggagcctccttggaggaatcaaatatttagatcgacagcgccaagaatggagaagatgtgacaagaagaagaaaccctggtgacgattcttctcagggaaatcacaaaaatcgtatgcacgatgacgacgacaattggcactagatgtgaataagttggcgcattcacgcgggctcgacgcgacgtaagaagttctctcccctcatgaattatgagagcgctcgatttgcaccaccaccagaccgacccaccctacatacccctggagctaagcgtggtcagcccaagccgcagttcggtcatagctgtactcattgcactctttttcgttgtcgccccggcaaaagtgttgtcccaacccatgctgccaccgccgccaagatcgtggccgattcgggcggtcatcgtggttaccactcccggagagttcgagctttggggcacccatgaacatttgacggaggcgcttgacgtgccgggcgtcccgcaagtcgcgccgtccttgctgctaaaagacccatatgtactcgacttcctcggactgacggaccgtttcttggaacgtgatcttgaagacgctatccttcgcgagttggagacatttttgctggagttaggatcgggcttttcgttcatcgcgcggcaaaagcgtatccaggtggacggcgacgacttctacatggacttgctgttctacaaccgcagattgaagcggttggttgtcgtcgaattgaagcagggacgattcaagccggaatacaaaggccagatggagttgtacttacgatggctggcccaacatgagctcgaagcgggagagaatgcaccgcttggcatcatcctctgtgcgggaaaaaacacggaacaaatggaattgttggaattgggctcggctggcatatacgtcgccgaatacctgacaattctgcccccgccagaggtgatgtacgcgaagttgcacgaagcgattgagacggcgcgggcgcggatcgaagccaagccaagggaagaatccaaaagttgagaggtgccaaatgcggagaatcattgggcgacggttcaacattcgtcagcggcttgtaagtatgacggctccacaaagacccaccgcgttgcacatcactctttccgttgaagccgtaaagaaacttgcggagcagttgcccccaccgccgaccgagaagataagccacaacgtccgccctacattgaggccttgggttgaagtaatcgaccagatcgtcagggaggacgcgcctctgccaaagagagtgcgaacatccgcaatgcaaatcttcaaaaaactccgcgaggagcacggatacacaggctgctataatgtcgttcaagaatatgtgcgtcaggcccgcaatcctgcaacgcccgaagccaagctacctacccgtcccaagaagagtgagccggaaacccctattgcagcttcggcggagcatggggaaaattctgccatttcttatagaacgctagaagtgcagagccctatgcctactgtcctgttggagccatgcgagataagacaaacaatttctccgcgctcctccaccgcgatattttgtcagtcccgtcgtcctcaacggagccacgaaccggaggaccaagcctttgcatggatgcgaaacgtacagcaaggcacgatacctctcaatattctggcctacgaacttcccgatattcccctgcccatcttggaagtcttcctaacggcagcaacgagaggcaaactctctactcgaaatcgggcagtcgccgtgatgagctacatccgtggaatcaactgcgatcagatatgctcgttcctccaaatctctaccggctcgcttttccgatactggagaacgtatcgggagaccggcactcagaatctcttcacgaggaaaccgaggagcgataagcaatcgaacgatgaggctgtaaagagtgctgtctttgcactattgcattccccaccctccgcacatggcgtgaatcgcacgacgtggacgattgccgacctgcaaaaggttttgtctcaaggcgagcatcctgcgggcgctgaatccattcgcacgatcatcaaagagtccggtttcaaatggcgtcatgctcgaattgtcttaacaagcaatgaccccgactacaaagccaaggtagaggcgatcaccaagattctgtcggttctgaaaccagacgaagcattcttctcggttgacgagtatggtccttttgccatcaagatgaagggaggaaagaaacgtgttgccccaggcgaacaatacgtcgttccacaatggcagaaatcgaagggctggatgatcctgaccgccgctcttgagctctcgcgaaaccaagtcacccatttctactcgcgcaagaagaacactgccgaaatgatcaaaatggcggatacgctgagaaaccagtaccgaaactgcagcacgatctatctctcatgggatgccgcgtcgtggcatgtctcgaaggacttggttacgcatttggagaagatcaaccagcgagccatagccgagggttgcccgatcgtgaagactgcaccgctcccagcaggagctcagtttctcaatgtcatcgagtcagtcttcagcgggatggcgagagccatcatccataacagtgactacccatctgctgaagcggcgcgagaggctatcgaccgatatttcttagacagaaacaaacacttctccgagcacccggagaaggctggaaagaagatctggggcatggagagggtgcccagtgcgttcgctgagggtcagaactgcaaagatccgatgtatcaatatctttaagttgcaatggcgatggaggctcgttcaaactgaggcttgggtgccagcgtacctttcgagatagttctgatgaacctgtggagcgagtgatggtcaatcttcttgaattgagggacggtggacgcttcgaggccttttgcaaatcgctgcttagagagcagtatccgcgctttcaggcgtattccgcgcccgattccggtatggacggttacgacgaacagaccgaaaccatcttccagttctattacccagagggcgctccacggaaagacaagattgtctctgacataagaaaagttcttgcatcgggagcacccttcaaagaatggattctcgttctacccaaagaccccactccagggcaagcaaattgggtcagttctgcgttcagcgggacaggggttaaggcggcaatttggggaaagaccgaaattgaaaggcttctcagggttcacgccagcgtaaaggcagcgttcttcccgactgaggttcgcaaggccatccaacggcttgcgaagggcaagaaaccctgtttcggtgatgcggaagaatggcaaacgatctccgctgttgagagccaagaactccgagagatgattacaaagttgggcgacgagagtgcttttaggaagcgcagaaaaccttccggggcggactacagtcgggaatatggcgagttcaatagtcatttccgcttatcttcatatgacagactgaagcaaggtgagatggctgcggcacgtcaataccttgaggccaaactttacgctcggcgtggaggagaaaccgtcactcgaagtcgaaaacgacacatggatgggattcatgccatccgaaatcagctcaaccttaccgagagtgattaccgcaaagctcttttggcggctactggctgtgattctctaaggggcatgacgtcagatcaaatcgaatcagtcttccaagacttccgtcgaaagcaagaggtcttcgagtctcgacgatcttaactctccttgcgacgcttttatctggctcgcaatctatttgcggccatggcggctaacttgtcgaagcgaatgtatctggatgagtgacatgtcccttgacccattcgaaggctgctgtatctgtttggatggctttgtcagcgctacccctaagtcttgattaagaaccaagccgcttgctccggcgatatgacgatctaaaggatcctacaggataattcattcgtcaatatcgagttatctattgactcccacgctattacggaagaatattcgcatctgctagcctcaagccctatatctttggagggcgaaggtgcgacattctgcattggtggatacccaagttgtcttctgtggtgacaacctagatcaacttcaacgtctgccggacacctgcgttgatttggtgtacatcgacccaccatttaattcaaaccgcaactatgaagtcttttgggaagaaaaaagagagcaacggtcgttcgacgaccggcacgaatcgactcaagcctatatcgacttcatgcgtcctcgctgcatcgagctcgcccgagtgctcaaaccgaccggcactctctactatcactgcgactggcacgcaagccactacatcaaggttttacttgatcagattttcggggagacgtgctttgtaaacgagatcatttggaagcgacagtcttcccataacgatgcgaagcagggttcgaaacatcttgggcgcgtccatgactcaatttttgtctatgccaagtctcgcgactattacttcaagcatctctatcgcccttacgatccggaatatgtcgaacagttctatcggtataccgaaaaagaaaccgggcgtcgctaccggcttggcgacttgggcgcacctggaggaggagctccctccaaaggaaatccgcactacgagttccttggggtcactcgttactggcggtatagcgaagccaatatgcacaagttatataaagagggacgcatcattcagacggcaccaggtagagttcctgcttataagcgttaccttgacgaaggcaagggtgtccctcttggatcagtttgggatgacattggacctgttcaagcagccgcgagagagaagatcggctaccccacgcaaaagcccctgaaactactagaacgaatcatagaaatatcttcgcgcgaaggtgatgtcgtccttgatgcgttctgcggctgcggaactgccctcgtagccgcccagtccatggcacgacagtggatcggcattgatgtgtctccaaccgcctgcagagtgatggcaaagcgcctccgagaccattgtggattggctgagtcagaaaccctatggagagcccataggggatttatcgttcgagacctcccgtggaccgaggagcggcttcgcaagctgccaccatttgaatttgaaaactgggccgtggtcgccattggcggtcttcccaactcaaccaaggtgggtgatatgggcattgacggtcgcctttttcctgtcacctcgctacctaaaggaagagcggcaggcgatacattcgcgtttatggatgactggtttcccatccaagtcaaacaacgagaaaaggtcggtagacctgatattgattctttcgaagcggttcttgttcgggagaaccgcgaattgggctttttcgtcgccttcgactacacggcagatgctgaacgagaggtgagacgctttcactcaagctcgggaaagcaaataagactcttgagagtttccgaactgatagagatggatcacgagcgcatggtctcacccaaaaagccagtcggctccgtccgcgaagtagacatcgctcaatctggtctcaaagccgtgcgccgtaagtaaatgctctcgatacggtctcggtgctacgtaagaacgccccgtctccggggcgttcaaagggcgctcgatgagcggagccttacgacgaaagcttactaagaatagccgggcaatcgccgctcaagtacactgtctattcttctacatcggccccaatcttgcgtcaaggtgataattgatgtcctctgccatggaagcaccgcagaaatatgtcttgggtcttgatctcggttctgcgtccctcggatgggcgctgattgccctcaatccagccaacgagcccacgtcgttggttcgcgctggcgtccgcatcttcgagcccggcgtggacggaactgcacttgatatcgaacaaggcaaagatcagtcaaaggctgtcgaacggcgcaccgcaagactccaccggcgtcagcttcgccgccgcgctgcacgtcagcgagagctttttcaggaactacaaaaggccggactgcttccgacgaacgcagtcggaactggggcaagttcagagcagcggcatgaactgctaaatgcgttagatcgctccttgactttgaagtttctcaagccaaacgatgattcatttgctcagaagcctctctatctactgcgcaagcttgcgctggaccaagccttggaaccctttgaattgggacgggtgctcttccacctaagccagcggcgcggcttcaagtccaaccgaaaagaaaccaagaagactgcaaaggaaaatgaagatcttggccaggtgaaggcggacattcacgcactggagttggcgatacaagatgccggcgcgcggactatcggagaatacttcgcggggctcgatccacatacggagaaattgcggcgacgttggaccgcacgcaaaatgttcgagcaggagctcgccctcatttgggatgcgcaggcaaaacatcatgcttcccttttgaggcaagaattgcgtgacagagttcacgaactactgttcttccagcgccccatatccgctcagaaacatttggtcggaacctgtgagttggagcgcggtgacgataagcatcccccgaaacggcgggctccgtgggcaacgatggccgcgcagcgttttcgaatgctgcaaaagatcaatgatttagtggtgatcgacacaaagaaccagacatctcggaagctgaccgaagaggagcgcagcaagctctatcagttgctggaccgggaaggcactcaatcgtttatcgcaattcgcaagtatttggaccttaaagggactgcgttcaatctggaagcgggcggagataaggatattcccggaaaccggacacagaagtcgatgcgaaaggtattcggggttttctgggatgagtttaccgaaggaaagcaaaaccagatcattgagaactggcgcaacagtgagtctgacgaagtgctcatacaggaagctatcgagcacctcgggctagacgccgaggcggctgctgtcctggctaaggagagtccgcagtctgattactgctcactttcactggcagcaatttcaaaacttatgccgctgatgatgtcggggcgatccttcaaggatgctgaaacggaaatttacggcagtcgcttctcgggattggcagtacatgacacacttccacctgtacgcgaagcgcttcccaccctacgtaaccccgcggtagaacgagcgatgacggaactgcgtaaagtcgtcaatgccatcgttcgagaatacggcaagccttacgaaattcggatcgagcttgcccgcgaactcaagaagccgcgtcaggagcgcatcaaggccacgacggcaaaccgaaagcgcgaggccgacaataagggcatcgcagcgaagattttgagcgaatgcggtatggctaatccatctcgggccgatctggaaaaggcaaagctctttgtagaatgcggcggcatctgcccatacacaggacgctcgattccgttctcgcaactctttcaagactccgagttcgacgtggagcacatcattccacgcagtcgctttccagacgactccttccaaaataagactctgtgctaccttcctgaaaatcgcgaatacaaacgcaatcagacaccattcgaggcctacagcaataacccggatgtctgggctcagattctcttgcgagtaacgaaatggtctaaccctggaaaattaagccgtttcaaattgcagagcgagcgggagcttgcagacttcagtgcgcgccaaatgaacgacacgcggtacacaagcgtactcgcaggacgtttgttggccatgctttatggtgggcgtgacgttcagacagacaacgacaatagacaggtgatctttgcatccagcggagccgtgacggctaccctgcgacgctcatggggattcgaacgaatcctgcaagcaatcgtatcgcccgaacctggcgatacccgaggaaagcctcgcaccgatcaccgacaccatgcagtagatgcaatcaccattgcgttgactcgacaatccgtgattcaagccatggcgagtgcttcagcatttgagccttggcaacccggaactcggagctggaggcgcgtgccggaaccttggacgacacctgacttcattggcaacctgactgagcaaatcgtgcagatggttgtctctcatcgcccggaacacaagatcagcggcgaacttcataaaggttcaaacttttcgagaccctatctttataatggcaaatccacggtccacatgcggtgtgaattaagccaactcaagccagcagacatcgcggcagacgacattattgttgataaagctattctcgcgctcattcgagcaaagttcgatgaacttggtcggaatccaaaggcgttcgaagaccccaagaacctgccctgcttcaccacagctaatggacgcaccatcccgatacgcaaggtcagaattcgacaagtcaaagatcccaagatcgccgcgtacggcgaccgggagcgttttgtcgattcgggtggtatccatcatgtggctctgtttgttgcgagaaatgaggctcgccaagagcaatggctgagcgaagtcgcgcaggttactgatgtgtatcagcgctgcccgcgatgggataagagaagcggacgacccaagtcaaccgcaagcgagcccgctgtgtcgcgaaagttgaaggataatccagaggccgaatttctcttttctctgatgaaggacgacaccgtcgagttggattacaacggggcgagagaggtgttccgcgtcaagaaattttatgctgctggaccgatttggtttaccggcgtcaacaacgcccagatggacgcagatcagaagaagaataaaacgacctggtcgaagaatcccaatgggctaaagacgttaaatccgcgcaaggtagtagtcgatcttctcggaagggtacatacggccaatgattgatcgcatcgttgagatcgcaaatccggcccgcttgagcatccgcgatgcacaactcgtcatcgagcgttcaaaggaagagcagctcacgcttcccttcactacgcccgtcagcgagatcgccgtactgttgcttgcccacccgcaaatcagcttatcgcaggctgttctctcgcgtattgctgaggccggaggttccgttgtcacaatcgacggaaattttctgccagcctccatgctgctccccgttcagagtcatttcatccaaacagagcgcttcgcaaagcaaatggaaatgacacttccgacccgcaaacggctctggcaacagatcgtccgcgcaaagatcaaagcacagggagagttgctaaaagaactccatggcaacgaccacggactcattgcgatggctgcgcgagttcgcaccggagatcaaggcaatcttgaagctcaggcggctcgtaagtattggggcttagtcttcggcaacagcaaattccggcgtggctctgacaaagcagatcagaaccgccatctggactacggctatacggtactgagggcggcagttgccagggctctctgcgccgctggcctgcatccttcgatcggccttcagcacaagaaccgctatgatgccttctgcctggccgccgatgtcatggaaccgttccgcccgctcgtcgataggcgcgtgagccaatggatagccaaagaagatgcagaaggaccgttcgactcaaggacgaagatctggatgattggcgcaacaacttcgcgttatcttctcgacagagaagaacgatccctgttcgatatcgtcttgcgcacagcgaactcactggcaaagtgcattgcgggagaaactcgcgatcctgaaataccaaacctgctcatcccctgtgtagaggaagtcacaatgaggcgaggagttcgtcgtgtggaaccagatgagatgagggtcggggttgctgcaggctagaaattacttcgtggatatggtcgtggattgctatgaaagggcagcttctttctgcgtatcgatcattgtggctcattgccatgttcgacctgccggtagagacaccggagaacaagcgcaactacacgcgctttcgcaaggggctgctcaaagatggatttatgatgttgcagtattcaatatatgcgcggtatctgcccagcgaagaagcagcagattcccaccgcaatacaattcgggccatcattccgccgcttggacaagtccggttgatgaccgtaaccgatcaccagttcggcaagatggaggtgttctatggaagaaagccgcgcgaacccgaagaaattcctgaccaaatcttgcttttctgaaaagagaccccgcgtcaactccctgcttttcagcgagttcgacgcggtctagtgtacttgagcggtgaatcccggccatccccagcagacgtttatacgtgggccggagaactacgagtgtacttgagcggtgaatcccggccatccccagccgcggctcgatggatgagatccgggcggcgagtgtacttgagcggtgaatcccggccatccccagcgcgcaatcgcattgatagctggcatctgtagtgtacttgagcggtgaatcccggccatccccagcgaaacatgagagagtgtttcctacctttcgagtgtacttgagcggtgaatcccggccatccccagcctacaggcgtcggtggtacgtttgtagtcgagtgtacttgagcggtgaatcccggccatccccagcagtctgttgccactgctgttgcagccgctcagtgtacttgagcggtgaatcccggccatccccagccaccaggctgaagagtgctcattgaattccagtgtacttgagcggtgaatcccggccatccccagcctcactgccgcgttacaggcagttcatcagagtgtacttgagcggtgaatcccggccatccccagcgagcactcgcattgatagctggcatctgtgagtgtacttgagcggtgaatcccggccatccccagcatgtgctggtaactgttgaaattgcctgatagtgtacttgagcggtgaatcccggccatccccagccgaccgtccccacgatgaccatgggtgcgaagtgtacttgagcggtgaatcccggccatccccagcggtaaaaacccctacgggctattcttacgcttcctctaaacctatggcccggcaaacaggtctggcttcgggcaaattatttgcgatagcccgtaggggtttttaccgccgagaatcacatatgaaaacggtgaagtggctcgcctaacgtctgtccgtcactgagtgcgcgaaggcattccccgagaacttcgatgtcggcctgttttccttcgtcaatcagtacgtcacgctgattgaccttgctctcatccttcatggaagagatgagtccggccttcgacatattggcatgacgccgccgtttgaccacttccttcttcgccgcgtccgttgcgagtggagtccattcagtaacggcatagaagttcgcttcgatcttgagcagcttgtcgagcaccaacgggcgcgtctccgtaatagactcgcgcatcgtgagcaggcggacgaagtggtcgccgatgcggaggtggtcagcgtatctccacgttcgggacttgttgcttggcggcgtcgtagcgcaacttgaagcgttcggacttgcccatgatcttgaggaatgccgggtcggtggtcgtgatccaacgaccgaagatgtacccgcccaacacaatcgcaatcagactgctcaccttggcgatcgttccggtgaaaagggtctgaatggatgtgagacctgtatcaaaaggcgaactcccggattgagcgtgggctgccagtggaaacaggagaagggtgagcagtaaaaagcccgagaagggaggccgatgactcggcctctcaactcgggctgcacgatgaagcgtcttcatgtttgcacctccatccgactcaagttcgtcggggtatggcgcaaacgtagaagcggaaaaggctcagcgtccaatcacttcttggaagagcactattcctgcgggtaatgatgggtggtgagtcgaggggacttctgagaactatttggagaggtactgttccagcacctgcggttctccggccccgcacaacgaaagatttgcctcaatctccgtccgattcgagaccagacaagtgaagctagtcccatcggtgaagtcgatctgaatctcggtgccgtttgttgtggcgcggaagatgttgagcgtcttgatcgttttcccgctgagcgttgagcactctgttggttcttcgcttgccatttcgactcctaaccaaacgctcacaacctcttcaagatgccccttattaggggattcgccaaggcttccacaaacttaagttgtgaagcagcgtgccgaagccgaaacccgaaagtcgcgaaaagcccggaccgctccgtaccaaggaatgtacgatgatgtgcttcgccgcttgataaacgcaagagaagaaattggcctcagccaacgcgaggtttccgagcacctgggcatgtcgcactcgttcttgtcgaagtgcgaaaccggcgaccgccgcgtggacctcatggagctgatccagttggcgaagctgtacaagaagccgattcagtttttctttggaagctgagcatcagaacgaggaacgtgatagcggaagtgacttcgtcgtcactgagcggtcgtagattttgtgctaatttgtgctaactggtcgccgctctaggcattttggcacttttgtccctttttagaatgtgcaagttacatgttttcaaagcgggagatgtgttcgatcccgacccgcgcctccaatttcctcaacaacttagctccagaggttttcggactggctgccactttggctgccaattgaccggcacccccttacgaaacagcctgatacgcgccctccagagccgccgactttgcgcagagcccctgactgagcgtggctgccgcctcgtctgccgaggcgtcgaggacttgagcgtagaacttgagaagaacatcggggcggagtgacctaaccgttcctgcgctgctttgatcggcactttagcctccaccatctccgtcgctccccagtgccgcagaagccgccatgtgacgtgcggtagcccgagttttccgcgacagtctgaatcaccctgcccagaaggtcctcgtgccacatcggacccggtttcatcttcgtgccggctttcttgatgcgattcggaaacttccagtcatccatctacatggccaacttattctctcccattcaatttattggcaagcggaagggtgcccgaggcggcaagcaggccaagagcaaggccgtcgttgccgctgctcgccgtgttaccccatcggctctggagcacgcaggaaacgcacataccgttctacgaacaagctgctttagagatcgatatgttcagcgcagctttgctgaggcttcaccacgcgagaggtcgcgtgaccgagaaggacggtaaatccggaacaaccgagttgacaggctacttcgaaaccgatgcccttgttggcgtctgtgatcagaacaaccttcgccatatatatgcctccctatgttgattcgcagaagttagagacaggctgaagaggagggatttaaaaagcgaggtggaagagcatggacaaatcagggccactccactcatcgctgccttgggattcccgctctatctggtggcaaaagtggcgagagataggctctcttccactccataaaacttcaaacactcattaatatttgaatctcattgaaaacattgaggcgagtataggctatttaccctaccaaaagaggagacaaccgcctgattgacaggacatcttcgatgatttgaaatcgacccactcagaaagtaatcgtttttttatgaagcgcggattcactcgcgacgaggcccgtctcatctataagtatctccccaccgagaccaccgaagacgtcggcagcattctcgccgtctactcctgcggcggtgccgtcaaccggcctgagttcgccgacctcaccccctgccccgacgctggccccacccacaaggggcccccttaccacaatcagcagtacgagggctgctacaccaactaccccgactccaacatgctcgcctcccccttctggccccatctgtactacggagagcagggactctatcccttcctccaaagagcgaagcggcgctacgagcccgacaacatcttccaccacgccatgtctattcgcgcctgaaaagcccgagtgcgtgcggtttgagtttgcagtctggtctttcgcaatctgacgtttttatacggagatgccttggtccgaccgatccattcgagcctttaccagtcgcacccgggtcccacaggagccgcgccctactctgcgccctcttccccgcatcgtgccaggttcgctccccgtcgtcttcaacagacgacggctctccagtcagttcgaaaatgccttttacttcccttgaacgcggcagaatcccgctcaggcgatctggctgcgtacaggaagaactttctctcaaggaggcgatgcagctaaaaacacgatcccgacggtagtgagtcgagagcccggaccggcaaacccgactccgatctcacggtccgaagacaaaagacaaaaacaaggctgggagaaacacatcgaatcgtgatcccattcccacccggccaatagctaagcagtttttttgaggagactaagatgcaacggagatctatcattctcagtattctcaccgccttcctcctgatggcctgttccgctatctcctggggacagacaattaccggaagcgtgaacggtacagtcaccgattcgacgggcgccatcgttcccaacgccaaggtcaccgccagcaatgcggacaccggcatcaacaccgacaccacgaccaacagcgacggcatctacaacatccgcttcctgcagatcggccgttacaagatcacggtcagcgcccccggtttcggagacacgacctatggcccgttcaccctcgagaccggccagaacgccaagatcgacagccacctgaccatcgcaggccagcagcagaaggtccaggtccaggccgagatcgctcccctgctcaacaccgagaaccctaccctcgccaccacgctcgacaaccgggcgatcgagaacgttcccctcgtcagccgtaacctgaccgcgatcacgatgtttcttcccggctcggtcagcacccagcccaacagcttcgtcagcaacgcggccgtctccggtccgctgagctcaaacaatcccgccggcgccagcagcaacgcctccgtctccgtcaatggcaaccgccagcaggccaaccagtacctgctcgacggtatgaacatcaaccagaccctcgacgacgagctcggctataacccgagcgtcgacgccatcggccaggtccaggtcatctccgccaacgccaacgccgagtatggcaacgtcaacggcggcgacatcctctaccagaccaagagcggaaccaacaactggcacggaagcctgttctacttcctaggaaatttcaacctcgacgccaatagctgggtaaacaacttcactcacattgcgaagaactcctacacccgcaacctcttcggcggaaccttcggcggccccatcctgaaggacaagctcttcttcttcgtcgactatcagggcggccgcttccactccggcggtcagtcccaggccagcgtctacacccctctgatgcgcactggcgacttctcggagctcctgaacccggccatcatgggcgcaggcaagaccgttcagctctacgacgcaacccaacctggccatcccgcctacgccaacaaccggatcccggtcaccaaccccgcagcactgtacctcttcgctcacccggagctttacccgcttcccaacgccgcaccaaaccccggttcgccgacccagaacaactatcacggtctccagaaggagcggaactacggcgaccagttcgatgcgaaggtcgactggaagatcagtgataaagacaacatgtttgtccgctactcgcaggacgacagcggccagacaacccaaagcgctctactcaccagctttaacagcgcccccacctatcccgtccggggtgtggccatcaacgaagttcaccagttcagctcctcaatcgtcaatgagttccgggcaggctacacccgcatccaggacaatggcgcggtcctgctcgatcccagcggccagttcggcctgaacggcaacagcctgctcggcatcggggccaacaatcctcaggctcaggcttttgctggcttctccgctctgggcatgcaaaactcgaatagcccccagggctttagcgccggcaacggatcgagcgacttcaccctcatcggcaacgccaacggtggaaccaactacaccctcaacaccttcctctacggagacaacctcacgtggtccaaggaccggcacaccttcaagttcggtgcccagttccagcgtcaacaacagaacaacttctaccctggaaacgacggctccctcggaggcttttacttccttggcgccggcacgtcgaatggagccagcggcggatacaccggagctgacttcgtcctgaaccgcgccggcttcgtcagcaagggcggcgtctccggaccggtcggaatgcgctcctggcgggatgcttacttcgctcaggacgactggaagatctccccaaccctcaccctcaacctcggcatccgctacgagtacatccagcccatctacgaggtcaacaacaagatgtcgaccatcgatcccaacaacccctcggtcgttctgctcgccggctcaacgcaggctcaggccgcaggctacaaccgcgccctcgtcgatccctactacggcggcgtgatgccccgtatcggcttctcctggcaggcacaacctcgcctggtcgtccgcggcggatacggcatccagaacttcatggaaggcaccggagctaacctccgcatgaccaccaaccttcccttccagggctcctatcaggccagcggtgttcagcccaatgccgcaactggaacccccggtaacttcttcgatgtccaggatggtttcggaatcccgaaccccagcggcggagccagcggtgtcgtctataacgtctggaacaagaagatcaagcccgccttcatcggcgagtacagcttgaccctcgagtaccagctcagcaacaccgcctccttccagatcggctatctgggagagtccggacagcacctcatcactgctaaccagagaaaccagctccaggctccgtgcgtcctcaatggggtcgttcaaacgttcccgagcgccggacagccacaaccggcgggatgccccaagtcccccttccaggacactcccggcgtaggctacaccggagtggtccgctatacagactccaacgccatgatgaactacaactctctgcaggcgagcttccgtcagcgtctgtcccgaggtctgcagtacaccgcaaactacacctatagccgcgccatgaccaacagcatcggcttctacggcgctcccggcgtcagcgtatccagcgcttacgccgagaacgtctacaacctccacaacgaatacggtccgaccggacaggacgtccgcaacgccctcaacttcaaccttgtctacgatcttccccttggccgtggccgcaggttcggtgcgaacatgccgctcgctctggacgaagtcgtgggcggatggaagatcggcatgaccggcgtcgcctactccggcttccccgtcagcatcagcacctcaagcaataactcggctgtcaacggcaactctcagcgcccgaatcattaccgtgagctgaagattgtcaatcgctccatcaacaactggtttggtacggacccgtccgcagtgccttgcaccacgcctggcgttgacaacggcgtctgcgcctacggtcagcccgcgctcggaaccttcggtaccgctcctcccgactccgaacgtgcgccgagcttccagacgtatggagcttcggtcactaaggacttcaccatctggcgcgagcaccagatcaacttccgcgcggacgccgacaacttgttcaacagcgcgtttctcggcaatccgcagaacaatatcctcaacacccaattcggcaacatcatcaatcaaagcaatccgattcggtccaacccgcgtcagatgcagctctccgtcaagtaccacttctaaccatcccacaacagagaaggcccggactctttcgagtccgggcctttctactgaccgcattctttccatcagtgagcgaagctaaactcctcgtatgacccaatcaaaaggaagtcgaagtcgatgagtcagccgtccggcagatgggcatctcaggtgtaccgttctttctcctaaacgagaaaatcccctctcgcggcatccaaacaccggagcactctctgtccatcttgcatcaagcatgacaagctcaatagttgtgggcctgctctatgcctcctacaggccgtatctacaatgggtatcagtgggaggcactgagaaagatcggcttcactatcgcctcaatcttcgcagccatctcctcggcggaaacccgatccggcgtctgcaaccagcgccgcgctgccccgaaaatggcccaggcagccgtggttcccagaagcgccgggtcaacaccggatggggccggatgatttgaagcgccctccaggaacatactttcgaccaccgggatgatcgagccctcgagaggcatcttctccagttggctgggacaaccagtggtttcagccagataatcgcagacgccgagagcaatcgcgcgcaacgctccatcgcaatctgtgaaggaaaggccccgacgagcgataaggtctcgaaagcgagtggccgtcatggcgtgcagaagcgcgcctt

SEQ ID NO: 2505 - DNA, 21256 bp, synthetic construct
  misc_feature 1..21256: note = Synthetic
  source 1..21256: mol_type = other DNA
cggcgtggcgccgtgcgtccaactcggccagaacggccttcttggtctcgtcaagcacgcaatccatgcgacgcagcactgtgaagggcaggatgactttgccgtattccgactgtttgtagtcgccgcgcagcagatcggcaaccgaccagataaaagaagaaaggctcattggcttatagtcgctgtccagcggtgagtttcaggatgcacctatcttaccgcgccagaccctacgcgtgacgctgattgcgttatctgcagccgcctcgcaggtcgatcagcgaaggagattccgcaacctggctcgatgtcgattttaaggatagcggcacgctcatgcccgtcgggcgggctgagatggtctcccgccaaggcgggagcgcgaaagagggtgggtagacgggcaggcagacataaaaatggcggagcctgcgagataggctccgccggaatactctgtgaaattacgccgctcttgagttcttcgcggcctttgccgctggcttgggcgcgaccttcttcgtggttttcgccttgtctttcgcgacgaattcctgcctgaccttggcggttatggcggccacgtccaccttgtagcaatcggcggcctcgcggagtgccttgccggattcgcttggcgattgcgccgcttgcaggatggtcatttcgaccaaaagccgtccgagcgtgctttcatcggatttgcgcagaaaggccgcaaacagcttggccggtgtgtcggcggtgccgttcggcttgccaaggttgtgctggcgcaaaacgatggccagacggcgttcgtccaacattgccgcaagacgctcgaccacaaaaagcaggtcgcgcttcatcaaacgaactgggacagcctcgacaatggcgctcaatacgcgaagtcccgttgtctgggcgattgcttcctcgcggcgctgcttttcttgagcggccttgaatgctccatcgttggcaggtgctttcgccttctttggatggtgaatcgaacagtcggcgtttgagcatatgcgccttagctctcctttatccgacccttcggtgacgatggcctcggtggtgtatttgcaggttttgtactccggccattcggcttgcttctggtttgttggcttctccgcgcgaatctcgacatactggttgcgcggaattgccgggctatcatcctgcggcttgccgtatgcgcgtgtgatctgtaccagctttggttttgccacaatcgtctttgcaacgaatgcgtcaaccttgctctggtagcaatccggcgaagtgcaagcgtccgccttgatttcagcaaaaagcagggtattgaagccggtgcgtttggggcaggtaaggcaagctcctgcctctggtacaagctccgcgtcgtccttcggaaagggcgcggagtccagttccaaaaggatgtggcgttcaatccactcctgcaattgccgcacgggaagcagaatgcgccggggttttccgccgctgacgtaatcctctcgaaagcaagcggtgagggcttcttcttgttgtgcaggctgcaacttggccagcaaaagcgcatggccagtaccgatctcgtcccggtaaaagacctcgaccactgcgggaacaaggtcagtcaatttcaaacgaccggtgatatatgctggcgtcttggcggtgcgtgccgaaatctgttcaatggagtatttcggctcttccaaattgagaagtgcccggaagccgcttgcttcctccatcggatgcacttcggcgcgaatcaggttttcgacaatagaagtctcaagcgcctgtgcatccgtcagttccacaatgcgaacgggaaccgactcctgaccggccaattgtgccgcgcggtagcgccgcgctcctgcaacgatctcgaacgattgcgggcctttcggccttaccagcaacggcgaaagcaatccctgattgcgaatgctctcggccaattcgttgagcgcggcttcatcgaagctacggcggggattcatggctgactcggtgagacttgcgagtggcaggttgcgatattcggactgaactgctgttgtcataaactcatctcctttggttgtcgagagtgaatgcgtgagcgggcacgagcaagcgcacccgctcaggtgggcgggtctagctcgcctttgccagtgattcggcttcttcggcgaaaagcgcgtcgaggatggttgcggaggcttgctggattacggcgagcgattcggtgagcaactcggcgttgccgtggtacaagctgatgtagtcggcgctggcgctgccagtgttcaatcccacggcgcggcccacgatgaaagcgatggactcggcttcggtttcccgcacggtcttggtggtaagggtgcggcgctcggccttgtgcaacatttcgtgcgccagttcatgcaccaatgtgctgaactcctcggccttagtctgacctggcagcaagacgatctttccgccgtagcttactccttgcgcaggcgcgattcgttcgttgtattcaagctcgatgccctgctgatgaacgaactcgaaaagtcggtcgtggtgggtgcccacttcgccggacacggtggcaggttcgggaagctctttgccctcggtctgcgcgatgtcaaagacatagacgacacgaaaaccaatgagcaaaggcttcggcttgtcgttctgctcgacaggctgctcgtcgcgctggtgcttagtccctatcatcggagccaaaataggaatgcccttttggcccttcttgacgaagcggccaagctcgttccatgtgcgaatccctgcaacgtgggttgcgtcgggccgatgatgcgcgatggaaaggatattgccgaaactgtagttgtggaaccgggccattgcggtcagataagctgtgagagcctcgctcttaccctgctcaagctgctctatcaggtgcttgacgttctcagcgatgatctgctgcgtagtggtctgctggtggttgctgtgttgcgccgcatttgtgctgtgcggcgcggtgtggttgctgttgctgttgcggttgttactcttgaaattcatgtttttgttctccttttccgccgtgaccggctgagcgtctttctcacccacggcagggaagcgcgaagacggttggcggaaaagaacgaacgcagcgcacgacggtgggagtccggaggaaaggcgcggcaattgccaaacgcgcaccatcgtttggcgcgcagccgcgctccgaacggacggagaaggcccgcttagcgcacgttaggtgtgcgctgggccgtccacccgagggcgcgaagtggattggaaggaaatagccggtttgcgaattatgccgcactacaaggccgaaaatattaggctgtctggtcttacgaagtaaggggctcagcttgacagttggtcagatgttacaacgagatttaccatcgcattcgatagggatggtaggcattctcccgctggaatgctcccgctaaactcttggcctgggaagcgagcagatttacgggtgcgagaaggcgagatctgtaatacatgggcttcgtccatcgcttcgagaaactctgcgccaatgcatgttttgtactggaccgtagaaggccgctcttcccgattccgggtctaaagcccctaccaagcattccaaatacaaccctgtcaccgaacggtgctcggaattcctcaatcaggtcgaagacaagacttccttggtctcgaagtgatccatgaattagcccaaaatatgggtccagcccaactttcgagatcgcacgccacacttctccgtatagaatcccgtacacatagttaaggcattggttgacagggtcatgggcagaaagtgtcatcctcccatcaaagccaagatcttctggaacaagacaagacaactggctccaatagatggcagcgcttctcccttctagtcccatgccgacgcctcgaacggtagcctcgcgagtatcaagtcgcgagatgtttcgagacagttcgaggatcttgtcggctgattccctcattccgttcgcgacttccggggcaacgcggctgcgatacttcgcaaagtatttcagaaccgcggcttggtttgacgctttggctgcaatcatggagaggccgactttcagaacatccggctcctcccgtcgtagaacctgcaatcggcgaatcgatgatcgggccgtttcgagaggattgattaccgcgataggatttccaagtggcggtgctattacgacagagacatcatgtttggccaacttaacctgtgcatcaactgaaataatgatgccgaagccctggaggtagataaggctgatttgattcatggggcgccgatatacttcctggcgccttcttttcagaacgacgtcttcatcctcggcagtcaggtatgcaccatgcgtgagaacgtaaagcctgtcgccatcttcaagcattgtcgaaaggaaaggggataccttaccggaggcgccgctggagggtgcggcgttgacccggacctgttccacgttcgaagagtcgaggtcactcgattcgctgccacggcgcatccaagctgggggaacattgtatgggacatcttggggatatccggaggctggctgtagagcctttgacgtgggctgactgccagtcacctggtcagcgcgaggtggtctcacagatacgcgctcacggcacacccaagctgggttttctctgagggaatccggcaagtggattgaggcgatttgttcaatgcggtcgtcgatgtcccgcatttgggttgaaagtgactgttctcccggtaacagaaagtagttccgccatcccctggtgattgaattgaagcgtgtgaggcactgagtgactttgtcaagggctccagctgatgcagctagttctttgattagggcagaaatgtgctgcagaaggacttcgatgcgggcaggttgcacgatgatcgaagaatccgcaacgtggaagccgagaaagtcatagccttccgaaacgtgaacgtaaaatgtcttagctggtttgagttcaagccgcaaaatgtcgtggaggaaatctgccagacgccgacatatgtcctccgccgcctctttgctatgtgcaaacatcacaaagtcatccgcgtagcgaacgaatggaatgcccagcatttcaaagtgtttatccagagtgtcgaggtatatattggccaggagcggtgacagagattcgccttgcgggactccgatttcgtttgggaacatgtcgccaagctcagaaatatcgaccgttagccagttgcggatgagtgtcaggaattcttcgtcagcaatccgaagtcccaaagtgctgagcagaacgtcgtgatcgatgttgtcaaagcactttcgtatgtcggcgatcacggcccactggcggccacttgcaacaatcgatcttgcgacggcaacggcttgatgagcatttcgatgtggacgaaagccatagctgaacctgctgaaagtcggctcaaatactggttccagaacggagaggcacgcagcttgcacaatccggtccctgacgcacgctacacccagattgcgaacaccaccgtctggtttcgggatttgaatcctgcgcagtgggcgcggagtgtagcgacctgatcgtaattcctcgctgagtgtgttcagttctctgtcgatagccgtgccgaaggccgttgtagatattccatcgacccctactgccctcgatcttgattcctgaacacggaaccatcctgacctcaaggtctcggtgtcgcaacgcgtcacctgtttctggagaccaggatcgagccatctggacttggcaagatcatcgacctcctcacgtgggcactatcattccctggcgtatatggaatctcggaaggtgacaaccggggaaacatcctcgatgctctttctaagccatctgttttatggatcgagtccgctgttgagcacttcgagcccaaggagcatttgttggtacaggttcttcttgaagcagcattggaagacgccctcagaacgatgggagcagcaccagaccgcttccacgaaataatgaagggcctgaccctgcttcatctgtaccctgaaccgagtgtgaccttgccaattgaaagttgggtagaaacccacttgggttcggtccgccacgtttcggtgcatcatctggccttcggcagttctctcactcctcaggcattatcgtgggcgcaacgcagcgaaaccctgtggctaactgggcagaagatggagatcgatcccaagtaccattcgagttggatatctgagcccgaagccgcccgcataaaaaccttggttagaggcgagatctggattcgctccaaccggtccggcaaggccctcgtcgcgcgatctcgcgagcgagcatctgatctcgctctgggcgtgcgcctgcgctccaatgccgctcggaggaggcgcatcacatctaccgatcagatcgccgcgtcaatcaagtcgctggcgagcccaccgggagcacatcgagatctgtacgaaaagattttcggaggaagacaggcaacgaaagagggcaccgagtccgacagagccatccgacgaaagtgagtatgccgcctcagctgaccaattcaaaacgtcgtccgggataggcaaggcggaaggccacattgcgacaaatgttggccgctatttgcaggcatttgagcgaacgggagtccagcttgtagccgcggaaacacggtgggccgggccttatcgactacgaatggccgcatctgcaattgaattcgacatcccaaacgctgaggtgcagcggcaactccggctccgtcgtccaaaaccgcccacggagagggcagagctactgcgtttcacacattcctatgtgcgcgcgcagtggctcatttctcaaggtaggctggtggcagcacgacaacgaggtcggccgcaggacgatgcctcttcaaggttgcttcgcatggcaggcgatctcaggttctccgcaaagcttcgcttgattgcatgtctcggtgctgttaatgtgctctatcgtattgggcgattccaggcggctcttagaactctcgttgaaagctcacgtcttgtgcattcagtccgagacgatgtgctgaaggctcgctatcatttggctcttgcctggtctcactcgcgcggttccagcggtccaacatccgatcaggctactctcaaggcattgagaattgctagcaagttcgcggagagtggcggcgatagagccacactcggactattggcatataggacgagcatgtaccttacaaagaaaggtcgccatctcgaagcaattgaccaacttgtccaggcacttcaggcctatctgctcacagagaattatgagggagtggaggcgtgctgcgtcaatataggtagctttgttcaccggcttggagaacgatactatgcagaggcgcgacgttggttgcttacaggaatcgcgatttcacgatggatgagaattgggctggatggtgctcatggagagatgatcatgggaaagctctatatagaaggcaaccgtaagccagagctttccatgcggtggctcaagagagcggaacgcattgccgaacaagccggcaaccaggtgagtttggcagatgtaaaaatggtcttggcactgtggcatcaaaagtacggatcacgtcgggacgagatcgacaccttgattcaagcgctggggatgtttcgcaaactcaggaaattcgactgcaagcagaaggaaacgtacatggcgcacaagttctctgaggtgtggcaagatgtgctaacagcaattaatacagaaggatagttgaacatccaagaaccgcctcgtcagcgctcgaagacacaaagctcctgccagatgtgggccgaccgacgttggattcggcttgacaaaggggccgaaacggacgagcattatcccaagtttccatttggaagtttccccggcttcaaactgggcttcagcgagaccgagctttgctcggtttgggagctgctatgggttcgtccgacgtgtctccttctcatgcttctgcatgttatccgctcccgctaactattctgcagccaaaccaaagcttgacacagttacaggtgcttaggttatagctccgagtaatcggagtaacatgccgtcgcctgactaacagaagtcacagtagagccattatgagaagtcggaaacaatagaaaatactagacttaacattgcgatgaatcgaggcttggcggccaagcctcgattcatcaacaacttacgcgcattgaagcgtttgtcgaaaatcgattttcgacatttcttggccggtcgctcgcgcactgaacgtaaatcgcggcaaacaaagatggatgcgaacgttgaaaaacggcagcgtttgacgaaatacgaaaatcggcgctcagatcgccggattggcagaagcaaaggctcatctcgccgcctctgctctagtcttctctgccagaatgtcgcaagcgctccgcccttttggctcccaaaccccttttcgacatggctggttctctgaatctgaagtgtcgcgctcatggtgccgaatcgatgcagggctgccaaaggagagttgcatggctactaattcgcgttcaggaatttctcaggggtatggcaagaaacgtgattgtttggtggatggcaagactcacggaacacaggcgctttgctgcgctgtcgtcgattacctcgtatatctgagggcgtctggaaggaaaacaaccacgattgggtcctatggagagagccttgcgctgcttggaagaaaaatgggggcagacatctcgttgctggatgtctcttccacgctgctaaatgagactgttgccagcctgacggcaattgatggacaaccccaaaagcgtcgctcgcaaacaactttgaaccgccatcgaagcgcatacagggggttctttcggtgggcagtcgagaccaaaaggataccagcgaatcccgcccggttgctggggagatcgaacattgaatcggttcccactcagcccatgacgttgcacgaggtccactcatttcttcgggcgattcaccattcaaacgaccccctgcgagttcgagacgagacacttttcgcgttgtatgctttcaccggtctgcgcagagccgaggctctgcaattggacgaagaggattacaacgttgtcacaagaaccttgcaggtcaagaatgggaaaagcggacgtccgagaactgtgcatgtgattgcgcggcttggcctgctgctggaaagccttcgaagacactgcgggcctggaagagagcactcaagcggcaagctgttccccggacgaggtgctggcgagagtctcactactcgccaagtccagagcaggttccattattggaaggcaattgcgggacttcgacctgcattgaccatccattcctttcgcgttgggttcgccacagcattacatcggcaaagccgcgatgttgtgcttgtatctcgtgcattagggcatagtgaccttcggcctacccttcgctatattgacctatcagcgggagaactgccggattggatggaaaccacctttcgacagattgcatgaccgtgcgacgctgaattatccagacaccgtctggataatttagataagccatatcattccaatccctggccgacaagcaccatctgaaggcttccagcgcggatgcttcggagagttttgcactgggatgggggccgagtttgcaatgtcgcctgtgaaagagtctgcttgcgaatggtatgggagatcgagacgtagctggagcaccagttgagcaggttcgcaggaacgccagcattggccccgacccaggaaataagaacgccccgtctccggggcgttcaaaggtcgctcggtgagcggagccttacgacgaaagcttactaagaatagtcgggcaatcgccgctcaagtacactaagatacttgtattctccgtagggccattgcgtcaaggcggtattttgatgtcctctgccatggaatcacctcagaagtacgttctcggcctcgatctcggatcagcatcgctcgggtgggctctgatcgccctggatgatgccgatgaccccacttccctaattcgtgcaggcgttcgcatctttgaacccggcgttgacggcacgtcaatggaaatcgaacaaggaaaagaccagtcaaaagccgttgagagacgaacggctcgcttgcatcggcgccaactccgtcgccgggctgcccgtcagagggatttattccgacttctccaaaggcactctttgctgccagcgccgggagtattaagcggatcgccagaagagcagaggcattcgattctcaacgaactcgatcagcacctcactcataaatggcaatcggcatttccagacaatcgtttcgcacagctacctctctattaccttcgcaaaagggcgcttgacgagtcgttggaagcgcccgagattgggcggatattgtttcatctgattcaaaggcgaggcttcctctcgaatcgtaaagagaataagcagaatcctgaacaaaaaaaggagttaggccaagtcaaggccgaaatccatagtttggaacaggacattctgagtgccggcgcacgaacccttggtgagtttttcgccgggttggacccgcacgctcaaagagtccgtcgccgttggaccgcgcgaaagatgttccaagatgagttcgagaagatctgggaagcacaggcgatccatcgcctcgaattattgacgccggagctccatgacaagatcgcacatcttctgtttttccagagaccgattgccgctcagacgcatttggttggcaaatgtgagttggagtctggaaagcagcgggctccttgggcagcaatggaagcccagagattccgcattctgcaaaaagtgaacgacctgaagctaataaaccctgggagtttgatctccgatccgctgacggaggatgagcgccaacgactgtacgatttgctggattgggaaggggatcagacattcaaagcgattaagaagtacctctccttccctgccgaggctcagttcaatcttgaaaagggtgacgagaaacgtcttcgcggaaatcgaacgcaggcggtcatgcggaaggtgtttggtgatcgctgggacggctttagcgcagggaagcagcaccagatcatcgagaactggagaaatagcgagtccgatgaggcgttgattcgcgaagcagtcgaacagtggttactggacgccgccgccgcgagttcactgtcggaacagattcctgagcctgggtactgtgccgtctcattgacggcaatcgccaaactgctccctctgatgcagtgcggcaagtccttcaaagaagcggaaacggaagtgtacggtgctcggttttctggcggagtggttttcgatacgctgccagaggtgcgtaaacagcttgagtcgttgcgcaacccagctgtcgagcgtgcccttacggaactccgtaaagtcgtgaacgcaattgtgcgcgagtatggtaaaccctatgaaatacgggttgaacttgcacgcgagttaaagaagccccggcaagagaggatcgatgcaacgaagaagaatcggaaccgccaaagagaacgcgaagacatagccgtcaagattttgcgtgaatgcggcctgtcgaacccttccagaaaggatattgagaaagctcttctgcatgaggaatgcggcggctattgcccgtacacgggcaggcacattccattttctaccctctttgacaactcggagtttgacgttgagcacattattcctcggagccgatatccggacgattcgttccaaaacaaaactttgtgctaccttcccgaaaaccgcgatataaaaaagggtcagacaccttgggaagcttacggaaaagatgagcagcgttgggctgagatcatgactcgcgttagcagttggaaaaacagaggaaagatggtgcggttttccattcaaaccgaggatgcccttggtgacttcagcgcacgccaattgaacgatacgcgctatgtgagcgttctgtcggcgcgctttctcggagccttgtacggtggccgcgatgttatggatggagagaaagtgcgccaggtgattttcgcgtcgagtggctcagtgacggcaacactacgcagttcgtggggtctggaagcgatcttacacgaactcgtgccgacagaacccggtgagtcccgagggaagccacgcaccgatcatcgtcatcatgcaattgacgcaataaccatcgctctcactcgcccaaaagtcattcagtcgatggcacgagcggcgtctatggagccttggcaaaaggacgcgcgcgcttggcgcaagattgagttaccatggaagaattttgttccttccatccgacctcgcattgaagagatgctcgtttcgcatcggccagaacacaagatgagcggggaacttcataagggcacgaattactcagcgcctagcaattacaaggggaagcccacggttcacacaaggtgttctctgtcggcgttgtccgcttctgacatcgcggacgacgaagtaatcgttgacattgctgtccgggatgccgttcgcatgaagttagtggaacttgggggaaatccgaagctattcgatcgccctgaaaatgcaccatgtctctccgcccgcgacggacgcctcattcccattcgcaaggtgcgcatccgcgagacgaaaaatccactcagggtaggtcatggcgctcgggagcgctttgttgccccaggcggtatccaccacgttgctctctttgtggtgcgtgacgagagacgcagggagaagtgggatagcgatgtggcgcaagtgaccgaggtttaccgtctctgccctaagaatgaccacagaaaaggcaggccgcgatccgcagtaaaggaacctccgatttcccgacaattgaaagccgaccccgaggcccagtttctcttttcgctgatgaaagacgacacgatcaaggttactgacgcgaacggaacgcacatcctacgcgtgaaaaaatttagcgataacaaacaaatgtggtttgttcctgtaaatgatgcccatgatgatgcgcaacagaaaaaactttgcataacgtggtcgaggacaccgaactcgttgaaagaacttcatcccaggaaggttgtcatcgatttgctcggaaaggtgcacccggccaatgattgatcgcattattgaaatcgctaatcccgcgcggttgagcgttcgcgattcgcaactcgtcattgaaatgacccaggcggatcagctttcacttcccttcactaccccaattagcgaaatcgccgtcctgcttctagcgcatccacaggtcgttctttcgcaggcggtcctttctaggattgcggaggttggcggttcggtcgtcaccatcgacggaaaatttctccctgcatcaatacagttgccggtgcaggcgcactttctccaaacagagcgatttgctaaacagatgcaactctctcacccaacgcagaagcggctatggcaggagattgtgcgcgccaagatccgagcacagggggagctactgaaagagcttaggggaacagatggtgggttaatcgccatggcggcgcgagttcgctcagacgacgcaggcaacctggaagcacaggcagcacggcgctattgggcacagatatttgatgatccgaaatttcgtcgagggtctgaagagccaaatcagaaccggcatcttgactacggatacacagttttgagagccgcggtggctcgcgcgctatgtgcggcaggtctgcatccttcaataggtttacgccataagaatcgctacgatgccttttgtctggcggccgatgtgatggaaccgttccggcctctcattgatcgccgggtggcgcaatggattgtcaatcacgacccggcggagccgttgagcactataacgaaatcttggctgatcggagcaacgacctcgcgctacgcatttgaacgcgaggagcgctcgctcttcgacattctgttacgcacagcgaattctctagcgaagtgcgttaccggagagtcccgtgaaattgcaattccttcgttgctggagccatgcggtgagtccgtaccagctagaaagggtccacggagcgtaaccgtccaacaagagattgaatcagtcggctaaccagaagggctttgagttgtttcacagaaatgctgagttgatcgctcatgaaaggactgcttctttcagcgtaccggtctttgtggctcatcgccatgttcgacctgccggtggagacagcggcgaataaacgcgattacacgcgcttcaggaaagccctgcttaaagacgggttcatgatgctccaattctcggtgtacgcacgctacctcccgagcgaagaggctgcggacgcccatcgaagcacgatccgcgccgttattccgcctttggggcaggtgcggcttatgacagttacagatcatcagtttggcagaatggaggtcttttatggcagaaaacctcgcgagccggaggatgtccctgagcagattctccttttttgaagagagaagccgcgccaacttgctgcttttcagcaagttcggcgcggcctagtgtacttgagcggcgactcccggccatccccagcgtgctagagggctggtaacgtcgcgaacacagtgtacttgagcggcgactcccggccatccccagcaaaagagactagctcaagcgagcggtgggaagtgtacttgagcggcgactcccggccatccccagccacgtttgagaaggtgtcgttccacgcttcagtgtacttgagcggcgactcccggccatccccagcgggggaaaagccccacaggcgatcacttgactcgtaatagctctcagcctatgtacggatcgcctgtggggcttttcccccgctagaaatgaactacaaaaagcttccaggaagatgaaattcggtgcgtgttcaggatttccccaatctattggcacacgtccgttagattcccattccgattccgtgggcaatcgttgatgcttgattcaactccagcgcagaggtcttcgagacatcgacgctgagctgaggactaagcttggcaatgtcgtcggtgaatagtgtggcctcgtggctggcgcgggagatggagacgtagccgaagcgggagttgagcaagtccggatggacgccagtatcggcattcacaaggacgcgctcggcggtaaggccctgggaactgtgactagtgacggcgtagccatggtcgaagtggcgatgttcgctggcgctgaattcgacctgtcggttgttatcaagacgggccgaaatgcggccatcgggcgcaatgaactcgattgcggcaaggtcgcgattggcaacgccgagcgacttgtcgggcgcggtgaattggatccgatcgccgactgagaactcgcggccgatctcgcggtagacgctaacgccggcaaggcggcgcggatcgtaggtagcaagatcaccagatgatttctcgaccgtcaagagattgtttgcctggttgattgcggcgactgttccgtaggtcccggcctcgataccagcggctttgctgccgcgcgcatagcggataatatccccgatttcgtaatgattggcccaggcgcgctcggcgccggtcatctcctggcgctgaacgaggacacgcatcgaatggtcctctggagccagtttcccgctggtcctgagttcttgtcgaacggctgcattcagctcgcgtcgggaggcgttgtcgggcgaaacaatcaaggtgtttgagggggcctctgcgtaggttttggcgattgtctcaatgcgctcctggtgattgggaatctcccggactcggtcctgttgttggagcatctcaagggcagcggccgtctgccccttggcaagaagttctacggcggatttcagagccgggtctttttggcggacaatctcatccaacttggcggtccgcattccggcctcctgcaactgttcgaatggccgtccggcttcaacgccctggtgctggcgggtgtcgccgatcaggagtacacggtcgttgggaccgagccgaccaaggaagtcgcggacctgatttgtgctggcgagactcgactcatcgaggaagtagaaatgcttctgtgtcgggttggcggcgttggcatcgcaggcaagaaagccctgcaaggttccggcttcaatgcctgcttcattgagttgccgggcggcgcgggaggtgggcgcaaagccctggacttcgtagccctgtgcctccatggcgctgcgtagcgtggcaagcgttgtcgttttgcctgcgccggcaaaaccttggattccctggatacggtcatgtgcgctgagaacatcctcgaccacggtcttctgtgcccggttcaaatgaggatgctgctcggcaaagttgatggcagcggagcggctcatggcgggctcaaagttgttctgcccggcgcgcatcctgtgaacaatctcctgttccgcctggattgttttggccgtcgtgaactgacgacctggcatcccatgaccacgctcgacggtcagaaactctcctgcggcgagacgggcgtccagattgccgcgtacctgcgaataggtgacctcacccatgccgcgacggagcccatcgcggatcagagcccgctcatcgacaacagcctcccgctcgaagttcttgtcacgagaatacgtcagagactcacgcgcccggtcaactgagttgactggcgtttgatgatgctcaagccgttcgtgcgcggctcgcacaacggcctcggcctggtgcccgaagtcagcggcaagcttgcggtgtgccgccatgacgtcggctgtcgagtgaatctccttgcggtctcgcgtggagtgcgcggcgatttctgccgcctctttcccggcgcggccagtgcgctcaaggtatgcccgaatctgctggctccgcgggctcgatgcgtcgagatattcctgcgtgtaacctttgatctccggcgctccgcttcggccaacggtgatctcgtaaccaagatgacgcaatcggtatgtaagctcggactgatacacggcggtggcgaactgttgcgaagcgaataggctctgtggttggatggctcggggctgcccgtttgtgcgttccgtgacgttgaagacgacggcatgagtatggagttgcggcgcgacgtagccatcgacggggcgggcagtgtcgtgctcgaacttcgcggcgatgaatttggccgttgtctcggctggatgattcccaccgatcctcgcctgcgtgtaaagctcaagctgttcaagcgccaggttcacgctctcgcggtgagcgtcacgaacacgaacatccccgccgacaagtgccgtgagcgaaacggatttgggcgctgaaaaggtagcatcccacccggcgcgatgctccattgtcttcacgatcttccagtctgcaacctggtattcataggatgcccgctggcgaacaagctgcactccggtcgccggatgttggccctggctcagcttggcaaagtcctctgcggagaccgctccagcgagtccgaattgcgatgcgagacggccttgccattcgccggcagtcacgccctgctgcgaccagtaattctgttcctttgccgtgaattctttctggtggtagctctgggcctgaccagcagaaagcggctttgagatagtaagcatggcttaaatcctcggtccgaatgggagcgaagtctgcacttcaagtggactctcttgcgtgggcttagcggctgaaacggacggtgccttttcctgaaccgcaggcattgggttttggggcaaagtgaccgcgggcttcggcggttttggctgctccttgctaggttctcgcacgatgaaatcgtccttcaaccgttcaatgaatttgggcttggtagccggcatttcctgtatgggaaacgagaatcgtgagacgtagttcccgtgcttgatgtaagcgtggaggttctccagaccgctgatctcagaatcgagaaccaggggctcggtctggcggtcgagggcgaagttcctgccccgtcgtgttccatcgaagtgggtctctttcatgcgctcgatttcgatcttgccgatagcgcggctgacccattcggcggcattcggttcggtcgtcttgaggaagatcttggttgcaggctgcgagagcatgacctcggccaggtgaccgtaaatcacctccaactgtgctttgccttggaagccaagaacaatcggattgcgcgactttcggttctcggtaattgccgtatggagttgcggcaatttctgcaggctggccaactcgtccagtacaaaccagacagggtgctgctctgccgtgggcgcagtgagcaggcgaaggacgagcatgtcaatccacaagctgtgcagcgggcggagcgcctcgcgctcggccggttgtgaggtgatgaagatccatcccttgcgttccttcgaccactcgcgcgccgtccattcggacttcgaatcttccttccgtggaagaagccggaagctgtcggcgacgaggctcagcgagccgagtacgccggagcgttgttgcggagccgatcggtcgatcagcgaagcaagctctgtatcctggacgcgacggtcgatctcttccgggtgcgacatccagttcaccaattgttgcggagaaggcagatcgagcagaagatgagcgaagatcttctgcgggctttcaataaagaattcacccttcctgtcgttcgtcggctggaagagggaggcggccacggttcgggcctcggcgcggcgaacgagttcctcggatggtccccaatatgggcagcgccggtcgagcggattgagcacaatatcgccacggctttcatcgtaaaatcgttcgatgaactcgcaggcagggtcatagacaatggccgagtggcggcgtgcctgaatctgcctcagcatctgcataacgatggttgtcttgccacttccggtgtcacctatgatctcgaaatgctggtcctcagccctcagtggaatgcgaagcatctccctgcattgatcgacctggatgccaattccagtcccagcaacggccttattgaactcctttggcgaaacgagaaccggtcccttgagacgccgcccgtatttcatttccttgcggcggcgaatgtccttcggaattgactttacgaccatcagaacgagtccgagcgcgccaaaaaccaattgccatttgaagagttccgcgaagctagcgccgtcgtagacatgctgtttcaggtagctcgttagcgccttgtcctggtaaaccatcggagcacttcgatagagaaaggccattccgcgtttgcgggcgtcctcggacagggccgcgtgaatcggtttgccattcggctgtgccgtttcgccttggccgacatcctgatcggcggcgtaccaggaatggcccttgccatcggaaacaagtagcatctggtactttcccgaggcgcgaaggctgggaatcagcgacgcccggatgtaggccggaaggtagaattgctccgtcggatcgagcgcgaatgcgaaccggattgcgatcagaatgccggtgaaaacgagagccataaagaaggcgcccaaggtgtagatcggttggtgcggcggccagataatcgtctctttccttccccaggttgcttcagccatggcgctcctccttggtatctgcgacgtatcgcgcgatgacatctttggctgcgcagcgcttggtcgacttcacgtttcgcaggagcgcgtcatattgttctgaggtcattcgttgaccgcaaacaaccggtgatagcgcctcggtcaggaagagttgtaatgcaacgacctcggtcaatacatgggcgagtgagacccctccagatagtgatctcgcctcgcgcaagagagtgtcgcgaacccattctccaagacgagcgccgcgcgaggccgcagcctgttcgagttccgtgagttccaaatccgtcaccttcgtactcgcagttacgattcgcgactcacgggattggttttgagttgagtctgtcccggtaggcgtcatatatccctccatttgcgcggtttgcttagagcgctttagagcgccccgacaaatgcaaccttctgaaaacaaacaagtaactctagagcgccccagagcgctccacagcgccctgtcaggggtggagtgtcgagataaacccggtgcgcagcaccgaacgggctaccggcaccggagatatcaactgcgggggcggggctcactagccgcctccacagctttggcgcgcttagtttgccggcgaaaaacgctctggacggcaggcgcatggctcatatgccggatacgcaggctctccggaacctgcgcggctccctgggtgcgcaggaagtcctggaagtcacggtctttcgcgaacacgtagccgagggctttgtcgacaacttcgtcggcgggcaccttcaggaacgccgcatactggttgatctgggcggcggttgattcgtcaagccggaccgatgcggtgatccggcgggtttggttgatctcaagcaacggcattttgaatttcctcctggtttgcagtttgttgatggtttgaattgcgaacttcctgttgtgcctcaaaaacaatctcaaccgcgtagacgcggcaatcgttcgcggaaagctcgaatctgcggctgacctcaaccatggtgattgcgtcggagaacggaactccatcggtcagccaaagccgtgccgatgccacgtcggcaatgcggcgggcatagttggcgtcgttgccggccaaatgagcggaaaatgaacatgcaaatctcatctctgaaggtccggattgtcgaaccgatttcagcatgtctttacctcctgaatctttgagctggcggcctggaagacgtgttccatttgataggtttgcgaggcccggctgtagccgttcaatctcaggacttcagtgaccattcgacggccaggacggcgctcgacatgcacaacgaaatcgacggcctctgcgatctctgcttcggtgtcggaaaaggtcgcttgcgaatggctgcgcatcacgagattggcaaatcgagtgagcgccttagcggcggaattggcgtgaatcgtcgccaatgaacctgcatggccggtgttgaaggaatcgagcagcgtgcgcgcctcggttccgcgcac

SEQ ID NO: 2506 - DNA, 20074 bp, synthetic construct
  source 1..20074: mol_type = other DNA
  misc_feature 1..20074: note = Synthetic
cttcgattttcttcatctcttctctcctcttgctgctgtccacctggccgccgcctcgccagaaggccagaacccggaggcctggaaggcggttgcagggctaaatctcttgttcttcacaagtattgcatttcagtactgccgtactgtatcgtgagcagtattacccaaccggacgtctctgtcaactggtgtttgcctgaaatattttctttatttcggccgaaaacccggggatggaaacacttaagaaatgccgcaaatgggacttgcaatcggtactaggatacggtactgtgatatcgcatcgtgagcagctacaatccaacggcggaacctggaagcgagctattttcgacgttcgaaatcaagccggggttccgagccggcctgcggcgtcatctggctgcaagcaatcggcgttgtgctgacgaacgcgagcaaagcccgaaagaggcatgaaatgggcgaaacaacatcattaaagatgaggcagcaaccacctatcccaagccggagaaagtagcatgaacgagaaaaatgaagttgtgattgtctcggcctgtcgcaccgccgtaggtacatttatgggtgcgctcagtgatgtactgccagccaagctgggggcttccgtcgtgtccgaagccatccgccgagccggcatcaccgctgagatggtggacgaggtgatcctcggcggcatcctcaccgcgggtgttggccagaacatagcccgtcaggtttcgattgccgcgggtttgccgaacaccacgcccgcttacaccatcaacaaggtctgcggatcgggcatgaagtccgtgattctggccgcgcaagccatccagtgcggagacgccgacatcatcgtcgccggcggagtcgaaaatatgtccgcatcggcgcacatatctcccggctcaaggaagggctatcgcatgggcccggtgcagatgcttgacagcatgatcaccgatggcctgtccgatgcgtttaccggcgaccacatgggcgtcacggctgaaaatgtcgcccagaagtacggcctcacacgcgaagaacaggaccagttcgcctgcgccagccagaacaaggctgaagaagcagtcaaggcggggcgcttcaaagatgagattgttccattctccattccgcagagaaaagggccggccatcgtcttcgagcaggacgagcatccgcgtttcggcgcgaccatcgaagcgctcgccaagctcaagccagcattcaaacccgacggcaccgtcacggcaggcaatgcttccggcatcaatgacggagctgccgcggtagtggtcatgagcaaagccaaggcagaggaactcggcctgaaacccctggccgtgattcgcggctatgccacaggtggcgttgagccctcgctgatgggccttggcccaattccggccacgcgcaaggcgctcaagaaggccgggctcactgtcgccgatctggacctgattgaagccaacgaagccttcgccgcacagtgcctggccgtggctcgtgagcttgagcttcccgccgaaaaagtgaatgtcaatggcggagccatcgccctgggtcatcccataggtgcctccggcgcgcgcatcctggttacgctgcttcatgagatggcgaagcgcggatcgaaacgcggactggctaccttgtgcatcggcggcggcatgggaacggcgatcatcgtggaacgagtctgaaattgcgtagtcttcgcgttgcgttcggagccctctgcaagtttcgggcttccatactgagtcaagagaactccgcaggcggtatgtttgcggctttcaaaaccgagggatggctttcgtaagagctttatcccatgagcaaggagaaaacagatggatcaagtagtcattacctgtgcagttgacggccctattgcagtcccgagcgacaatcctaatcttccttacacgcccgagcagtttgccgagcaggccaaggcagtgtatgcggaaggcgcttcggtcattcacattcactctcgcggcgccgacggcctgcctacctccgattacggccgcaccaaggagattctggacgccgtccacgagtcctgcccgattttgacgcagctctccacgggcggcttcttcccgtacgaagagcgtgcgcgcctggttgaactcaagccgcgcatggccagcctcaacctttgcaccatgacctttggcaagttcgagttccgtaacccgcccctcgaagtgcgcaaggtagctgcgcgcatgatggaactgggcgtcaagggtgaactcgagatctacgacaccgggcacctggaatttgctctgcgcctcctcaaggaaggcctgctggttgagccgctgcagttctccgtggttctgggcgtggatggcggggcggcggcgacgccagagaacctcatcaccctggtcaagcgcatgcccccgaacgccatttggcagatgatcggcattggccgtgccaatctgccgctgaccaccatcgccctggcgatgggcggcaatgcccgcacgggcctcgaagatacgctccagtacacaaagggtgtaccggcagacaaccccatgctgatccgccgtctcgtgggcgtagccaaggccatcgggcgcaccccggccactgtcgaacagaccgaacagatgctccagcttccaaaggtcaatcaggctgtggcagcggcagtatgaactcgcatctgcagacttttgcggattcagagtgcgactgtgccaacgccttgtagcgaggaaagactcgaccagaatgcgggctccggaggcatccgataggagcctcccgcgcccgcattctggtaaccccgatgcatgatatgcaaaaacggcagtcaaagaatggacttgccaccctatgcatggacgaggcaatgggaaccgccgtcgtggttgaaggggcatcgtcatagtgggttgcacatacgtgatcgcagctggcattaaagctgaaagcaagtcacgcaattgctgaattgaggaaatgaaagatgaagaaatccattagttgtgaacaagcggtgcagatgatccccgatggcgcatccgtcatgattggcgggttcatgggtgtcggttcgccgcaccgcttgattgctgaactggtacgccagggcaagcgtgatctgactgtgatgtgcaacgatgcgggccgacaggactacggcgttgcaaagttgatttcggcaaaactggttcgcaagctcatcgccacgcatatcggtttgaatcccgaggcgggccggcaaatgatcgccggtgagatggaagtcgaactgagcccgcagggtacctttgccgagcggattcgtgccgggggcttcggcctcggcggcgtgctgactcttaccggcctcggcaccctcgtcgcggagaacaagcagaccgttgatgtaaacggcacaacctatcttctcgagactcctctgcgcgcggacttcgccctgatcggcgcgcatcgcgcggactatcgcggcaatcttgaatactctcttaccgcaaggaacttcaacgtcgttatggctacggccggcgccattgcaattgccgagccggagatcatcgtgcccgtcggagtaatccccccggacatggtcgccacaccctttgtctgcatcaagtacatcgttgaaagggccaattccaatggacgataaagtgatcattgccaagcgtgttgccttggaactgaaacatggcgatctggtcaacctgggcattggccttccaaccagcgtccccaactatcttgcccatggggttgaggtcttcttccaatctgaaaacggcattgttggtcttgcctcaagccccggcgacggaatggagaacatgtctcttaccgatgcgggcggcgggtttgtcggggccatacccggcgcggccagcatcgacagcaccatgtccttcggcttgattcgaggcgggcatctcgatctgaccgtgctcggcggactcgaagtcgatgaactggggcatctcgccaattggatgatacccggcaaaatggttcccggcatgggcggcgccatggacctggtgaccggcgcaaagcgcgtcatcgtggccatgacgcacaccgcgaagggcaagccgaagattctcaagcgctgcaccctgccattgacgtcgacgcggcgagtgagccttatcgtcacggagatggcggtgattgagccgacagaagcggggctggtgctgcgtgaattggccgagggagtgaccgtggagcaagtcgtggctgccacgcaggcgacactgattattcccgggcacgttccggtgatggagttgaattaggcaaaaaagcgtaggacccgggggatggcaaatcaaacttgaaaccccagtaatgcgcagcgtaagtaaaccggcgcctggcgcgatcatctatatgcgcaaagtgccggtttcttgtctggtcagcccttcttgttcgaatccagtgatgcttaggtctctgggacactagcgtcgcacgcttcgtctcgcagccgatagagtttcaaagccgtggtactcttcccgaaatttgcaggatccgggcacgcccatgcgtgccgagagaagtcatttttaatttattggggcggctagtggggatcgaacccacgacatcctgtgccacagacaggcgttctgccactgaactatagccgccatgtaccctagcaattgtagcatcgaatcaggttggctggttggcccgccgcaaggagactgcccatgccccgccccacccccaccgctgggcccctgagtgccagtttgcccggccgctggaacaagggagcatggcttttccgcgaccagaccctccaaaagctcgaaaccctcctggacgaggcattcaggattcccggcacccgcattcggtttgggattgacggaatcatcggtctcatacccggctttggcgatgtgcttggcgggctgctgtccttaatcattcctctggcggcctgggtgcgcggcctgccctacgttaccttggctagaatggcggcaaacattgcaatcgaagtgctcatcggcacaattccggtatttggcgatgcattcgacattgcgtggaaggccaaccgccgcaattaccggctcttaatccggtatttgggcgagccgcgtcgccacacctggcgggactgggggtttctgcttctgctggcctcggccgtggcgctggtcttcgccttgcccttggttctagtggtttggctggcggtccggctcgcccggggctggaaaccctcattggaaccccgttaagtcacagagatagaccgttccgcgatacaatcgaagaggaagtcggggcgtagcgcagcctggtagcgcatctgctttgggagcagagggtcgggggttcgaatccctccgccccgaccattcttcatatttggccctttttgctataaggtcaaagggctttctgtatgtaggataaagacttacgtcatcgatggagcagttcaaaagcactattttgagtaattccgcctgttccgcgggtttgcgcgtaacgtacagcgaatgagcacgttgcgcgagttctaaagtcctttgcacgctaagcagccgttcagtggtctggccctcttccaggctcgccgtgagcgatttgattctgagttcctcagtttgccagtcggcctgtttacgttgccagaattcctctgaaatcttgccgtcgagtttgtccgtgtaggctgcatccatgtggccgtggagtgccgccaattggcgctccagccccgagcgttcctgcgcggcctggtttcgcatcttcacgtgtacctgttggagggaagcgccgatagcgcgcacaacctcttccgggatacacacgttctccagcacgtgccctagcctgtcggcaatttcctgctcccgaaagcgtggaagcccacagggccctttgtagccggtgcaacggtgatacacgtactggtgcttctttacctctgcggtaactgcgcacccacaataggcgcacgtgagcatccctcggaaaggtatagcgtgcttggaatacgtgggcctgttgtgaccgttcagcaccgcctgtgcctgtgcatacagatcgggactgataaggtgtggctgtgtgccctggtacgtctggccactccattcgaattttccaatataaaagggatttaaaatcattttatgtaggtttgttttcgagatgcgcgtgccggtgacgtgtttcagttctttggagaggccaagcagggagtagcgccccgacgcatacatctcgaacacacggagcgcaatagcgcccttctcggggtgaatttcgatggtacgtgtcccagcattattccggtatccgaaagggggacgtccggggtacgtaccctgcgacgccttctcgcacatccccttttttacttcttcgcgcaggttttcagaataatttcgtgccatcgcgaggcgaatatcgtgcatcaatttcgcttgcgacttcgagtccttggaaagccattcattttccttcacaaaattgatttttaaatccaggtcttcaagtgtgacggcatcgcgaaaattccgatagagtcggtctgttttttctgccaataaaatacggcaagagcgattgcgctttaaataattcaccatttccgtgaattcttttcgaccggcagccttggcggactcgacttcaataaattcgcggacaatttccagtccttccttcaacgccgcagcgcgtagtaattttacctgggcttcgattgagaacccctcttcacgctgctcacggctggatacacgtgcatagagaacggctgtacgtggcgtcatttcgtgcctttcttcttgctggcctttactgtctgttttgcccatctagcttgaacagcctttcgggcctgttcgctgcgttgttccggggtgagattcgctgcacgtcgagttccgccaatgtggccttgctggcggaagaattccaacgctgcttcaggcaatttgttttgtgtcttcatacgtaggggttaagtgtatactgccctggcccgaaggggaagtctggagaagtgcggacctcctaaatgactcttggatttcctccatcgttaggggttgtcgtttcgcaagggaagtttctgcaagcgagttgagaatccgctttccattcccgtttccatgcttcaaaacaactgagcgggccaattgctcgctgccaagtcgctcctttagggtctcgtagccaatggacgcaagccagtctcggacgggaacctcagctggtggcgaactaaaatcctggatcggctccgtgcccgcaattcgaattccattgaacgggcgaaactcatggacaaagcgaagatgaccgagcgtggcaagttcgggcggaattctatttccgccgatttggcgctcgacccgcgtaaaaacgctttgatcgtggagttgatacccacgtgctgcgcaatattcggcaaacgtcggcgcgatgagacggccataatacttttgctcctctgacatatctagacccaccatgctgtcgttgtgccgcttgtattgaatttccatttttcgcagttgcctcttccactcggccagcttgtcgtacatgcgaatcaaacatggcctcttaccggcgtagatggtttgggcgattgcactgcccattgcgacaaattgaagttccttttcaagtgatttgtcgatgcgagatgaaaactgttttcgattcacgtacgcatgatctttgagccacgagacggaaacaccttccacatcggcggcaaggtcaatcctcatgacctggagggaccatgggtccacctcaaacaattgggaaataatgccagcgatctcctggagagtcttgtcgccagcatcgatgatttcgatcttgtgatttggccgtccctgccgcaagtacagatgaacgactgcatcgatttcgaatggttctcggagatcacagacgtattggtaaaacttggatggtctgaaaagggggaccgggtgcctcctcaggtcctccagaggcccgatgagtatcggccctggagaagcaaattcgggaacccgcaggtccagcttatcgatcacctgagaaaccctcctcagggaccggaggcagtgagggagcctgccctcgcgtaaatttacgtgagttgcaggctattagacatagcctgcaaccgggggcggcgttaccgccttggtggtcccctccctccgcaaggcaatggccaatcgcggcagacgatgcaatagaagcaccgcccaacgctgtatacgcgcctgtgaggggctcttggaggtcttggacgggagtagaggctaggaagggtacggcggcgcgtatacaggctttgcaggagaaaacagactgggtgcatttcaggcctcgtggtcggacgcctatggttggcaccaggaaggcgagcgttaagtccgctggtcgaaagcaagggctacatgatttgtgcttcatgtgcctccctgtcccagcggtccaggatttgaaagaactcgattaaggcttctgtatgcgaatcttcgaggacgtagggaaggtccgaggcgggttgagcggatgaggaaaaggagcccagcgcttcgccctggggctgtatggcggggctctgccccgcaccccggacagttttacgctgagggatgtccgcttcgcgggacttggaaccaatctggaagtctgttgcagggggaatttgaactggagggcgagccgctggctttcgaccagccgtcgatggaggtgtaggccgtctcagcgccggatcggactgtcgaaccgatttcccggattttggtcggaccgcactccgctcgcccatatgggcaggaagcgacaaaacaccctcgctgtgaatcgctccggattttgtcttcctttgcacaccttgagagtagcgtaacttattgaatataaacgctgttccttacatctgcccgatacgagttttaaacatctaaggtagaggccgtatattagaacgcattatgaggaaacagcctgcaccacgagttatttctgaggctgacattgcgctcacccgtgtaattaaagagctaaaggaactgcgagaaagggtcgaatcgcttgaacgagaggcttttccgtttggacaggtggctacctttccatcgccgaaagatgttcggcttggacgcaaaccaaggttggagactgaagagctgcttacgcgccgaatgaggctcaccacttggcttgaacagaattggccccgcctatctattgcaatgcgcaaagctgaacattccaacaatccgtcagtggcgattgtcgaattgatcgcggcaaagcgggacggaatctccggtgtgttccagccacctttctatgactctcccgagaattttattgatgctttgggggggttcctgacgagtgggcgttttcacggaaacccaaggaccctggcggctgcaatggccgggctaccagagatgagctggaaacggtcattcgacatttgctcggcacatccttacacaacgggtcacgcacttcaggcataccgggattacatgaagcggaaatttcctgaccggcttaaggagctagataaggtgcgcacagaagagggggtacgaatggttctggcgcggtcccgaacccacgacccgctcttcctccatctcaaagagaatcctggcaaggtaaaggagtggcttgaattcggaaagccttagaacccccaaaacctagtaaagctgttggcaggccaagtgatcctacgcggctgcgtttctccattagctagcttgctaacgttgactgagacagctagaaaacaagaacgccccgtctccggggcgttcaacggttacggatgaaccgataccgtacgacgaaagcttactgagaaacagccaggcaatcgccgctcacgtacactgctataattcatacctctcccgaactgtgatgtcaagaggatggtaaggaaatgagctatacaggctccccggtgcaagactatgttttaggcatcgaccttggctctgcctcgctaggatgggcggcaatctcattagaccaaaccggaacggcaaccggattactccgagcaggcgtgaggctcttcgacccagcagttacaggagatatagagaaaggccaagatgagtccaatgctgtggctcgtcgtgaagcccggctgatccgcaggcaactgcgccgccgggcggctcgccaaagtgaactcttcgagttccttcagcggcagggactccttccagcttacgagggacccaaagcagattcttcacagcaacgtcattcaatcctgaatgcgctcgacctcgaacttgcggccaagtggtcgaagcctgacagtttcgcaactaaggcggcgatagaattgccgctctacttgttgcggaagacagcgctcgatgccgcccttgaaccctttgagcttggacgcattttctatcatctgagccagcgacgcggctacaaatccaatcgcaacgaacaggcagggaaaaacgaggcagcgggcaaggggaagaaagacgaagacttgggacaggtcgagggagacatccagatgctggaagtggcgatgagctctttccgtactctgggtgagtacttttcttcgcttgatcctcacacgcaaaaagtgcgccgccgttggaccggccgcaaaatgtacgaggacgaattcgctctcatttgggaaaagcagtctgcctttcatcccgaactgcttaccaaagaagtgaatcaggaaatcaagcgcctgctcttctaccaacgcccgatcaaggctcaatcgcatttgattggcggatgcgaactggaaccaggcgaacggcgcgctgcttgggctacgctcgaagcgcaacagttccgggtgctgcaaaaggtgaacgaccttgagattattctccccggtcaggtgaccggaattgcgctaacacctgagcagaggaagacggtcctatacctgcttgaaaattctcgcgaggcaaccttcgacaaaattcgcagggctctgaaactggaaaagaacatcggtttcaacctacaacgcggcggcgagaaaaggctaaagggcaacctgacgaacacgctcatggccgaaacctttgccgagcggtggggcgaaatgtcggacgccgacaagattcaggtggtcgaggactggcggacgattcctcaggatgattcgcttattcgccgcgtcatggaccactggaagctggatgagaccggcgccaagtggctggcagataagcccgcgcccagcgggtactgtatgtactcccgcaaggcaatacgcaatctgctgcccttgatgaaaacagggatgcggttcaaagcagcggagaaggaagtctacggcaatcggctgacgggaggcgaagtacatgagcgcattccgccagttcgagataccttgaagactctgcgtaatcctgccgtggaacgtgccctgacggaattgcgcaaggtggttaacgcgttagttagtgaatacggcaagcccaccgaggttcgcattgagttggcacgcgacctaaagaagtctcgccacgagcgcgccaaagcgatcagctataaccgcgacagggaaaagcagcgcattacagccaaggaaacaatgctgcgagaagttggcccaggcttccagcacccctcgcgggctgacgtagagaaggctcttctttgggaagagtgccagggcgagtgcccctacaccggcaagcgtttccccttttcatctttgtttggcgagaatccccctttgcaggtcgagcacatcattccctttagccgtatcccggacgactccttccagaacaagactctttgctatcacgaagagaaccagtacaaggggaaccgcacaccctatgaagcgtactcagacccggcacagtatgaggcaattcttaaccgggttaggagctggaaaaaaccgaaccccggcaaacagcgccgctttgaactgcgcacaactgaggagttggaaggtttctcggaacgtcagttgaacgatacccgctatgccagcaaattggcttgcgaacttgtcgggacactctacggtggacgcgatattcaaacagaggatggttcccgccaggttgtcttcgcctcttccggcacggtcacggccactttgcgcaagggatggggcctggaggcgatcttgcgcgaagctgctccctcagccaatggccagaatcggggcaagccgcgcaccgaccaccgccaccacgcaattgacgcaatcacgattgcccttagcagaccgaagctgattgcggcgctcagccgcgacaatgcccaggactctcactggccacaaaacgggcggtcagcaccaaagcttcaaagtccttggaaggactttgtggattccatcagaccccatttcgagcagatgttggtttcccatcggcctgagcaccggcttaccggcgcactgcacgatgagaccaactacggcaggccccgtaaagagggcggcaaagacgttgttcacatacgcaaacaggtagttggcctgtctaccggagatattgaaaacatcgtcgatccggcggtgcgcgaggttgtgcgagcaaaggcaacttcgcttggaggcgacctcaagaaatggacccccaaagagggcgatgaagattggccgatgctcaaaacaaagaccgacaagtttgtccccatcaagcgggtacgcattaaaaagtcgctaggagtggagaccatcggaaaaggcaaccgcacacggaacgtggcgctatcgagcaaccaccatgtcgccatctttgcgttgttggatgagcgcggcaaagagaagcggtgggagtctgtcattatctcgctcttcgatgcgatggagagaaaggaagcgataaagcaacagcgcactagcctgcccttgatcctgaaatcctacccggaggcaggcgattacatctttaagttttccttgatgggcggcgatactgttctccttcacaaggactgcgaccacaagaatgatctatgcaatcccactgtctggcggctaagaacgattgcctctaacggccagctcgctttggtgcgtataaacgatgcacggctaaaagcggacattcagaaggctaaagaatggtgggcaccgatgcaggatgctttacgcggactcgacgccgccaaagttgtcatcgactcccttggccgcatccaaccggctggcggctagccgatgagcgaccgcattctcgaaatcgcaaatccggcccggctgagcataaaggatgcgcaactggttatcgagcgagaggattgtctgccctttatcacgccggtgagcggcgtcaacatgctgcttttggcccatccacaggtcacgcttactcaggccgtcgtctcccggctggccgaggcaggtgcaatggtcgtgaccatcgaccaccactatctgcccgttgccatgactctgccgctccaggcccacagtctgcaaacagagcgattggccgcgcaggcccaaatcaagctggtaacccgaaagcacctctggacgcaaatcgtccaagccaagattcgtgcccagggctgcttgctaaaggagctacacggttccgatggtgggctaatcgccacttccgcccgcgtccgttctggcgacccagagaaccttgaggcccaagctgcccggcgctattgggggcttgttttcggtgacccaaagttcaggcgcggcgcagacccgctggaatccggcccggaccaaaaccggcaccttgattacggctatacagtcctacgtgcatcggtggcccgcgctctatgcgctgcggggctgcatccttcgattggactgcgtcaccacaaccgctacgatccattctgtcttgccgctgacctcatggagcctttccgcccgctcattgaccggaaggtggccaaatggattgcgcacaactctccatcggctccattcgacgcgattcaaaaaaggtggttgatcgaggcagtaaccgtgcgatattgggtaaatcgggaagagcgggcgctctctgacattctgttccgcgtggccggttcactggccaacgtactgtcaggaagcgaagagaaacttgacctacccgagacgttattgccgtgccaagacgaatcaacctctccgcgtacaggtgtatgtggctgattgccatgtacgacctacccatcgaaacgatggagaatcggcgcaactacacgcgctttcgcaaggccctgctcaaggacggctttatgatgttgcaactctcggtatatgcgcggttcattccgagtgaagaggccgccgaagcgcaccgcagaacgatcaaatcctgcattccgcagttggggcaggtgcggttgttggccattaccgatcatcagttcgcaaagatggaggtgttttttggaaaaaaaccgcgaagccctgaagatattccagagcagattcttcttttttgagtgtcggagcacccggaacctatttttcgtcagtaggttccaggcgtcctagtgtacgtgagcggcaattcccggccatccccagcaacacggccatcgactgttacatcgtgatcagtgtacgtgagcggcaattcccggccatccccagcttagttcccgtccttacccaatccggcccagtgtacgtgagcggcaattcccggccatccccagcgtgaacggtcgcatgtgtacgcgacggcagggtgtacgtgtgcggcaattcccggccatccccagcggacctttcagtacaagggccgcgtcttcaagtgtacgtgagcggcaattcccggccatccccagcccgtgccatcggtagtcgtcgagcctgagtagtgtacgtgagcggcaattcccggccatccccagcaaaacccaagacgcctctatggagcgattgagtgtacgtgagcggcaattcccggccatccccagcagtttgcgagataatgactggagcgggtccagtgtacgtgagcggcaattcccggccatccccagcgataggtgaggtcctacatcaatatctccgagtgtacgtgagcggcaattcccggccatccccagcgcgattgagtgttacatcgtgattgacgcaagtgtacgtgagcggcaagtcccggccatccccagccagatatacgttacttcgtggcatatgcagagtgtacgtgtgcggcaattcccggccatccccagcgtgaaaagcgatgttgcattctccgcgcctagtgtacgtgagcggcaattcccggccatccccagcatggacggtattccctacccgaagatgtacagtgtacgtgagcggcaattcccggccatccccagcgcattgttgcgggtgtcctttcgggtgtggagtgtacgtgagcggcaattcccggccatccccagcgtcaacggtcgcatgtgtacgcggcggctgagtgtacgtgagcggcaattcccggccatccccagcaggggctaccgttggatgtgccaatagcctagtgtacgtgagcggcaattcccggccatccccagcaggattgctgcccgcggtgcaacgcgcagtagtgtacgtgagcggcaattcccggccatccccagctgtggccgggtgcggtcggtaatcatcaccagtgtacgtgagcggcaattcccggccatccccagctggtagtacggcaggccattgctgaggttgagtgtacgtgagcggcaattcccggccatccccagcggtggccccggcccgcgtttcacgcgaaccagaccaccgcacaagataaaagccccactaagaaaatacacttacggcttcgttcgaacgaacgaccttagacttgagcaaattgcaatgcgtcagaaccagccgaacaggtgaggaaagttctaaaatcgtcctctagcgccggggcaacagttcacacttacactcacgggaagcggcttcgatccgagttccgccgagattctgatcagtggaccgggatgcacgccctgcacggtggcgaacagcgcgcttaccaccaagacggcaggccagattgtcgcgggcgtcaagctgagcacagccggagcctattctgtctcggttgaaaataccgtctcaagcgcgcagtcaacagcgctttcgttgaccgtcggcgcctcgcaggtgccgtcggtgagctacatctcgccgatcacaatgacggccaacaccgcgagcagtcccgacgccacacagacgctgtatatcaacggaagcaactttacttcgagcaatgtggtgcagttctattggacgcaaggcaattacgcctacaactggaacaacagcaagggcacgcccacagttacgtccacgctgattacaattccgatgaaccccggactggtcaccgatacaatcaacattcgggtttgcgaatccgcctcacagattgccgcaagcacctgctcgtcggggacacagtcggtcgcggtaacggccaccgtgccgacggtgccaacgggcctagcgccgggaagcacaacctctcctggccctacgatcacaacgctaaccccgacgctgacctggaacgcctcgccgggcgcaacaagctatcaggtggcggtatcgcagctcggtggcggatcggtctgcggacagaacgtgacaaccaactcagtgaactgcgccccattccagagcggctccacctatctctggaccgtggcggcttctaactccgcgggctcaagcaccaccgcgcccatcgagtacttcaccgtgaacacggcgaccataccttcggtgccgacgggcctgacgccgggaagcacatcctctcccgggccgaccatcaccacgctgactccgacgctgacatggaacgcctcacccggcgcaacaagctaccaggtcgcggtatcaaagctcggcggcggatcggtctgcggacagaatgtaacaaccaactcagtgagctgtgcgccattccagagcggctccacctatctctggaccgtgtcggcttctaactccgccggctcaagctccactgcgcccattgagtacttcacggtgaatactgcaaccatacctgtcgtgccgacgggcctggcaccgggaagcacaacctctcctggccctacgatcaccacgctaaccccgacgctgacctggaacgcctcgccgggcgcaacaagctatcaagtggcggtatcgaagctcggcggcggatcggtctgcggacagaacgtaacaaccaactcagtgagctgcgcgccattccagagcggctccacctatctctggaccgtggcggcttctaactccgcgggctcaagctccactgcgcccattgagtacttcacggtgaacacggagccttcgatcagcgggctgaaccagccttcctacccggcgtcgaataccgcacagacgatgatcatcaccggcagtaacttccagagcggggatacgctgaccttcacctatccggatgggagcacgcatccagcggcgcggaacacgacatacctgcctcccaaccagcttagctaccagttcaacaacgagaacgatccaggtccctgggcggtgacagtcaacagcccggatggcacgctgcactccagcccttggcccttcaaggtgcaatgatctgaggtgtctggccgccgcagtcaaccggtatccggcaagttcacttgcggaacttgttgatcatcacggtgtgttgcatttccttgggatgcattttccgagaccattaatcggcccgttcgttgaatgttggtgaactgccttgggcgcgaactcaaacagatgcatctttgctttcaggcgaggatagcccgtgtccgggtctaagttataccgaaatggaggctccgcattcaggcagaggccagactccgttgctagaagccatctcataaatgcctgagcagcatcatgaggcaagcaagttgaacaaagccgaggaagttttcgatgtggtattcccatcgtgtgaccagtcggcggtagttctgcatccaggcaaagatccgttccaccttccagcggcggcgataacggcgcaacggtcggccatcctgagtcttccgcttgcggttgatgcgattgcgagagatcatctcgatgccgtattcactcatctgctcgtcgagcgcgtccgaatcgtatgccttgtcgccgatcagtctttccggcagttcgtcgagaaagcatcctgccagaacagcttccacaagcttgcactcggcaggcgaagcgctttcgacagcaacggcgagaggaagaccgtcacgagaggcgatagcgacgatcttggtgcccttgccgcgcttggttgggccgacggcgaagccccctttttggcgctcgcaaaactcgcatctacgaacgcttcgtccaaatggagtttgtctcgctcatgcagatatttggccagcaggcgcagtgcctcaaccaactttccctcgccaacccactgctgaaaacgccggtggcaggtctggtacggaggatacttggccggcatctcggcccactgcgcaccgctgccgagaatccagagcacgccgttcagcaccgcccgtgtatcgtgccagggacggccacgattgtcctcacgccgcgccggacgcaagatcagctccaccacttcccactgttcgtctgtcagttcccaacggcctgccatggcaatccgcagagacgccttgagcaactgcagtttcgcagaattcaagccacaaaatgtttatgagatgggttctagtgtagtgtctcaagcagatcgtcttttattgagagcggtttgagcacgagtcaccttttccaggatgtcggtggctttggcggtccagatgaagggcttggggttcttgttgtgaccgtcgatgtattctccgatggccatgatgagctgttcgaggtcttggaagacgccgcggcgcagccggttatgggtcagatcgcgaaaaaagcgctccaccatgttgagccaggatgccgaggtgggcgtgaagcacacatggaatcggttgtgcgcttccagccagcgttgcacccgttcatgcttgtgggtcgcgtagttatcgcagatcaggtagatttctttgcctgctggaacggtccgatcaatcatgcgcagaaacctcagccattcctgatgacgatgcttttgttggcataggccatagacctcgccgttggcggtgttcagcgcggcgaacagcgtggtggcgccgttgcgcttgtagtcatgcgtcatggtggcgccgcggcccttcttcatcggcaggccagattgcgtgcgatccagcgcctggatctgactcttctcatcgaccgacagcaccagtgcatgctccggcggattgagatagagcccgacgatggcttccagcttatctgtaaagttcggatcgttgctgaccttgaagctgtccgcgcgatgcggcttcaggctgctggcgcgccagatgcgggacaccgaggctttggaaatgcccatctcccgcgccatggtgcgcgtggaccactgcgtcgcagttgcgggagtgctctgtgtggtcttttcaatcaaggaagttctggaaatcgacggcgtccggccaggccgaggcgcgtccttcaaaaggccttcgatgccatgctcaataaaccgttcccgccacagtgccgccatgcgcggggcaacattcagagtcacggctatctgcttgttctggagtccatcggcggcaagcaggacaatgcggctgcgcagaaccacacgcgcctgggtggagcgtccacgcgactgctgctccagtttccgtcgcgtcgctttgttcaaaacaatggtctgcgcaacacgcatatcgagatctcctcatcataagatcagcctcgatatataactgattctaataatgagacactacactagtgtagtccgtcataaagagattcatttatgtatcgagagtcatcttatgatgagagggcctcgatatgcgtgttgcagagccgatagttttggaagaagggatccgtcgcactttggag

SEQ ID NO: 2507 - DNA, 15686 bp, synthetic construct
  source 1..15686: mol_type = other DNA
  misc_feature 1..15686: note = Synthetic
cgccaatccccgtctgcagcgtcgccccatccggaatcagctccgccacattccgcgccactcgcaggtgcatctccgtaaacggctccgtgcgcaactcctgcagtgcccggcagctttccaccaccgccgtcacatggctcacatggatctgcgtctccccatgcgtccgcggcatcttctcgttcacttccgcaatcacaatcggcgcgcaccggctcgccgtcatcgtgcagtccaccgtcgtccccagcgtcatgaatccatgcgcatccggcggcgacacctgcatcagcaccacatccagccccagttgcccgctcaggaacagcccttcaatctcgctcaggaaaatcggcgtgtaatccgcccgccccgccgccaccgcctcccgaacattcgcccccaaaaacagcccacgatgccgaaaatgccccttgaactccgcccgcgtatagtcggccgagcccagcgtcatcatgtgcaccacttccacatcatgcagttgcggcgcacgcgccaccagcgcatctaccaatacggtcggcgtcccacatccggactgtatccatatccggtcgcttgaccgcaccgcctgcaacgcatccgccgcactcatccgtttccggctgtactcgtccatccagctcatcgcacttggtcctcaccggcacacttctgcggctttggcttgcgtaaacctcatcgttacaaccagctggggcggcttaccctgggggtccggcctctggcatccctccgctttcgcggcggcataccgccttgcgcagacctccacaagaccggcgtaatcctaacgccatccccccttccaggcagtgatgacagtcacccccacccctgcccgcacgcaccctcccgtgcccaccgcccccgttcacccctataatgctcaccatgtccgcttccccctccgagacggtccgcatcgatttcaccctcgccatcaacggcgaaccactcgccatggctgccgaagtccccaccagccccaccaatctcactcagctcctccccgtcctcaactcccttgaagatgctctcctcgccgaggtcgtctcccacgtccaggccgacggccgctccatctcctgccgcgccggctgcggcgcatgctgccgccagatggtccccctcagcatctttgaggctgaagcgctctccaactggatctccaccctccccgaagatcgccagcaggccctcgccgcccgcttcgaccaatccctccgccaactcgccgccgccggcctcattgaccgcatggtccacggcgactggctcgccgacaccgacagcgcccgccagctcgctctcgactacctctaccagcgcgtcccctgccccttcctcgaagacgaatcctgctccatccaccccatccgccccctcatctgccgcgagtatctcgtcacctctgaccccgcccactgctccgacccagcccgcctgcaaaccgagcccgtcctcctccccttccacatgtcccgcgccctcagccgcatcggcgcactcgttgaaggcaacccccgaggctggattcccctcctcttcctctttgcctggcgcaaatccggcgcacgccccggcgaagccgtctccgacatcgggcccaaagtcctctacctcttcgtccagcaactcgtccgcggcaacagcttccccgaccccgcctagcccctgccgcccgcccgatcccaccctttttgatacccttgcaccatcatgcaaggcgacaaatccccatccgcaacccgcttctccctcaccccaaatcgcctcgccctgctcgtcctcatcctcctcgtcctcgccaacgccctcgccgccggcctccgcaccgtagccgacactgatatgggctggcacatcgccaccggccgctggatcctccagcaccactccatcccgtccaccgacgttctctcctacaccgcccacggccgcccctggctctacccacccttcgccggcatcctcttcgccctcatcgattcgctcttcggccccgccggcctcagttggttctccgccctcgcctgcctcgccgccatcgccgtcctccttcgccgccccaccctccccgccatcgccttcgccctctgcgccatcgaacccatcgccttccgcaccgccccccgcgcagacgccttcaacgccatcctcctcgccctcgtcttctcgctcctctgggacttccagcgcggcctctcccgccgcctctggccacttcccctcttcatcctcctctgggtcaacctccatcccggcttcatcgtcggcctcgcctgcatcgccgcctacctccttcttgaagccgccgatctcctgaccccccgccgcgacgccgcccttcagcgcctccgccgcgcctggccctggctcctcgcctccctcgccgtcaccttcctcaaccccgccggcccccgcatctactccgtcgcctacaccctctccggcctcgccccccagcagcagggcgcattcaacacctccgccctcatcggcgaattcctctctgtccccctcaacccccacctcatcgcccagctcttccaattccgccacgctgaaaacggcttcacctggctcctcctcctcgccctcgtcaccatagccgtcgccgtctggcgtcgtgacttcgcccccgccatcctccagtgcgtcgccctctacctagccgtccagcacgcccgctacatcggcctcttctgcgtgctcaccgccatcctcggcgctaccctcgtccagcaggccatcgctgcgcttcccgcccccaagcccgcccgcgcccaaaccatctccaccgcccgctgggccttcctcgccgcgctcgccgcgctcgccatcctccacaccgcagacttcgtctccaaccgcacccacgtagtcttcgccacagactcctccttcggccccggccagtccccctggttcccccagcgcgccgcagacttcatccgcgcccagcaccttcccggccccatctaccaggagtacggcctcggcggcttcaccgcatggcgtctcggcccacagtccccctctgaccccggctaccccgacttcatcgacggccgctttgaccacctcgcccccgacgtcctcgcctccgagcgcagcctcctcaacaccccacccgattcccccgccttcacctccgccgctgacacctggggcatcaacctactcctcatctccgaagccgcccctcgcgccgcccagcgccagagcgccgccgccttctgccgctccaccctctggcgtcccgtctacatggacgaggcctccctcgtcctcctccgcaacacccccgccaatcagcccctcatcacccgcctccaggtcaattgcttcacccagcccctcacgccccccgcaaacgcctccaccaaggcccgttacgacttcgacctcagcgccggtggcctcttcttcgccctcggccgcgactccgaagccgaaaccctcctcctcaacgcccagtccctcttccccgccgaccccaacgccactaccgccctcgcggacatctacatgcgccaccagctctgggaccgcgcccaaacccaatacctcgccgcactcgaccgccaggactccgacggcctctggtacgccctcggcaacctctacctccgccgccagcagctcccccaagccgaggacgccttcctccatgcagcctccctcgccgtctccccgatggacgccgacctcgcgctcgcccaggtcgaaatcctcctccagcacccccaggccgcactcgacgccctcgacggcgcagagaagcacagcccttaccgcgacggagccgaatccctcgcccccctcctctacgcccgcatcgccgagggccgcgccatcgcagcacgccagctcggccagctccaactcgcactcacttatgagagccgcgccatccagctcgacccctccaacgcccccctctggcaggaatacgccaccctcctcgacgccgccggacaacccgacaccgcccagcaagcccgcctccgcgccgccaccctcgcaaacccgcagccctcctcagtccctgcgcaatagtcccgccggaaccccgaacaaccttctatctcacccctgcttcaatggatttcgtaagcgtagatctcctgccgatccacgcgattgtgcagtaccagcgaatcatccggcgttagcgagaactgaaggtcgtcatcctggctggaatcaacccgtcccgacatctccggacggtacaccgtctcagccgccccatccggcacccgaatccgaacaatccgtgcatccgggccatggatattcgcatacaagctccgcgagtccgaagcccagctcaaatcgtcccctgtcatgccatctgccagcttttgccacttccacgccttcacgtcaaaaagcatcagttggtgctcgttcaaatggattgccgcaatccagcgaccatccggcgaccaccgcgccgtgaagaggccttctgaccccggcagcgtctccactctccccgtcgccacctcaattcggtgaatcgcacacgtcccagacctctcgcacaccactccaccataggcaatgtacttcccatcgggagaccaactgggcccgccctggccatcgtctccggcagatgcctcccgcgcagcgcctcctgccaaatcctggatatagatccgccacggatgccccggactcgacttcataaaagccagatgtttcccatccggagaccaccgcgccagttcaaccacctccggcggaaacgtcaactgccgggccgatttcccatccactttgctcatccataggctcaaatcagaaagcgtggagtaagaaacccactcccgattcggcgagtaatccaaaaacgcccccgtgattccaggaagaatcggcgtcgcctccttcgtacgcgaatcaatctccttgaatccaccaggaaccgacgagttcctcaccacatatatctgtcgcgtagcccggtcaagcgcaagcccattcatcagaatctgctgtcttgaaacaggtgcaatcgtctcgctcggcccccaccagcgacgcgaaaaacgcatctcccaaagcgcgctcctgttcgaatcaatcggcgtccccgcaaaaatcagcgaatcctccccttccccgggagcccacgccgtcgttgccgccacctgcgttgcaagcggatgaatcgtcgcagtggtcaaccccgcacccgacaactcgccccaccccacaaacgtgttcgtgttgtccatcagcagaaaccgcagcgctgacccatccgcagaccactgcaaccgcatcgcgttgtgcgcaaactttccgatcaggcgcggcgttgcctgcccatccccaatcagatacaccccatcgcccgaggcaaatgcaatcaactccccatccggagcccacgccgcagcatgagccgtaatcgtcgaaagccgatgcggtggcccctccggcaagggataaatccacagctcccgctcctcttcatccccggccgcaaccgtcaccaccaacttgcttccatccggcgatatcgcaatcggctccgcattcgccgcgggactccacagaatccgctcttcaccgccactcgctggcatggctgccaatccgtaccggccgttctccttttccccaaagtagagaactcccccgccgagcacaagctgccgcttctctttgccgttgttgctcaattctgcccgttccaccagcacccagctcttctctgcccccccatatcggtagcgcgcataccctcctacccccagcagcgccgccaaaactacgaaagcccccagaaccagcgggataaatctgccctgaccgctttccaatcgacggtcggcaagctgctcctccctgtcacccgcctcactcggcaaccgcgcaaccgcgacgcttcctgaagccccatcccccaacgccccatcatcctcgctcaggtctactcccgcaagccacccgtctaactctttccggtacgcgaaaacccctcgccgcaacccgcctggaacccgatgtaccggcagcccacgctccttctcccagcgaacgaccgtgcgctcattccgccccagatgggcagcaatctctttccaggaatcaagcctctcattccctaccgcttccacgggcatctttgtcctgcctccgctccactctgcctgcatcgcccagccgccaacaacccgccctgtcagttaaaacccgctaatgtctgcttgcacctgttgagaatcctagccccttcagcttcactgaacaagtatcgaatgcttttcaaatactgcccaaacgcaagcccgtcaggagcttacgcgcccctccgcattggccctgacaaattcggttccaacctccaggaggtcctaatgtccgtagctcgggtccgatttactgtattcatcgccatcctctccctctcttcctgtctcgccttgtcgcagaacactcgccccaaggtcggcatcaaaaccttcgccaacccaagcaactattcccgttccaccatcggcaatggcctcacagacatcctctccaccgaactcagcaacaccggaaagttcaacatcatcgatcgtcaacacgtcgacgaactcaccaaagaaattgatttcggcgccagcggctacgggaaaaagagctccttcgcgcaaaagggcaacctcctcggcgcggaatacctcctcatgggcgaggtcacaaacttcagctacactgagcaacgcggcgctcccaggaataaggtcaatctcctcggcccaaacaccatcgttatcgattacataaagaatgccgacgtcagggtggactttcacctcattgacgtttccaccggcgagcacgtcgtggatgaggctggaataggacacgcctccgcgaagagcgaaacctctgagttttatctgtggcagcagatcatctccgggtccggctcctttgagtcctcctccagcctcattggcaaagcaaccaccgatgccgttaaggatgtcgtccgaaaactcagctcactctccgataccgttcgccaacgcgcctccgaggccgccctcaatgccggcatggacagcctcggcgaagcaaagggagaggtggctgctgaagaaggaggcggcctctggattctcggcggtatcggcagcgccaacggcctccgcgtcggcgaccatctccgcctcgtccatgaaaatgtcgtaaaagacaaatccggcaacatcgtctaccgcaagcccatggaaattggttccatggaagtcaccgatgtcagccagcccgaccacgccgaagcccgcttcctgccggccgccggtgcggcgccagtcagccccaaagccagcgacatcgtcaccgttgacattgagtacgcaaagaaactgcgcggcgctcccagcaccaccactgcctcgcagcccgcagccggtgcctccaactccgccccagactccaactcggcacaactccagcagtccctcaagcgtgccgacggctacatgcgcgaccatttctggccccaggcactcgacgaattccagaaagccgccgcctcaaaccccaacgatcttcatgtccttgagggacaagcggtttcccactacgcgctcggagacttcctcgaagctgacgccatcgcggaaaagctcctcgcagccggcggtacgctccgcttccccatcgcccacttccactccatgggactctgcaccggcgaaatgaccatccagcacggaaaactcgcatacaccggcggaaagggcgacgacttcgacatcccatcccagagcctctccgcaatcgaagtccgcaaaatcgcaaaaggcatgatggccaacgaaaagctccccgactggcccatgcttcacctccgcttccgtgactccggcggccacgaaaaggactaccagatgatgccttatatgtactccacagccgatctcctctccgggaaaaacctcgcaagcgcattcccgatgggcgatagcgatgtcagccagatgcagaaattcgaagagtccatcgtcgccctcgtcggcaaatatgtgaagtagcaatcgaatcggcggtgagcctgtgactgcatcctcgctcaccgccacgggtcgcctgcttcaggcggaaaatgcccctcgcagatccctccccaccggtgccccgcgaacaacaccctgcccggagcaccactcccgccccaattggtttatcgtggagtcagcacaaccgcagcccccctctgcgcgctgacatcgcaataccgggccccgcataccacgattggaaccggcatccccccccccggacagggcaccggaacgccccacctccaccagcgccaaggactccatccggaatgagcaacaatttcctcaaaaatcagctctactccgccggcgctcccctcaacatgcgccagcgcctctacctggtgctcaccgccagtgccgccgccctctcgctcggcatctacagtcccgccgatttcttcatctggcacaacaccctctacggcctcatcaccgtcgtcctcggctctctctacctcctgctcttcctcctcgctcggcagcgaaatctattcctgtacgccatctcatgcctcgccctcgttcccctggatatcctctggcccttcgtcgaaggcggaaccgcgggcaccgccgaactcctcttttttgtccccacccttgcctgcgccgtcttcctccgcagcaacatccgatggttcggcatcgccctgtacatcctcctcggcgaagccgcctacgccctccagaacttccgtcccgacctcatccgccccttcccttccgacaccgtcggcatcctccaccactccaccgcattcctcttcagccaaatcgccggcgcactcgccttctgggccatcgtctccgcctacgaacgcgagcaccgccgcgtcaacgaagcaaaccaggccctcaccagggccatggacgaaatcaaaatcctccgcggcctcatacacatgtgcgcctggtgccgccgcaccctcgatgacgacggctcctggatctccgtcgaagactacatcagtcgccactcctccgccggattcacacacggcatctgccccgccctccgcgaacagcagctctccgaagactccatcgaaggcgcctgagccaccccaacccgcagctctcccccaatccccaggcacacccatccagccccgcccagggaattcacgcaaaccaccaaaactgtctcgggaaatgctatggtgggcccggagggattcgaacccccaaccaagggattatgagttttcccctcggacggcttaaggagaaccctaacccactgaaaacaatagtgaagcaatacaagacgcccgcacggaaggaaaatgcgccaccgttgaatttgttggatttagctgaaccgaattgaacctgtacgtcacaatcttcgtcacaaactttgacccctctagagcaagtgattttgcgaccattggtgcgaacaatcataagggaggcgaaggctctcacaaaagaattggcttaattggtcagtcggacacgacagtggcgcaataaaattgccccgctcataaagtcttcgcctgatgaaaaagctcaacctcaggctcactcgattggaaccttttccagggtggccaggtctgccttcccaaaaataacctcgaaccgaatgactcagcatctttccctgcttgctgatccactcgcaactggcggcaactcaagtctccaacggaacaacgagaaaaaaccgctatctaagaactgctgagagtggttgcaaaatgaaatacaaaggtatctaccaataagaacgccccgtttccggggcgttcaacggttacggataaccgataccgtacgacgaaagcttactgagaaacagccaggcaatcgccgctcaagtacactgctatactttgtatcgttccgcgactccaaatgtcaagagcgttcaaatggcaaacacttctagcgaaactagcaattatgtattgggtatcgatttgggatcagcatcacttggatgggcgctgattggtctggatcatcatggcagtcccgccaaaatcctcaaacttggggttcgaatcttcgaggctgccgtctccggcgatttcgaaaagggccaggacgagtcaaacgcggtggcgcgtcgtggggccagacttatacgccgccagttgcgtcgccgtgcagcaaggcaggcggaactttttcgattgctccagaagaattccctcctcccagcgaacactggggtagaagctgatgcttcaaccgtcagacactcgattctcaatgaactcgatcaccaaatctcgatcaagtggatacacgacaaggatacgaagagtttcgtcgaattgcctctgtacaagctacgaaaggctggtctgtatcaacagctagaggcattcgaacttgggcgggtcttctaccacctgagccaaaggcgtggattccgctcaaaccggaccgccgatggggaaggaaagaagggcgaggatcagggggcagtcaagactggaatctcagagttggcagaagcaattcgcgctgcgggcgctcagacaattggcgagtatttcgcaagtctcgatcctcacactcaaaaggtaaggcgcatctggacgggccgttccatgtatgaagaagagtttgggaagatctgggctatccagtcgagctttcacccaacgcttttgaccgaagagctatatcgtgaaatcaagcgcttgcttttctaccagcgcccaatcaaggcacagacgagcctcattggggaatgcgagttggagccaggtgagcggagagcatcctgggccacactggaggcgcagaggttccgacttctgcaaaaggtcaacgaccttgagattgtttacccggggaacgtgaacggagtcgctctttctcaagcacaaaagcagcaggtttataagctgctcgattcgcaaggcgaccagactttcaaatcaatccgagaacacctggggctcgacaagaacatcgggttcaatctccagcggggcggggagaagacgattaagggtaacaacgttcagaagcggatgattgaagcctttggcgcaagatggcaagttctgacggaggaagacaagcggctcgttgttgaagaatggcgcacaatcgacagccccgaatccttacaacgtcgcttgatttcaaaatggaagctaacgcctgaggcggcacagcgccttgccttgtctactccgcctagcggctactgtatgctctcacgcaaagcgattcgccgaatccttccgatcatgcttgacgggaagcggtttatggctgcccgtcaggagatccccgagtacatccccaagcaggaaactccgctgaatcgcattccaccagtgcgggacgcgttgcgaaaccttcgtaacccagccgtagaacgtgctctgacggaagtgcggaaggtcgtaaacgccctggtcggtgaatacggcaagccctcagaagtacgaatcgaactcgcgcgcgacctgaaaaagccccgccaagaacgcatcaaggcgacggactcgaaccggaagcggcagcgggagcgcgatgcagtaaagcaacgcattctccgtgagtgcggtctggaccgtccttcccgagacgacgttgaaaaggccttgctttgggaagaatgcggaggtatttgcccttacactggccgcagcatttcgtttgcgtccatgtatggcgagcatcctcagtttgatgtggagcacatcattccattcagccgcctgccagacaattctttccagaacaagaccctctgctaccacgaagaaaaccgcaacgtgaagaggaataggacgccctttgaagcctatcctgatgccgaggactacgacgcggttttaactcgtgtcagagcttggaaggttccgaacatcggcaagcagaagcgtttcgaactccgtaccctggaggaattggaaggtttctcgacccggcaattgaatgacacgcgctattcgagtctcctggcttgtgacctgatagcgaagctctatggcggacgtgttgttgacactggaagtggaacccggcaggttgtttttgcctcttcgggaatggttaccgcaaccctccgcaagggactggggcttgaagcactgttgcgggaagcggtaggctcatccaacggagaaaaccggggcaagccccgcacagatcaccggcaccatgccatcgacgctctaaccatagcgctcacgcagcagagcatgattcaaaccatgagccgcacggcttcccttgagccgaactgggcaagttcctcgcgctccctgcggtcaatcccgtccccctgggtcaacttcatcgattctgtgcgcccacacgttcaggagttgttggtatcccatcggccagaacatcggctgacaggggcgctacacgatgaaacaaactacggcaagccgcacaacgtaaatggcaagaacctggttcatatccgaaagcctgtcagcggactttcaaaaggcgatatcgacaacatcgtggacccggcgattcgggaagcggtgcggagaaaggctgctgagtttgcaggagaccttaagcgctgcaatccgaaggaaggcattgaggattggccgcagctgctcacaaagactggaaagacggttcccatcaagcgcgtgcgaatcagcaaatcgcttgaggttgagaccattgcaaagggtaacaggacacgctacgttgcaacctccagcaatcatcacgtcgccattttcgcgcagcttgatgaccagggacgcgagaaacgctgggagcctatgattgtttccctctacgaagcgatggaccgcaagcgcaagggcctaccggttgttcggaaatcgcatcccgaggcacaggattacatcttcaaattctctctgatgggcggcgatactgtgctgttgcacaaggattgcgaccacgacaaggatatttgcaccgcttctgtctggaggcttagaacaatcgcatcaaacggccagctttctctggtgagaatcaacgatgccaggctcaaggttgatattcaaaaagcaaaggaatggtggtcgcctgcaacggactcacttaggaaacttggcggcgcaaaggtcgtaattgattcgttaggacggttgcacggagcgaacgattgagcgatgagctatcaggtactggagatcgcaaatcccgcacgcctcagcgtgcgggattcccaactggtcattgagcgcgacggctttcttcccttcgtcacgccagcctgcgatatccatacccttttgcttgcaaatcctcaaataacactcacccagggcgtaatagcctcactgactgaggcgggggctgccgtggtcatgatcgggccaaccttcctgcctcttgccatgatgcttcccctgcaaaatcacacattgcaaacggagcgtctggcaaggcaggtcgcgctttcagttgtcgcccggaagcgcctttggacgcaaatcgtgcgggcaaaaattaccgctcaggggagtcttctgaaagaattctcaggaacagatgcggggctgctcccgatggcgcagcgcatccgttccggcgatccagacaattttgaagcgcaggctgctcggatttactggaggcggatcttcgcagatgcaaaattccgccggggcgctgatgcatccgagtccgggctggatcagaaccgacatctggattacggatatacagtccttcgggcggcagtggcgcgctcgatttgtgcggcagggttgcatccctccctggggttgcgacaccacaaccgctatgacccgttctgtctggcatcggatttgatggagccttttcgcccgctcatcgacaggcgagtttcattgtggttaaaggagcacgatcctggttctccgttggactccgctgcaaagcgatggctcatccagggcgtaaccatgcgctattggctgcttcgggaagagcgaaccctcagcgatattttgaccgcagttgccgtttctctcgcaggcgttatggcaggcgaaaggaagaccctttttctgccggaagggctgcaaccatgccaagaagatttaacctctcggcgtaccgatgtatgtggctgattgcaatgttcgacctgccggtagaaacgccggtgaatcggcgggactacacgcgattcagggctgcattgttgaaagatggcttcatgatgttgcagttttcggtgtatgctcgcttcattcccagcgaggaagcagcagacgttcaccgaagaacaatccgctctgtgatcccaccattggggcaggtacgactgttggcagttacggaccgccagtttggaaagatggaagtcttctatgggaaaaagccccgagaacccgagaaagagccggaacaaatccttcttttttgaaggaattggccgcccgaactcccatgttttgagagagtttcgagcggcctagtgtacttgagcggtgattcctggccatccccagccgggagcgccttgatcgtctcagggcaggtagtgtacttgagcggtgattcctggccatccccagcgaggcaaagcagtgagcgcagtgaattggagtgtacttgagcggtgattcctggccatccccagctagacggtgccacggagcaacccccgtgagagtgtacttgagcggtgattcctggccatccccagcctggttcttgaagggaacgaccgctacgacagtgtacttgagcggtgattcctggccatccccagctgaggcccggtagcttcgttggccgcaatgagtgtacttgagcggtgattcctggccatccccagctcagtagcgggaagggaccaatcaaggaggagtgtacttgagcggtgattcctggccatccccagccataatcgatccgctggagctgatgatcctagtgtacttgagcggtgattcctggccatccccagctacgacgaaaatgaccagcctattacgctcagtgtacttgagcggtgattcctggccatccccagcccagcaaggaaaggaaagccgagccaatgagtgtacttgagcggtgattcctggccatccccagcttggctccctcatggaagccactccgtcacagtgtacttgagcggtgattcctggccatccccagccgtatcgagtgcaactcacaacccggctgcagtgtacttgagcggtgattcctggccatccccagcaacctggtggtggttccgctgctgcatgggagtgtacttgagcggtgattcctggccatccccagccgtgtccccggtctctccaagcttgacgcaagtgtacttgagcggtgattcctggccatccccagcaaacttcgcccgcgctcgacccgccaggggagtgtacttgagcggtgattcctggccatccccagcgcagggccagtgggtccggttgcgcccgtcagtgtacttgagcggtgattcctggccatccccagccgcatctgtatcacgaccttccaagcatccagtgtacttgagcggtgattcctggccatccccagcaacctacgccgctgtaagcaagaattttctagtgtacttgagcggtgattcctggccatccccagctcgacagcaattgc

SEQ ID NO: 2508 - DNA, 13758 bp, synthetic construct
  variation 9244..9245: note = n is a, c, g, or t
  misc_feature 1..13758: note = Synthetic
  source 1..13758: mol_type = other DNA
acttctcaaaactcggctgacaggcaaatgttatctggcgcatcgcaatcttcactcaactacaagcttacgcaaactggctgtggagatcggacttattcagagcatccctgaaagccgcgattgaatcgatttataggaagggggtccatccgagtggcgcaatcccttatcgcatcttcgccgagtatcaacgacgctttgaatgtcaaagccaagccgatgtattgctcgccccgaggaaccacctctagtctggctcgacccttcacgcaaaatcgctaactgtttcttttctttcaagcgtggatcgacttcgctcgtcagttctggcaatgctcttgattagcacaacaaataagaacgccccgtctccggggcgttcaacggttacgggtgaaccgataccgtacgacgaaagcttactgagaaaaagccaggcaatcgccgctcacgtacactgctataattcttacctcgtcaaagtattgaagtcaataggatggaacgagatgggtgaaactaacactcaaactggaagctatattcttggcattgaccttggttccgcctcgctaggatgggcagcaatttccctggatggagctggcatggcaactgggttgctacgttccggtgttcgactcttcaatcccgcagttaccggagatatagagaagggacaggatgagtccaatgcggtcgcccgccgcacagcccgtctcatccgcaggcaactgcgccgccgtgcagcccgtcagagcgaactcttccagctgctacagcgctacactctccttcccccgtataagggagccgaagcggatgcatcccaacagcgccattcaattctcaatgcgttagatcaagagcttacggccaaatgggtcaagccaggcaatgccggggcgcaggcggcaattgagttgcccctctatttgctacgcaagaccgcgctcgatgcggccttggaaccctttgaacttgggcgcgtcttttatcacctaagccagcgtcgcggctatcggtcgaatcggaaagatcaagcaagcgacaaagggacaccgggaaaagcaaagaaggccgacgacctaggcgcagttcaggggggcataaaggagctggaagacgcgatccgctcgtctggaacgcgcacgctcggcgaatacttcacatcactcgacccgcactcgcagaaagtgcgtggacgctggactgctcgcaggatgtacgaggaagagttcgccgccatttgggcaaagcaagtgaccttccatcctgccctgctgaccgaagaattgcattataagatcaagcatttgctcttctatcagcgcccgatcaaagcgcaatcgcacctcataggggactgtgaactcgaaccgggtgaacggcgagcagcatgggccaccttagaagcacagcaattccgcgtactgcagaaggtcaacgacctggagatcattttgccaggaaatgtcactgggattcccctaactcccgagcaacggcagacggtcttgaacctattggaatcttcctctgaagctacattcaaaaagatccgtaaagcactcggcttaggagagaacatcggcttcaacttgcagcgcggaggagagaccaaactcaaaggcaacctgaccaactcacacatggccgatgtgtttgcagagcgctggctcgaaatgtcagaggaagataagaagcaagtagtcgaggattggcgaaccatcgagcgggaagaatcgctcattcgccgcgccacggagcactggaagcttgacgagacaggcgccaagtggctcgcctctcgacccgcgcccagcggctattgttcaatttcccgcaaggccatccgcaagctactgccattgatgatggaaggcaagcgattcaaagaagcggagaatgaaatctggggtagtcgcttctcggggggccaggtctacgaccgtattccgccagtacgccaagccctgaaatccctacgcaatcccgccgtcgagcgcgctctcacggagttgcgcaaggtagtcaatgcgctgatccgggaactcggcaagccgacggaggttcgcattgaactggcacgcgacctaaagaagccccgccatgagcgggccaaagccgttagccagaaccgagaccgcgaaaagcagcggagtgcggccaaagtcaaaatgctccaggaaatcggtccaggatttgagcatccctcgcgcgccgacgtggagaaggcattgctatgggaagaatgccagggtgagtgtccatacaccggtaagcggttcccgctttcctcattgttcggcgagaatcctcctttacaggttgagcacatcattcccttcagccgtatcccggacgattccttccaaaacaagactctctgttatcacgaggagaaccagatcaagggcaaccggacgcccttcgaggcatacaaggatgccgaacaattcgaaacgattctgaatcgtgtgcggaattggcgaacgcccaaccccggcaaacagcgccgctttgaactgcgcacgctagaggagctagagggcttttcgagccgccagctgaacgacacgcgctacgccagcaagctggcttgcgaattggtgggtactctctttggaggccgcgatatcccgacggagagcggctcccggcaagtggtttttgcctcctccggcatggtaacggccacgctacgcaaaggctggggactggaagcgatcctgcgcgaggccgcaccctctgccaacggacagaataggggcaagccacgtaccgaccaccgccatcacgccatcgacgctattactatcgccctcagcgctccgaggatgatcgcggcacttagccgcaacaacgcccaggacccttactggccccgaaacgggcgcaccgcgcctaaacttcagagtccatggaatggcttcgtggattccattcgcccacacttcgagcagatgttagtctcccatcggcctgaacaccgtctcaccggcgcgctacacgatgagactaactacggcagaccgcataaagaaggcggcaaggatgtggtccatatccgcaaacaagttgtgggtatgtctgccggggatatagagaacatcgttgatccggcggtgcgcgagagcgttcgggagaaggcggcgtcgtttggcggagacctgaaaaaatggaccccaaaggagggcagtgaagactggcccttgctcaggacaaaaacaggtaaggaaatcccaattaaacgagtacgcattaagaagtcactgggcgtggagactatcgccaaaggtgatcgtgcgcggcatgtggcactttcaagcaatcaccatgtcgcaatctttgcgctgctagacgaacggggtggggagaggcgttgggagcctatgatcgtttcgctttttgaggcgatggagcgaaaacggaaggggcagccgctgattcagactcgatatccggtagttggtgaatttattttcaagttctcgcttatgggtggcgatacagtgctgttgcataaggactgcgaccacaagaataaccactgcaatccgtcagtttggcggctgagaacgattggctcaaacggccaactttctttggtgcgaatcaacgatgcacggcttaaagcagaaattcagaaggcgaaagagtggtggtcgccaactcaagacgctcttcgcaaactcgatgccgttaaggtggtcatcgattctcttggccgcatccatcagtccggaggttagcccgtgagcgaccgcattcttgagattgcacatccggcacggttgagcgtccgggatgcacaactggtcgtcgaacggcaggagtttctgcccttcgcaactccggtaaacgggatcaatacactacttctggcgcatccacaagtcacgctcacacaggccgtggtttcccggttggctgaggcgggcgcgatgctggtaacaattgaccacacttatctgcctgtagcaatgactttgcccttgcaggcgcacaacctacaaacggaacgcttagccgcgcaggtaggccttaagccggttactcgaaagcgactatggacgcagatcgtccaggccaagattcgcgcccaaggcagcttgctaaaggagctatacggctctgatggtggcttgacagccaccgcgaatcgcgttcgctccggcgatccagacaacctcgaagcccagaccgcccgccgctattggggactgatctttggcgaaccagaggaccgcataccaaagttccggcgtggtgcagaccctctcgaatccggcccagaccagaaccggcatctcgactacggctacacagttctacgcgcttcggtggcccgggccgtttgcgctgccgggttacatccctccatcggactgcgccaccacaaccggtacgacccgttctgtctggccgccgatttgatggaacccttccgcccactgattgatcggcgcgtggcttcttggattgcccataattctccatcggcacccctcgatgcaatcgcaaaaaaatggctgattgagagcgtaaccatgcgatattgggtgaaccgggaagagagagtcctctctgacattttgttccggttggctggttcgctggccgccgtgttaaccggaaagctggagaagcttgacctacccgaaacacttgaaccgtgcctcgacgaatcaatctctccgcctacagatgtatgtggctgatcgccatgttcgatctgcccgtggagaccacggaaaaccggcgcgactacacgcgctttcgcaaggctctactcaaggacggtttcatgatgcttcagttctcggtctatgcccgatacatccccagcgaggaggcagccgaggcgcaccgcaaaacggtcaaatcctgcatcccaccgctgggacaggttcgactgttggcgattaccgatcaccagttcgccaaaatggaggtgttttttgggaaaaagccgcgaagcccagaggacattccagagcagattcttcttttctaagggttggagcgcccggaacctatttcttgtcagtaagtcccaggcgtcctagtgtacgtgagcggtgattcctggccatccccagccggaggcacgggtctagtgatgtcgggactcagtgtacgtgagcggtgattcctggccatccccagcgaggagaagcaatgaatctcgaacaaacacagtgtacgtgagcggtgattcctggccatccccagcaagaagaaagttggagtaattcaaaaagctagtgtacgtgagcggtgattcctggccatccccagccccgcccgtcaacggcgtacgctgcatacagtgtacgtgagcggtgattcctggccatccccagcggtaagcgacgcggctatagaagccgccttagtgtacgtgagcggtgattcctggccatccccagcgaactatgacaactccatcggcgtgttcttagtgtacgtgagcggtgattcctggccatccccagccaaaagccgaaatgcgcaggcgtccgggcgagtgtacgtgagcggtgattcctggccatccccagcagaccgtaggcctcgtcttcgaagggcacaagtgtacgtgagcggtgattcctggccatccccagctgggcgtcggagggtcagctcctccccgagcagtgtacgtgagcggtgattcctggccatccccagcgaatgcgatcgacggcaagagcgccctgcaagtgtacgtgagcggtgattcctggccatccccagcacgtgcacgatcgtgaccggcatcgatttgagtgtacgtgagcggtgattcctggccatccccagcacaaagggattgcggcaagcaatagaatgagtgtacgtgagcggtgattcctggccatccccagcagaagaccttttgcccggcggggattggaaagtgtacgtgagcggtgattcctggccatccccagcgcgatatcgcatggacccgcgcggtgatcaagtgtacgtgagcggtgattcctggccatccccagcgaaatatgcatgccttgctcctgtgcctgagtgtacgtgagcggtgattcctggccatccccagccgaggtaatgctttgaccgccgagcttcggagtgtacgtgagcggtgattcctggccatccccagccaacttgcgcggcggctggatcttggggcgagtgtacgtgagcggtgattcctggccatccccagccaagacgaagtagtcgtaagcatcccgcagagtgtacgtgagcggtgattcctggccatccccagcgaacaattaagagaaagcgcaaagaccgtgagtgtacgtgagcggtgattcctggccatccccagcgaagagattgactcacatacgcggtttgcgagtgtacgtgagcggtgattcctggccatccccagcatctgatggtcaaagacttcaatcatgagcagtgtacgtgagcggtgattcctggccatccccagccagttcgaggtgctttgctttgaatcctcgagtgtacgtgagcggtgattcctggccatccccagcactgccaatcaccgttggatgggtaaggacagtgtacgtgagcggtgattcctggccatccccagcacaaccggcagtgggctcacattgaatgtgagtgtacgtgagcggtgattcctggccatccccagcaattggtgcaagtcaccatatgatgtgcctagtgtacgtgagcggtgattcctggccatccccagcgggatacggtgaccaacagccatcgcacctagtgtacgtgagcggtgattcctggccatccccagcgtgtcgtgggaagagtgtgaagcagaccaagtgtacgtgagcggtgattcctggccatccccagcttcaattttgatgcgcctcgccaatgcggcagtgtacgtgagcggtgattcctggccatccccagcgagattgcggcagatatttgcttaaggcttagtgtacgtgagcggtgattcctggccatccccagcgcgcaacagaacctcttcacggaggataaagtgtacgtgagcggtgattcctggccatccccagcggcctgctacgcgaaccggtagactgatccagtgtacgtgagcggtgattcctggccatccccagcctactgtcgatggtgcccacggtcacgttgagtgtacgtgagcggtgattcctggccatccccagcggtccggaccgactgaggttgcgcacctgtagtgtacgtgagcggtgattcctggccatccccagcaaaatccccgctggtgagagtggcaagcggagtgtacgtgagcggtgattcctggccatccccagcgtccgtccagatgcaagccgccccatcggaagtgtacgtgagcggtgattcctggccatccccagctgttctcgtcgcgatggttggccgggtcgagtgtacgtgagcggtgattcctggccatccccagcagacgacgacatgcagctgcgctgcagccaagtgtacgtgagcggtgattcctggccatccccagcccgtcacaggcgcgctcaactgcgataaggagtgtacgtgagcggtgattcctggccatccccagcacgcgacttgatgcggttgcgacgcgagaaagtgtacgtgagcggtgattcctggccatccccagccggtgattcaatcaggcggcggcggtttcaagtgtacgtgagcggtgattcctggccatccccagcatcttgcgtccgattccacgtcatagaccaagtgtacgtgagcggtgattcctggccatccccagccgacttcctgcgcggcagcgggatcttgggagtgtacgtgagcggtgattcctggccatccccagcctgttgatgtctgtctctgtcattaccgaagtgtacgtgagcgtgattcctggccatccccagcgttcttagggtccgggacaaccggaaagatagtgtacgtgagcggtgattcctggccatccccagcccatgcgcaagtggggcgtacctgcctcggagtgtacgtgagcggtgattcctggccatccccagcaaaaacagcgccgcagcccgcgcctccgccagtgtacgtgagcggtgattcctggccatccccagcacccgggtgaatggaatgcgctaatcgccgagtgtacgtgagcggtgattcctggccatccccagcatgatctgcgcgacttccttgatgctatacagtgtacgtgagcggtgattcctggccatccccagctgccagtatgatggtggaattgcgcccgtaagtgtacgtgagcggtgattcctggccatccccagcgtctgtgctacaggtccgaatttgtttgcaagtgtacgtgagcggtgattcctggccatccccagccgtgcgacaaaagcggacatacgaatatgaagtgtacgtgagcggtgattcctggccatccccagcaaacctgggtggcgcctccgtcaccgtcacagtgtacgtgagcggtgattcctggccatccccagcatgtcggttcatcgggcaccacaagccccgagtgtacgtgagcggtgattcctggccatccccagcataaatgtgagcgtcccgctgcatcagtagagtgtacgtgagcggtgattcctggccatccccagcgtggacttcgaggcatcgctcgtctaggtagtgtacgtgagcggtgattcctggccatccccagcactcgccgccaaagagaaacgccgtcttgcagtgtacgtgagcggtgattcctggccatccccagcgatggtgaccgagcctggctgcgcatgaaaagtgtacgtgagcggtgattcctggccatccccagcaccgtcgagcaagtgtattccgcgctcgaagtgtacgtgagcggtgattcctggccatccccagctaagattgctacgaccgcgatgatttcccagtgtacgtgagcggtgattcctggccatccccagcgtactcgtgcgtggggtcttcaaattccaaagtgtacgtgagcggtgattcctggccatccccagcgcaaatcttgcgttgtgttgttatcgcccaagtgtacgtgagcggtgattcctggccatccccagccgtcgactacggtttggccgttcgccagtgagtgtacgtgagcggtgattcctggccatccccagcagggcgcgaaccttctccaacagggcaccgagtgtacgtgagcggtgattcnntgattcctggccatccccagcatgtacggcagttcgggcgggtatgggagtagtgtacgtgagcggtgattcctggccatccccagcggtaacccggcccgcgtttcacgcgaaccggatcaccgcccggaatacataccaaccaagaaactactctcagcgtcacgttctattcaatggcttcaaatctgtgcgcactcagggttctcgaaagctccaggacacagcagaaaagttctaaaatcgtcctccagagccgaccattcttggcttttggccctctcgaagatgcgatcaaagtgaccttgccctcagaaggcgtatctcttagtcggccgggtcttgaggatcagattcatcctcgaggtcgtcgtggcggtgggaaccgtcatttccacggtctgcctcgatcaccgcgaactctcaggcggcgatctccatgattgcacccatccactctttctcgaactgcattgggcttgcatagtgcagcgtcgagtgcattcgtgtctggttataccagagcagccaggcgatggtttcatccttggcctgacggatggtttcaaatcgttgcccatgcagccgttccactttcagtgaaccaaacagagtctcgctgcacgcgttgtcccagcagtttcccttgcgggtcattgaaggcgtgattccgcattgtttcagcaccttgctaaagtcgtcgctggcatactggctgccgcgatcactgtggaagatcagtcctgcctctcgatctgggcgtcgctggaaccaggccatctccaaggcgtcgatgacaaggtcacgccgcatatcgggttgcatcgaccagcccaccaccctgcggctgaacagatcaatgaccacggccagaatcagccagccctcctcggtggcgatatacgtcaggtcgccaatgctgccctcccgccagcagtaacagagagcccggatatacgcgccttcttcttcaaggcccatcaccgagacggcttcatcggccagccagtctgccgcgtagaactgaaaggctgggtccttccctttaggattcggcgtcatcgctgtgctccaagcgtgttccaggattcagggtcaagccaagctttgcggccagaaagttgtgattgatccggtaccgattactcctaatgcggcccgccgcaagtgttctccggaccaatattcccggctttgttagtgcagccaagttttcgttgacggcatagaggcaagcaccggtatcgtaggagatctggtacgcgtcagcttcgtgtccaatattggccaacataatgagacgagcggcggctgggtgttccttaccgtacctgaagaaagcagcctacgacgcgggcgtgctgaagaagggagagaaggtgcagttcggaatgcacaatctccggcactctctagcgacgtatctgatcgcggtcggacgcgacataaagacggtccaaactatcttgcgtcacgccaacccgatgaccacgcttcagctttacgcccacgggcgcagccaggaccgctcagacccgcagggggagatgctgacggcgtttttcgcgccgcctgtgaagccgtctacggatatggtgcagtagcaatcacgggtgagttgcgggtgagcgattttgaggtgatttactgcttagcctctaagctattgattatattgaagaaatctggtggcgggaggcaggatcgaactgccgacctacgggttatgaatccgtcgctctaaccatctgagctaccccgccgggagagccgcgaccggatggccgcatcaatctagatgatacgggcggttggatttggggtcaaacccggccagacacggctcgaggtttcccatcctttgcgccaggagcgctgaagaggtggcgcgctctgcttcggcactggaatgccggggctgaacgaaatccgaattgcacgcaagaaccggatagcgtgacaggccgtgcatcggcgacgatggtttccatgagcagcaaaccccaattcgcaccggccgaccaaagggcttcaattccttctccagcgttagcaattgacgccgagaccgcgtggcagcaggttttgagccgagatcctgctgccgagttcttctatgcggtgacgacgaccggcgtattctgtcatcccagttgcaccagccgtcggccgcttcggactaacgtacgcttctttcatttggcgacggaggcgcaggctgccggctttcgcccctgcaaacgctgccaccccaccacagggttaagcagccctttggacagaattcgcgcgcatgttgaggcgaatctcgaccggcctgtgcgtctggctgagctggggcgcgtgacggggctgagcctgtttacagtgcagcggctcttcaaggaagccatgggcgtgagcccgctgcaataccaaagggcgctgcgcgcgggcagcctgcgtggtgggctcaagcaaggaggcaaagtgacggatgcaatttatgaagctggattcggatcatcgagcagggcctacgagggcgtaccgctgggtatgacgccggcgcggtttgcccagggagggcgcggcgagcagatcggctgggcaacagcccgttcagcttttggctgggtgattgcggcggcgaccgagcgtggtctttgctggctggcgctcggaggcactgcggcggaggccgaatccagtctgcgcaaggagtttcccgcggccacgctgcgacgcgatcaggcgcttgcgaagctggtggatgcggcggtgggcgcggtcaacgggggtgcggcgcaacccggccggcggccggagctggcgctcgacttgcgcgggacagcatttcaactccgggtgtggcaggcgctgaggcagatcccgcgtggccaaacaaggagctacagtcagttggcgcgggagctaggagacccgaaagccacgcgcgccgtggcccgcgcctgcgccacgaatcgggtggcactggtggtgccttgccaccgggtggttggcgcgagcggctcgctcaccggctatcggtgggggatcgagcgcaagcgccaactgctggaggcggagcgcgtctaatccagtcaaagacgcgcgccgccagaggcctggatggtttgcccgctgacccaagtggaatcgtcagaggccaggaaggccgcgatgtcgttgggcgaaaagagggtatagaccggggacatgcctgacagagtgaaccggggagatatctgacacccgatcagagcccccgcgttggagggactggggccgggtcgcggagtgagcgtggtggcgggcgcattgcggcagacggattcgatcagggcgagttctgttgttgatggttcggacatgcgggattcacctgcgaatggtatgcgccggaagggcgtaattctcggcaaaggggaattgcgggcgattggggtgtggctgggctggggcggtgagtgaatgggactggttggaatcatctgggacttatttgccgggacatcgatgaatgctgggtgttcttatggcccttatcgggcctcgatgagagcattggcgacttggcgcgaggcgagaaccctcccggctacatcggagtttcttattacttgtatgggctgtgaagtttgacaaggcaacttatgcctacatgcagtttaactgtacagatagactgtatatatggtattctcacgccatgagcaagaggtcgcccgtccccgggtccaaaatcgcgtcagatctcgctgcacaaattaggaccattctgagcaggctgaagcgtcggctgcgtgagcagggagggcgaggagatctgacgccatctcagatctccgtcctccttcgtcttgaaaaggatggtgctgcgacggtgtcgggcctggctcgcgcagaggggatgcgtcctcaatcgatgagctccatcgtcacctctttgcaggatgctggcttagtaggcagttcctccgacccaaacgatggccgccagactctgatgtcgctcagcaacaaatgcgagaagttgcttcgggagagccgcgccgcgaggcaggattggctcaccaccgcaatcttgcaaaagctctccgccggggagcagcagaagctatcggcggctctcgagcttcttagccgacttaccgaagatagacctctttcgtgagcgatggttccaatcaaccaaatcacatcccaggagactaaccgaatgccagtcacaacaatcgacgataaaacagctcttatcgtcgtcgaccttcagaagggcatcatcaactcgcccactatccacccgatctccggtgtcatcgagcgctcctgtgcgttgatcgttgccttccggcagcatggtctcccagttgtgctcgtcaatgtggcaggtggtgctcccgggcgcacggagcagccacgacgtcatgcggcgttgcccgagggattcagcgacttactcccggaactgaacaaggagcctggcgacatcgtggtgaccaagcagacatggggcgcattttcgagcacg

SEQ ID NO: 2509 - DNA, 12066 bp, synthetic construct
  variation 3383..3395: note = n is a, c, g, or t
  variation 6719..6720: note = n is a, c, g, or t
  misc_feature 1..12066: note = Synthetic
  variation 3808..3839: note = n is a, c, g, or t
  source 1..12066: mol_type = other DNA
  variation 2457..2458: note = n is a, c, g, or t
  variation 3161..3162: note = n is a, c, g, or t
tacttcgtaggcgaaataccttatcaacaagagtggaggcatgccaaatgcgcgcaactttctcccgtcgaggcgcagcgactggacgtgctcgtagccaaaatgctggcggccgggacgctgaattcagaagagtgggccgagtacaatccaatggataagaagcggaaactggaatgggcatgtcaaggtactctgagagttcaaagtcgaatggctgcctatgaaaggtttttcggcgttgctcccagcgatgttgcaaatcaaaactttagcaaatggtctgatctacccaaataccttggccgcactttcgaggatgtctccagtgaagaacgattcacggtaggcgatactcacagtggatttacttcgatggaccgcgaggccactgcaacctcgcccgaagtagtgttgctggactctcccagccggaagcgatatgtcatagaggcggacgcctctcagaccgccgcctcagacgcctttatcgagcgcgtccgtaaatcgttaacggcggactggggtgagccgtcaaacttcagcgacaataataaatgggtgtggagaacgaagaacttcatcggcactctcactctggaaaagaggggctcagaccatttccttcaccttcaagttgaggctgttaacgaatgagaatgggagtggcatcgattgtctttcggcaagtgtcaaagtcaaagggttctcactaagcagaaaggagaatcatgccctacttgtacaggattgtaaaatgcaagaattgcggagttccaatcgaccatagctaccgtggtcaatttgagacttccggagatgtggtgacgtttagcatgttgagtccctttgatttgacatgcccagcgtgcggcactcttcgcacctacacggatggagatttgaacccggcgtggcgggatcatccgccggatacccagccctcatgacattgtcgggcggggataggcactagaccaaggtgcaacacctgcggtccatacctgactctcgacggctggcccggctgaccagtagagcatgcctacggtatttcaatacttggtgaccattgatctttgatcgttcaaaatttcgttttccggccccattaccagactagtccacagtctatgtcggcaatgaatctcagacattccaatgcgttcaagcccgtcgggtgggccaaaccaagtctgacgcggagcggcagcacattacagggtgggaagacgggcgaaaaagaatggagcctgcgtcggcagacctcgtttggaaagcttggaagttgtgtgctacgcggctttggcctttttggttgccgcgggccgcgccggttttgattgggctttggtggccgtctttttgacggcttgcgccttctctttcgcggcaaactcagctttaaccttctgggcaatggcgtcggtgtccactttgtaatgcagggcggcgtctttgagcgccttgccggtctccgattgcgtccgggctgagtgaagaatgaccgtctcaaccaatagctgtccgagttcgccttcctcggccttgcgaatgtaggcgcccatcagcttcccgatggaatcggaggcttgcgctttcttgatgccgtgattccgggcgagtacctcgatgcgccgttcctccaactgaggcagtaaccgctcgacaatgaagatcaggtcgcgcttggtgaggcgcactggaacggcggcgacgatggcggaaaggacgcgcaagcctacggcgttggcaatcgcctcctcgcggcgctgcttttcctgctcggccttgacgcgctggtcttcggctggccgctgcttcttcggacggtggacggggcattcggggtcagcgcagattttgcgaatctcgcctttctcggtgccttcggtgacgatggcctcggtcatggatttgcaggtctggtactccggccaatccctgtgcttcttcgcgttggggtcctgcggcttgatttcgatgtacttgttgcggggcagcgccgcgctggcgctgtcggtggcggttgtggccggtccgtagcccgatgaaatttgtaccagcttcggcttggctgtgatggtctgcgctacgaatccgtccagcttggactggtagcaagccgggtcggtgcaagcgtcctctgcgatgtcggcgaagagtagcgcgtttcctccagtgcgcttggggcaatcgacacaggctccggcgacggggttgacgttggggtcggtctttgagaatggcgcgtctttcagaatgagcaaaatgttctgctcaatccactggtgaagatggcgcacagggagcaggatgcgcttggctttgccctggccgccgttccaatcctcgcggaagcaagcggagagtgcttgctcctgctcggctggctgtagctttgcgagtagcagagcatggcctacgccaatttcgtctttggcgaatgcctcggtnngcgatctgctcaatggagtatttcggctcgtcaagattgagaagagcgcggaatccctgcgcttcctccagcgggtgaacgtcgcggcgttgcaggttttcgataagctgcgcctccaatgcctcagcgtcggtaaggttgacgatacggacgggcacggtttccgcctcggcaagccgggcggcgcggtagcgtctggctccggcgacaatctcgaagctgcgctcggtcagtggccgcacaagcaacggcgagagaacgccttggctgcggatgcttgcggccaattcattgagggctgaatcctcaaagagtcggcgcgggttggtcctcgactcggtgagaacggacagtggaaggtcacggtattcggtattggtgtttgcaatcgtcatagatgctctctccttgggagcgggctttggctggtcgaacaggaaggatctgagcggacagggctgttatccctgtccgcaggggggcgaagtggaagcaagcggcctaagccgctgcctccgtggttgttgcttcgttgcgggtgcggcggctgcgcctgggtgcgggggccgtatcgtcgtttgtggttggggtggccgtctcagcggtctgcgcttgggagtcttccggggaaggctcctccaacgctccgagaatcacggcggatgtgcgctggatgacttcaaggctttccgccagcaatgcnntgccgtggtaaagctggatgtagtcggcggaagcggtgccggtctggagtccgatggctttgcccacgataaaggcgatggcctcggcttcggtctcccgcacaactttggttgtcgccgtgcggcggtcggccttgtgcaacatttcgtgtccaagctcatggactaaagttgcgaaagtttccgccttcgactgccccggcaaaagtacgatcttgccnnnnnnnnnnnnnggtgcgggaagctcggctccttctgtctgcgaaacatcgaagacgtagacggcgcgaaatccaaccaaaacaggggcgctctttccggctccatcctgctcgatctcctcctgcctcttgcggcgagtgccgatcatgggtgcaagaatctggatgcccttctcgcctttcttcacgcggcgtccaagctggttccatgtgaacattccggcaacattggttgccgttggcttttggcgggcaatggccagaatgtttccaaagctgtagttgtggaaccttgccattgcgtcaaggtaagcggtgagtgcatcgctcttgcccgcctcaagctgggcaatgagggcctttacgttctcggcaatcacgtcttttgctgtctggcgctgttgctgtttgggttgataggtggnnnnnnnnnnnnnnnnnnnnnnnnnnnnnnnnagtgcggaagactggggagacctgaatgcgttctgtcctattggaggctgtgaacaaataccgcgagaaatccgacatttgtccagcatcgagagttggaattctgttgtgagctagcaaatcgctaacggtgtcgatgaacggggtgacgactgcggcggtggctgtggtgttcatgggcgcttcctccttgggcatttgcctttgccgttgcctttgaattggcagcggcagtgacatacatgccgaacgcctcctggcgaaggtggggggtagcaactgcaaggggaggggtatctcccacccttggagcgcagcggaaagggcgcgagggctgcacaagcggagcgcggaagcctggggtaaccccttgcgggcgcgagggggaaacaccccttagctgcttttggttttgttcttgctgttgctcttcaaccaatcagggaggggcgttgcggggaaggaacggccccgctgaggagggtggcggaggactgcaaagcaggccgcagacagggaggaaacttccgcccgccaaaaacagcccttcgcaaaccgggagatctgttttcaggaggttccacgggatgaacttcgacgatgaaaatatctggagagaaagcaaaataacggctgccaggacaaaacaaaactagatgaggcgtgtctattgaaatgtacaatgcactaaaggaaaccatccgaacggctcttggaggtgaaagtgcttcttaaaagcgatatgcacttgatcgaaaagaactcggaaaccgtgacgacgcaagcggaagagactctgacaaagcagtacggaccattgctcagcattactcaactcgcagctctcttggatcgttcccccgacggcttacgcattacgctgcgatcttctggagagtgggtcagtaagattaacgcaactcgcttgagactgggacgccgcgtctatttccgcacggctgaagttgccaatgtgcttggaatccggtaaatcgacgagtgagttcagaactcacgtccgtaagcgcgattcttggcctgcattcgactccggctgccgataagcaggcatccccttcgcggatcaacgcggctgcctcatcggtgcgttcgcggaagagctcaattagcgatcagcacttcgaacggagtcagacacaagccgttgtctcccggcaattacatcctctgctgtccatcgtgcaaggcattcccagcgagagcgccctcgatgccggcgcgctcggcttcatggcaaagttcctggtccaaaccactctgccgcacagcgagcaaaccggcacacagtacgtccgcacggacggcaatctcaccctctgcatcaccgatgtcggcgcaaccggcctgccttacggcagctatccgcgcctgatcctcatctggatgacaaccgaagccgtccgaacagggaatcgagagttggaactaggctcctcgctttcgagtttcatggcgcaactcggacttcaggcaacaggcggccactggggaacaatcccgcggttccgcgaccagatgcaacgcctggtcggcgccgccatctcgacccgctggtcgagtgatgccaacgggcagaatcactcgggcggagagaatctcctggtggcggacaggtttcatctttggtggaccccgcaagagttgccgtacagaagtctggcaaagtcctcggtgaccctgtcgatgaacttctttgagcaacttgtcgccgctccggtgccgctcgacttgagggctgtccgggctctcaagcggtcgccgctggcgctcgatctctacgcctgggcgacgcggcgggtcagctacttgtcgcggcccacgttgattccctgggagtcgctgcgccggagcttcggagccgggtacgccaacacaccgcaaggccgctcctgctttcgagcaaaggccatcgaagcgttccgcaggatcgtcatggtctactctgaactgaagattgaaagccatgagaacggcctgctgcttcgcccttctggtccgcacatccccaaagttccgcggtagtcttcggtggcgcgcagcgccctttccccgctgaggggcggaggttctcgccttgtctggtccacatttgcacatttccacagagcacgggcgcgactacaggctatctatatagattcacataaaggtactacagggtgctctggaaaccatttgtaatcaatgcggtgcggacacttcgtacaccgtttatgcgcaaatgtacaccgcttatgcgtggaaacctgcccaggatacaccgcttatgcgtaaacaggtacaccgcttatgcgtggaaatctcacaggattcacaccggaatgtggatatttccggcgaactgctgcaactgttccgccgtggcttcggtggagttgtcggcggcaatgccgcaagaggcaatgtgaaatgcccgcgtcggcgagtgccggcgcgggcgtgcccagctaatactcgctgggcaggtgaatcacgctgttggcgaagtagagcttcacttcgtcaagcgggaagtccgtgaaagggatctcctgcgtgtaaacggggtttccattgccgtcttcgcagaacacggtggcgctgcggtcggagtgaaccttcaggttccagacctggaatccttcgccggaaacgcgagcatcatgttgctgagcgattgcgatgacgtcgagcagccagtaagcgccgccctggtcggcaaggaactttgcgccgtcggtatacaggactgcgcgattgatgctgtggcgataccagttctcggagccggtgaactgacggagttgaatttcggagagtgttgttgtgttcgtcatgttatgcctcttttccttagagtgaccccaacggcgggggcannctttttggggggaccgtgaccgcagggcatgggggagccgaaatagcgtcattgacggcaagcgacggcggctaaggtgccatccgcccgccgttctttgggtcacggaaaagatgccagtttgaacacagcaatcaattcgagtttggagcctgaaagcggtatcacctgatatcgtccgtgtagttcagtccgcggacaatgttgactcaaggttcttcttcaagacaacgctatcgccgctcacgatattgaatcgctgattgctcatcagatcgccaagagcagatcctcctctgccgggaaacggttgaccggggagagcagcgcctatgagaaccagcgaggatacattcccacctcacaaccggcggaaataagaacgccccgtctccggggcgttcaaaggtcgctcggtgagcggagccttacgacgaaagcttactaagaatagccgggcaatcgccgctcaagtacactaatatacttctatcctctttaggatcattgcgtcaaggcggtatttgatgtccgcagccctggaacagcagaagtatgtcctcggactcgatcttggatcagcctcgctggggtgggcattgatcgcgctgaacgatgccgatgaccccgtttcgttgattcgcgccggcgttcgtatctttgaacctggggttgatggcacgtcgattgagatcgagcagggaaaagaccagtcgaaagcggtggagagacgaactgctcgcttgcatcggcgccagcttcgtcgacgtgccgcccggcagagggatttattccgcgttctccaaagacattccttgttgccagcgccggagacgctagtcggatcgccagaagagcagaggcattcagttcttaacgaactcgatcaggagctcgctcaaaaatggcaatccacatatcaaggcaaacgttttgccgagcttcctttgtattacctgcgcaaaatggcgctcgatgagcggttggaagcccacgaaatcggacgaatactgtttcatcttattcagaggcgtggcttcctctcgaatcgccgagagaataagcagaatccagaccagaaaaaggaacttggccaagtcaaagcagaaatccatagcttggaacaggaaatccagaatgcaggtgcacgaacccttggtgagtttttcgcaggtttggacccgcacgctcagaaagtccgtcggcgatggaccgcgcgaaagatgttccaagatgagttcgagaagatctgggaagcacagaaggcgcatcgcccagagctattgacgcaggaacttcacgacaagatcgctcatctcctgtttttccagaggccaatcgctgcccagacacatttaatcggcaaatgcgagttggagactggcaagcagcgggcaccttgggcagcaatggaagcccagagattccggattctgcaaaaggtgaacgatctgaggttaatcaacccagggagcttgatttccgatccactgacggaggaggggcggcagcgactgtaccaccttctggatcgggagggagaccagaccttcaaagcgatcaggaagtatctctcattctctgccgaagttcaattcaatcttgaaaagggtgacgagaaacgtctccgcggaaatcgaacacaggcggcaatgcggaaggtgtttggtgaacgctgggacacaatcggcgaaggcaaacagcaccagatcatcgagaactggagaaatagtgagtccgatgatgtattgatccgcgaagcgatggaacagtggtcactggacgccgccgctgccacgttactgtccgaacagacacctgaacctggctactgcgccgtgtctttggctgcaatatccaaactgctccctttgatggcaagcgggaagtcgttcaaagaggccgaaacggaactctacggcgctcgcttctctggcggaacgatattcgaaacgcttccggaggtgcgcaagcagcttgagtcgttgcgcaatccggcagtggaacgctcccttacggagttgcgcaaagtcgtgaacgccatcgtgcgggaatacgggaaaccccacgaaatacgaattgagcttgcacgcgagttgaagaagcctcggcaggagaggattgaggcaactaagaagaatcggaatcgtcaacgagagcgcgaagacgttgctgttcgaatcctccgggaatgcggcctgtcgaatccgtcgagaagggacattgagaaggctcgtcttcatgaggagtgcggcggctactgtccatacacagggagacacattcccttttcgactctcttcgacaactcggagttcgatgttgagcacatcattcctcgtagccgttatccggacgattcatttcaaaacaagacgctgtgctatcttcccgaaaaccgcgacgtgaagaagggtcagacgccgtgggaagcctatgggaaagatgagcagcgttgggcagagatcatgactcgcgtcagcagttggaagaatagaggcaaaatggcgcgcttcgcgattcagaccgaggaagctcttggcgatttcagcgcgcgacaaatgaacgatacccgctacgcgagcgttctggcgtcacgctttctcggagccctttacggtggtcgcgatcttgtcgatgcagagaaagtgcgtcaagtaatcttcgcatccagtggcgcggttaccgcgacactacgcagttcgtggggattggaggcgatcttgcgcgaaattgtgccgacggaacccggagagtcccgcggaaagccgcgtaccgatcatcgtcatcacgcgattgacgcaataaccatcgcactaactcgccccaaggtcatccaatcgatggcgctagctgcttccctggagccttggcaaagagactcgcgagcttggcggaagatcgaatcgccttggcgagacttcgttctatcaatccgtccgcacatcgaacaaatgctcgtttcgcatcggccggaacacaagatgagtggagaactgcataagggcacaaactatccgcccccgcataattacaagggcaagcccacggttcatacaagatgcgcgctgtcggcgctgtcggcagccgacatcgccgacgacgaagtcatcgttgacccggcggtgcgggatgccgttcgggcgaagctagaaaagctcggggggaatccgaagctattcgatcgacctgaaaatgtgccatgcctcgaatctcgcgatggtcgcttcatccccatccgcaaggtcaggattagagaagcgaagaagccaatcctcgtcggtactggcgtccgcgaacgctatgttgcatcagggggaattcaccatatcggcttgttcgttgtcagagatgcccgtcgtcgtgaggtatgggagagcgaggtcgtacagattacggacgcatacgagagacatcgcgagcacttgcccgttgtgtgtcgaacacatgatgctgaagaagccgcgttcctcttctctctcatgaaggacgatacggtggagttggaaaaagatgggactaggggcatttatcgagtcaagaagtttgaggctacaggcaagatcaccttcgtccccgtgaacaatgccatgctcgacaagatgcaatacacaaccggagcagcatggtcgaggatgcccgcaacgctaaagccaatgtctccccgtaagatcgtcatcgatctgcttggaaaggtacacccggccaatgattgatcgaattatcgaaatcgctaaccctgcgcggctaagcgtccacgactcccagttggttatcgagctagtgcaggcggagcagcttttgcttccctttacaacgcccatcagcgaaatcgcggttctgctgttggcgcatccccaggttatcctttcgcaggctgtcctctctaggattgctgaggctggtggttcggtcgtgacgatcgatggaaaattccttcctgcgtcaatgctattgcctgtgcaggcgcactttctccagacagaacggttcgccaaacagatgcggatatctatacctacacagaagcggctatggcaggagatcgtgcgcgccaagatccgagcacaaggggaactactgaaagagctccgcggatcagatgacgggttagtcgcgatggcggcgcgagttcgctcggacgacgcaggcaacctagaagcgcaggcagcaagacgatattggtcacagatattcaacgatccgaaatttcggcggggctccgaggagccgaaccaaaaccggcacctcgattacggatacacagttctaagggcagcagtggctcgtgcgctctgtgcggcggggctgcatccgtccatcggcttgcgtcataagaatcgctatgatgccttttgcctggcggcggatgtaatggagccattccgccctctaatcgatcgccgtgtttcccaatggattgtagatcacgaccctggggagcctttgactactgcaacaaaatcatggttgatcggtgcaacgacctcgcgctatgtatttgagcgtgaggagcgctcgctattcgatattctgttacgcacggcgaattctctggcaaagtgcgttaccggagagtcccgtgaaatcgcgatcccttcactgctggaaccatgccgcgagcctgaaccacgtcggaaggggccgcaaagtgtgagatttcgagaagaaatcgaaacggtcggctgacgaaagggattcggagttgtcttttgggaatcatgctgagttgaacgcttatgaaagggttgctactttcagcgtaccggtctttgtggctcatcgccatgttcgacctgccggtggagacgtcggcgaacaggcgcgactacacgcgctttcgcaaagcactgctcaaagacggctttatgatgcttcagttttctgtgtatgcgcgataccttccgagcgaagaggccgccgacgcccatcgaagcacgatccgagcggtgattccgcctttggggcaggtgcggctaatgacggtcacagaccatcaattcgggaaaatggaggtattctatggcagaaaaccgcgagagccggaagatattccggagcagatactgcttttctgaaaaaagaaaccgcgccaacctgctgcttttcagcaagttcggcgcggcccagtgtacttgagcggtgaatcccggccatccccagcaaggggacggctaaggcatgctctctatccagtgtacttgagcggtgaatcccggccatccccagcccttgccacgacatacgagttcccccatgcagtgtacttgagcggtgaatcccggccatccccagcgtctgaggctcaggggaacgtgctgctgtagtgtacttgagcggtgaatc

SEQ ID NO: 2510 - DNA, 8916 bp, synthetic construct
  misc_feature 1..8916: note = Synthetic
  source 1..8916: mol_type = other DNA
agctctttgcgaaccagcgcgtgagttggatcgagcgaaaggccatcgtggtccaccctgagtggatagacgaatggaaggtgctgatgacggcggtgcaggggacgagcgcggctatcgaaacaaagttcctcagtaagcccatcattgccgaaccgggaacagcgtgtaccgagacttacctcgttgccggtcatttcggcagtgaaacggaagcggtcaactacgcgaactacctgcgtacgcgatttgtgcgattcctggtatccctacgcaaggcgacgcagcacgccacgcgtgacgtgtatgtatttgtgccggacttgccaccgacccggaaacggacagacgcccagctttataagcggtacggactcaccgaagctgagatcgctttcattgaatctcaggtggccgaacataatagcgaattgtttgatgaggtcgctgcgaaggaaatcgaaggtgagtaaggacatcgacgaaattcttgcgccgaagccggatgtgaggccacgcatttatgcctactcgattgccgatgaggcgcacaagggacttctcaaggtcggccagacgacgcgcgacgtaaagcagcgcatcgccgagcaactgaaaaccgctgccatcaagaattacaggattcaactcaacgaaactgctgagcgcgaagatgggactatcttcagcgaccatgaggtacgtgcggcgctcgtcaagaagaagttcgcgaataccgaactggagtggatgcgctgctcggtccaagatttaaagaccgtcctcgttgaactgcgaaccggtcaacggttcaccggcacgcatcaccaaacgtttccgatgcgtcgtgaacaggttgaggcggtcgacaagaccttcgattattttcactcgatctggtctgaggatcagcacggcgtcccgcgcttcctctggaacgcgaagatgcgctttggaaaaaccttcacgacgtatcagctcgctaggaagctcgccaccaagcgtgtgctcgtgttgaccttcaagcctgcggttgaagatgcatggcagaccgatctggaatcccatatcgattttgacggctggcattatctctcccgcagttccaacagcgatcccaccaaaatcgatgacgaaaagcccgtggtctacttcggctcctttcaggatttactgggccgcgatgcggccggaaatatcaaaccgaggaacgaatggctgcacgcggtgaattgggacctcgtggtgtttgacgaataccacttcggcgcttggcgggatactgcgaaggaactgtttgagggcgaggaagaggccgttgcgaagaaagagcttaagtacatcgccgcgctggaaggtgtgaacgaagatctcggtgttctttcggagaaggaaaccgagttcctaccaatcacgaccaaagcctacctctacctctctggaacaccgttcaaagcgctggcaacaggcgagtttatcgaagaacaaatcttcaactggacctacaccgacgaacagcgcgccaagcaagacttcgtagccaagaatcccggcaaatggaatccttatggtgctctgccgcagatgcgtctccttacttaccagatgccagacgaactgctgacggttgcgagtgccggggaattcgacgagttcgacctcaacgagttctttgcaggtaccggcacgggaaagggcgcgcagttcaagcacaagagtgacgtacaaaagtggctcgacattatccgaggccagtatgcaccgaggattgtggatggcctcaagacgggctcgccgcccccattcccctattcggatgcgcggctgctcccgtacatgcagcactcattctggtttctgccaaacgtggcagcatgccatgcgatggcgaacctgctggccgagaagcacaacattttctggcgcgagtaccatgttgtcgttgcggctggtgagtcggcgggtattgggctggaggcactgccgccggtgcgtaacgctatcgggagtgggttctcgaccaaaaccattacactgtcatgaggcaagctcaccaccggcgtgactgtgccgcaatggtcttcgatcctcatgctgcgcaatctgaagagtcctgagacctacttccaggcagcctttcgcgtgcagtctccgtggtctatcaagaacccgaatggcgacaatcctaacgaggaagaaattctcaaacctgtgtgcttcgtgttcgactttgctccgacgcgcgcgcttaggcaactttccgaatacggcataggactctcgcccaacgagccgaatccggaaaatgccgtcaaggaccttgtgtcattcctgcctgtactggcctacgacggcgcgaacatgactcagatcgatgctggcggcattttggacatcgcgatggcaggcacatcggcaacgctgctggcgcgaaaatgggagagcgcgatgctggtgaacgtggacaacgacacgctacgccgaattctcgataacgccgaggcgatggccgcggtagaacgtatcgagggatggcgtgctctgggtgacaacatcatcgagaccatcatcaacaagagcgagaaggtcaaggaactcaagaacaaggccaaggacaaggctctgaccacgaagcagcagaaacagctcaccgaggaagagaaggaatacaagtcgaaacgcaagctcgtgcaagaaaagctgatcaaatttgcgacgcgcatccctgcattcatgtacctgaccgatttccgcgagaacaccctgcaagacgtgatcactaagttggagccggacatgtttctggccgtcactggcctgaccgtcaaggacttccatctgctcgtgcgccttaaggtattcaataccgagcagatgaaccaagcggtgttcgcgttccgccgctacgaagatgcctcactgaggtacacgggcatcgaaagccacgaggggctcacacattacgggctttatgacaccgtggtaggacgggagtgaggcggcagagcttgttgcaggtatgagtcttgtgcgcctatatgacggtgggcgataatcgggccttcccctagcgaggatgtcaatgatggaacgaacgcaagttgagtttgagacagtcgccaaagacttccagaatggcgtgcaacaattgatagtgaaccatgaagacttcaaagccactgatgtcggagaaatcaaggtagggctccagattgggctctactcagtgggcacaagaaccagcgttgatggcagggcaacgcagttcggggacgcccgtgtgccgttggccgttcttgagaagctaggtcaacttgccgtgcaattcgggaaggagagcgtcacgatctcgattaaagacggagaggcgagggtggagaagacttccgtgaagcatcacgaaatttctgtgggagaacgatcatcctcccccgctgcgattcctgtgaacgcatctgctctcgacattcttgcaaccgcagaggccatgtccaaatctgacatttccgatgcgggcctgaaggcccggttgacgcgggcactcgaagatcgagatgccgctgttgggagagccttcaacgccctgaaggagttcggcgtggaggaagctgaagttcaggaactcgtggacaagcacatcagagagattgccaagggagttaagaaagctctgggaaagaatagaggtcttcactcggtttgagtatacggtgcggtaggctgctgtattggtactgagcaagggggcgtggcgcagcctgtcgatcagcatgattcgtcggcggcactcgacccttggcatctccgccgacgtgctcatatagccctctctcgtcggtgctgcaaagaaacgccgcgtggcgaattagcgaaaggtagatcatcatggctcttcttaacgacttctaggtgcgcaaccagcgccctagaggaaacaatgtcccggtcttaccggaaaccatacttcacgatttgcggaggcgacgcctccgagcacaatgataaaaaagtcgcgagccgaagctggagacgactcataaaccgtggcctacgacatgcggactgggattcatacctgatccccgtgcgctgtgaagccccgaataacaaccgttaccagtggggctcagatggtagcaatcagctcgacacctttcctgattgctgggatcggcagcgcctatgctatggcgacatcgaagggtacgagcgggctcgccactggcacgagaaactgactcggaaatagtttagggatagaaagcatcaacaggaaagccccgttgccggggctttcaggggttgcttataagcagagccccgcaacgaaagcttactaagaatagtcgagcaatcgccgctcaggtacactacactcttaattaattcagtaaactccgtttgtcaagggcctcttgatgagtgaagagacggttgtttgtgaatacaccttagggcttgatcttggctcagcttctatcggctgggcgctgataggactcgattccagctattctccgtgcaagctgcttgatgcaggtgtccgcatcttcgagccgggcgttgaaggaaacatcgaagagggaaaagacgagtcaaaggcattggcgcgccgcacggcacgtctgcaaaggcgccagcttcgacgccgcgcagcccggcagcgagaactcttccggctgttgcagtcggtaggtcttctgccggccaacaattctgcaatcgatgacttttcccagcagcggcacgagattctaaaccagttagacagagagttgctcaacgggctgaaggcgcgccaaagcgcctccgactattctcagtcggaacagcttctgccttacgtgctgcgtaaggaagctttggagcggaagcttgaggcgcatgagctggggcgtgttctttaccatctctgccaacggcgaggctttaaaagcaaccgccgtgaaggcgggggcaaggagaaggaagaagaactgggcaaggtcaagcaggacatctccacgttaaggcaggagatgggcggcaagaccttgggtgcatactttgctggacttgatcctcatttgcgcaaggtgcggcagcgctggaccgcgcgtgacatgttcgagacggagttcgaagcgatctgggagcggcaatcgcgggattggccagagttattgagctccccgctgaaagccaaagtcgcccggctcctgtattttcaacgaccgattgcgaaacaggagcacctcatcggtcattgcgaactggagaagaaggagcggcgcgcgccgtgggcatcgctcgatgcacagcgcttccgactgctgcagaaggtcaacgatttgaagatcattccggcgggcagcttcgacgaggtgggcctggcgggcgaacagcggcaattgcttctggaacatttagaagttcacggcggcgttacgttcagcgatttgaagaaattgctcagtcttcctcccagaactcatttcaacctggagcgcggcggcgagaaatccatgccgggcaatcgcacgaacgcgcacatgctcgccgtgttcggcgaacagtggcgcgagctggctgcagaaagcaagaacgagatcgttgagatgtggcggtgggttgagtcagaggagaagctggctcgatatggacaagagcgatgggcgctggatgagtacacagcgaaactctttgccggaaagcgcgcggaagacaagtattgcaatctttcgctggcggcgatccgcaagctccgtccgctgatggaggaaggcgttgccttcatgaaggcgcgcttggagctctatcccgagcagcgggataagccgcgcgacttgttgccgctggtgagggaggcggtccccgaactgcggaatccggcggtggagcgcgcgctcacggaagttcgtaaagtggtgaatgcaattcttcgcaagtacggcaagccgtattcgatacgcatcgagatggctcgcgagttgcggaagccgcgcaaggagcgcgaagcggcggcaaagcgcatgcgtcaaaacgagaaagagcgcatcgctatgaaggcacgcatactcaaggatgcaggcttgccgaatccatctcgcgacgacattgaaagagcgcggctgtgggaggagtgtgggggaatctgcccctatacggggcgaactatcgggttcagctccctgtttggaggggaatcgcagtttgacattgaacacataattccgctcagtatctgcgtggacgattcattcgcaaataagacactctgctatcacgaagagaatcggcatgtgaaacgaaaccaaacgccctggaaagcttacaaggatacggcaaactgggatgagatcatcctgcgtttaaagaactggaagcctggcaatccggcgaagttgcggcgatttgaattgaagagcacagaggagcttgaagggtttgcaactcgccagatgaacgacacgcggtacaccacccagttggcaatcgatctcctcaagacgctctatggcggtcgcgaagttatcgaggccgacggcagcaagaggcaggcgatctttgccacctccggtggagtaacagcgaaactccgccgagcctggggccttgaggccatcttgcgcgaagctgtaccttccgccaatggcgaaaaccggggcaagcctcggaccgatcataggcaccatgccgttgacgctattgccatagctctctccaactcgaaaaccgtgcaaatgatgaattgccaagccgctctagcattgccatgggagtttgcagagcgcgtctggagccggatgccggctccatggccgcagtcgggcgatcatcttcagtttgtggattcgattcgtccgcgcatcctgtccatgagagcatcgcacaggcccgagcacaaaatgagcggggcattacataacgatacgttgtacggacggccttacgtccgcgacggcaagagcctggttcatctgcggcgttccgttaaggggatcaagccagatcagattgagaatatcgtggacctggctgttcgtgcggcggtggagaggcggttgatcgaacatgggggcgatgtcggaaagttcaatccagagattccagaatcgttgccgtatcttgaaagcaaacggggaagaattccggtcaagaaggtacgggtgaaagagacaaagaagggcctcatcgaattgaggaacaaccggtttgtcgagtccggcgatatccatcattttgaactgttcgtgcacagggatcagaacaggcgggagtcgtggactcatgtttcggtctcattgatggaagcaagtcagcggaacgcggccaatcggcgcaatggtcatgtcgaagcggtggtgtcgcaagaattgaaggacgaccccgaagcggagtttctcttctcgttgatgaagggggacatcgtggagatggaccacgagggcgcccgcgaactgttccgggtgaagaaattctatgcagcgggcccaatatggttttctcacgtcaataatgcgcaaaaggacgcggaccagaagcgggataaaactcattggtctaaagtacccaacgggcttatgcagttgaaggcacgtaaagtcacgattgatcttttggggaaggttcaccctgtccatgattgagcgcgtgatcgaagttgccaacccggcgcggttgcatgtgagggatgcacaactggtgattgaaccggagggaggcatggcggcaacggctccggtgtgcgaggtcggggttctgcttgttgcgcacccaagagtcgtgttaacacaggccgtgttgacacaaatcgcgctggagggcggagcggtggtgacgtgcgacgataaattcttacccgcgtcgatgcttctgccaattcaatcgcattatttgcaaacggaacggttcggcaagcagattgagatttccgcccccttgcgtaaacgactgtggcggacgattgtgcaggcgaagattcgagcgcagggaaaactgttgaagcggctgcacggtaatgacgaggggctgcttccaatgtcagtgcgggtccgctcgggagatccggagaacatggaggcgcaggctgcacgccgctattggcacgcagtcttcggggatgagaagtttcggcgcgggaatgacgcacagaaccagaaccggcatctggattacggatacatcgtactgagggcagttgcggcacgcgctttgtgtgcggcgggactgcacccttccatcggcttgcatcaccagaaccggtacgatgcattcagcttggcggcagacgtgatggagcctttccgtccgattatcgatgaacgagtcgcgcgctggatcgagagacacgatccttacgctccgttggaccgggagacgcgcggttggctgcttggcgcactaacggcgcgctacctgtgcaatggggaagagcgttcgctgtttgacttgcttgcccgcacggcgaatgggctggctcgcgcgatttgcggagaggaggcgacgttcagtcctcccgatgagtttttgctatgcgacgagtgaacctttcggcatacagagctatgtggctggttgcgatgttcgatcttccggtagagaccaaggagaaccggcgcagctatgcgcggttccgcaagtctttgatcaaggacggttttatgatgttgcagttttccgtctatgcgcgttatattccgagcgaagaggcagccgaagcacacagaaatacggttcgttctgttatcccgccgctgggggaagtgagattggtggccttaaccgaccatcagttcggcaagatggaggtattttatggcagaaaaccgcgagaaccggaatccccgcctaaccaactcatgcttttttgagaaagaaaatgcgcggaacctccttcctatgaggcaattccgcgcgatgtagtgtacctgagcc

SEQ ID NO: 2511 - DNA, 6729 bp, synthetic construct
  variation 558..559: note = n is a, c, g, or t
  misc_feature 1..6729: note = Synthetic
  variation 4108..4109: note = n is a, c, g, or t
  source 1..6729: mol_type = other DNA
aagttcctggtccaaaccactctgccgcacagcgagcaaaccggcacacagtacgtccgcacggacggcaatctcaccctctgcatcaccgatgtcggcgcaaccggcctgccttacggcagctatccgcgcctgatcctcatctggatgacaaccgaagccgtccgaacagggaatcgagagttggaactaggctcctcgctttcgagtttcatggcgcaactcggacttcaggcaacaggcggccactggggaacaatcccgcggttccgcgaccagatgcaacgcctggtcggcgccgccatctcgacccgctggtcgagtgatgccaacgggcagaatcactcgggcggagagaatctcctggtggcggacaggtttcatctttggtggacgccgcaagagttgccgtacggaagcctggcaaagtcctcggtgaccctgtcgatgaacttctttgagcaacttgtcgccgctccggtgccgctcgacttgagggctgtccgggctctcaagcggtcgccgctggcgctcgatctctacgcctgggcgacgcgnnccgcaaggccgctcctgctttcgagcaaaggccatcgaagcgttccgcaggatcgtcatggtctactctgaactgaagattgaaagccatgagaacggcctgctgcttcgcccttctggtccgcacatccccaaagttccgcggtagtcttcggtggcgcgcagcgccctttccccgctgaggggcggaggttctcgccttgtctggtccacatttgcacatttccacagagcacgggcgcgactacaggctatctatatagattcacataaaggtactacagggtgctctggaaaccatttgtaatcaatgcggtgcggacacttcgtacaccgtttatgcgcaaatgtacaccgcttatgcgtggaaacctgcccaggatacaccgcttatgcgtaaacaggtacaccgcttatgcgtggaaatctcacaggattcacaccggaatgtggatatttccggcgaactgctgcaactgttccgccgtggcttcggtggagttgtcggcggcaatgccgcaagaggcaatgtgaaatgcccgcgtcggcgagtgccggcgcgggcgtgcccagctaatactcgctgggcaggtgaatcacgctgttggcgaagtagagcttcacttcgtcaagcgggaagtccgtgaaagggatctcctgcgtgtaaacggggtttccattgccgtcttcgcagaacacggtggcgctgcggtcggagtgaaccttcaggttccagacctggaatccttcgccggaaacgcgagcatcatgttgctgagcgattgcgatgacgtcgagcagccagtaagcgccgccctggtcggcaaggaactttgcgccgtcggtatacaggactgcgcgattgatgctgtggcgataccagttctcggagccggtgaactgacggagttgaatttcggagagtgttgttgtgttcgtcatgttatgcctcttttccttagagtgaccccaacggcgggggcaagagaggcacaaatatgctgccgagcaaagcgcagcagtcatagctttttggggggaccgtgaccgcagggcatgggggagccgaaatagcgtcattgacggcaagcgacggcggctaaggtgccatccgcccgccgttctttgggtcacggaaaagatgccagtttgaacacagcaatcaattcgagtttggagcctgaaagcggtatcacctgatatcgtccgtgtagttcagtccgcggacaatgttgactcaaggttcttcttcaagacaacgctatcgccgctcacgatattgaatcgctgattgctcatcagatcgccaagagcagatcctcctctgccgggaaacggttgaccggggagagcagcgcctatgagaaccagcgaggatacattcccacctcacaaccggcggaaataagaacgccccgtctccggggcgttcaaaggtcgctcggtgagcggagccttacgacgaaagcttactaagaatagccgggcaatcgccgctcaagtacactaatatacttctatcctctttaggatcattgcgtcaaggcggtatttgatgtccgcagccctggaacagcagaagtatgtcctcggactcgatcttggatcagcctcgctggggtgggcattgatcgcgctgaacgatgccgatgaccccgtttcgttgattcgcgccggcgttcgtatctttgaacctggggttgatggcacgtcgattgagatcgagcagggaaaagaccagtcgaaagcggtggagagacgaactgctcgcttgcatcggcgccagcttcgtcgacgtgccgcccggcagagggatttattccgcgttctccaaagacattccttgttgccagcgccggagacgctagtcggatcgccagaagagcagaggcattcagttcttaacgaactcgatcaggagctcgctcaaaaatggcaatccacatatcaaggcaaacgttttgccgagcttcctttgtattacctgcgcaaaatggcgctcgatgagcggttggaagcccacgaaatcggacgaatactgtttcatcttattcagaggcgtggcttcctctcgaatcgccgagagaataagcagaatccagaccagaaaaaggaacttggccaagtcaaagcagaaatccatagcttggaacaggaaatccagaatgcaggtgcacgaacccttggtgagtttttcgcaggtttggacccgcacgctcagaaagtccgtcggcgatggaccgcgcgaaagatgttccaagatgagttcgagaagatctgggaagcacagaaggcgcatcgcccagagctattgacgcaggaacttcacgacaagatcgctcatctcctgtttttccagaggccaatcgctgcccagacacatttaatcggcaaatgcgagttggagactggcaagcagcgggcaccttgggcagcaatggaagcccagagattccggattctgcaaaaggtgaacgatctgaggttaatcaacccagggagcttgatttccgatccactgacggaggaggggcggcagcgactgtaccaccttctggatcgggagggagaccagaccttcaaagcgatcaggaagtatctctcattctctgccgaagttcaattcaatcttgaaaagggtgacgagaaacgtctccgcggaaatcgaacacaggcggcaatgcggaaggtgtttggtgaacgctgggacacaatcggcgaaggcaaacagcaccagatcatcgagaactggagaaatagtgagtccgatgatgtattgatccgcgaagcgatggaacagtggtcactggacgccgccgctgccacgttactgtccgaacagacacctgaacctggctactgcgccgtgtctttggctgcaatatccaaactgctccctttgatggcaagcgggaagtcgttcaaagaggccgaaacggaactctacggcgctcgcttctctggcggaacgatattcgaaacgcttccggaggtgcgcaagcagcttgagtcgttgcgcaatccggcagtggaacgctcccttacggagttgcgcaaagtcgtgaacgccatcgtgcgggaatacgggaaaccccacgaaatacgaattgagcttgcacgcgagttgaagaagcctcggcaggagaggattgaggcaactaagaagaatcggaatcgtcaacgagagcgcgaagacgttgctgttcgaatcctccgggaatgcggcctgtcgaatccgtcgagaagggacattgagaaggctcgtcttcatgaggagtgcggcggctactgtccatacacagggagacacattcccttttcgactctcttcgacaactcggagttcgatgttgagcacatcattcctcgtagccgttatccggacgattcatttcaaaacaagacgctgtgctatcttcccgaaaaccgcgacgtgaagaagggtcagacgccgtgggaagcctatgggaaagatgagcagcgttgggcagagatcatgactcgcgtcagcagttggaagaatagaggcaaaatggcgcgcttcgcgatnngaggaagctcttggcgatttcagcgcgcgacaaatgaacgatacccgctacgcgagcgttctggcgtcacgctttctcggagccctttacggtggtcgcgatcttgtcgatgcagagaaagtgcgtcaagtaatcttcgcatccagtggcgcggttaccgcgacactacgcagttcgtggggattggaggcgatcttgcgcgaaattgtgccgacggaacccggagagtcccgcggaaagccgcgtaccgatcatcgtcatcacgcgattgacgcaataaccatcgcactaactcgccccaaggtcatccaatcgatggcgctagctgcttccctggagccttggcaaagagactcgcgagcttggcggaagatcgaatcgccttggcgagacttcgttctatcaatccgtccgcacatcgaacaaatgctcgtttcgcatcggccggaacacaagatgagtggagaactgcataagggcacaaactatccgcccccgcataattacaagggcaagcccacggttcatacaagatgcgcgctgtcggcgctgtcggcagccgacatcgccgacgacgaagtcatcgttgacccggcggtgcgggatgccgttcgggcgaagctagaaaagctcggggggaatccgaagctattcgatcgacctgaaaatgtgccatgcctcgaatctcgcgatggtcgcttcatccccatccgcaaggtcaggattagagaagcgaagaagccaatcctcgtcggtactggcgtccgcgaacgctatgttgcatcagggggaattcaccatatcggcttgttcgttgtcagagatgcccgtcgtcgtgaggtatgggagagcgaggtcgtacagattacggacgcatacgagagacatcgcgagcacttgcccgttgtgtgtcgaacacatgatgctgaagaagccgcgttcctcttctctctcatgaaggacgatacggtggagttggaaaaagatgggactaggggcatttatcgagtcaagaagtttgaggctacaggcaagatcaccttcgtccccgtgaacaatgccatgctcgacaagatgcaatacacaaccggagcagcatggtcgaggatgcccgcaacgctaaagccaatgtctccccgtaagatcgtcatcgatctgcttggaaaggtacacccggccaatgattgatcgaattatcgaaatcgctaaccctgcgcggctaagcgtccacgactcccagttggttatcgagctagtgcaggcggagcagcttttgcttccctttacaacgcccatcagcgaaatcgcggttctgctgttggcgcatccccaggttatcctttcgcaggctgtcctctctaggattgctgaggctggtggttcggtcgtgacgatcgatggaaaattccttcctgcgtcaatgctattgcctgtgcaggcgcactttctccagacagaacggttcgccaaacagatgcggatatctatacctacacagaagcggctatggcaggagatcgtgcgcgccaagatccgagcacaaggggaactactgaaagagctccgcggatcagatgacgggttagtcgcgatggcggcgcgagttcgctcggacgacgcaggcaacctagaagcgcaggcagcaagacgatattggtcacagatattcaacgatccgaaatttcggcggggctccgaggagccgaaccaaaaccggcacctcgattacggatacacagttctaagggcagcagtggctcgtgcgctctgtgcggcggggctgcatccgtccatcggcttgcgtcataagaatcgctatgatgccttttgcctggcggcggatgtaatggagccattccgccctctaatcgatcgccgtgtttcccaatggattgtagatcacgaccctggggagcctttgactactgcaacaaaatcatggttgatcggtgcaacgacctcgcgctatgtatttgagcgtgaggagcgctcgctattcgatattctgttacgcacggcgaattctctggcaaagtgcgttaccggagagtcccgtgaaatcgcgatcccttcactgctggaaccatgccgcgagcctgaaccacgtcggaaggggccgcaaagtgtgagatttcgagaagaaatcgaaacggtcggctgacgaaagggattcggagttgtcttttgggaatcatgctgagttgaacgcttatgaaagggttgctactttcagcgtaccggtctttgtggctcatcgccatgttcgacctgccggtggagacgtcggcgaacaggcgcgactacacgcgctttcgcaaagcactgctcaaagacggctttatgatgcttcagttttctgtgtatgcgcgataccttccgagcgaagaggccgccgacgcccatcgaagcacgatccgagcggtgattccgcctttggggcaggtgcggctaatgacggtcacagaccatcaattcgggaaaatggaggtattctatggcagaaaaccgcgagagccggaagatattccggagcagatactgcttttctgaaaaaagaaaccgcgccaacctgctgcttttcagcaagttcggcgcggcccagtgtacttgagcggtgaat

SEQ ID NO: 2512 - DNA, 5864 bp, synthetic construct
  misc_feature 1..5864: note = Synthetic
  variation 4914..4915: note = n is a, c, g, or t
  source 1..5864: mol_type = other DNA
aatttaaccggacactagtgatttttcctaataagaacaaatatgctcactatgtttacattgcacactgctactgtagaaaagttggaagaacctcgcgccatgcagcgcagagtgtcacttccacataattgcgtttgtccgacgttttggatgagagatttctcattgattctcgttcattttggcttctgagctgctcggttcttctcaaagatcgcgtaggaatggtctctacatcattcgatttaagttcattgggagaacaatgaaagccttgggaacagattctattcttgtaacccgctatattcgtaatttgcgcggcggttcgcagccaattctggctcaagcaagtgacggcttgctctatgtagtcaagtttacaaataacctccaaggtgccaacctgctcttcaatgagggcgccggaagcgagctttttcgcgcctgtgggctggctgttccgtcgtggaagccgctttttgtcggtgattctttcctcgaccaaaatcctgactgttggatgcagaccccggaaggacgtcttcggccggactcaggcttatgctttggctcccgcttcctcggcggagatggcattcgactattagaaatcctccccggaaccagcttcaatcgggttcgtaaccgcgaaaacttctggctggcatggatgatcgacatttgtgccaatcacgccgacaaccggcaagccatctttgttgaagatgctgagggctggctggaggcgcactttgtcgatcacggacacctcttcggtggtcccaaaggggaacaacgattgcacttccaggcatcccgctatcttgacccgcgcatctatcagtgtatatccttgcaacaacgtcgttactttcagacgattgcggggtctatagatgtggatcagctctggcggcggatacatgcactgccgagcgattggaagactgtggcggccctcaagagttttgcagaatgccttgacatgctctcaaatgccaagctcttgcggaatattcttgatacgatggcggatgcacttttacggacgggagaatttgaacgcaaccaacatcaagatggacgaaaaaccccaagggaagttttgtgccttggaatacaggccgaagggattgcgcagcggctcattgcaagccgagtcaattatcttgctcgtgcttgaggatggtgagggccatctgcgcttccttgtccacccggaattgcatacggttgttgcggacaatgacttgtcctatctcgaatcgttgctcaaagactttctcgaacgcgccatgcagcatcctgctgctctcttcaagcagctctcctcccttggagtcggaccactggtgacccaagaggtcggatcaaacatatccaatcacccactcctcttgattctgtgctcgcgctttgtgaagctttagcgcagtctgcggtcaatttcatcagttgttatctcctctgtaattcggcgtcttttctgctatgcaagaacagttaaagaatatgacggagggcgctacatcatctttatgaggacgagccaacatttgacgacatacagaggcttatcagtacaggagaagcgcattaggttaatcggcacaggaagactaggcgagctggctgctgcttgggctagccgaaagcgtaactcattgatatggggtaatctgcatacaagaacgccccgtctccggggcgttcaacggttacggatgaaccgataccgtacgacgaaagcttactgagaaacagccgggcaatcgccgctcatgtacactgcaataatttctacctctcccgaacggtgaagtcaagaggatgggaaaaaatgaatgaatcaggctccttggcgcaagactacgtcttgggtatcgaccttggatctgtctcgctagggtgggcggtgatcggcttagataagaccgacatgcccgtcgtgttactgcgagcgggtgttaggctctttgacccagcggtaaccggggacattgaaaaagggcaggatgagtccaatgccgtcgcccgccgggtggcccggcttctccgccggcaattgcgccgccgggcggcacgccaaagcgagctttttcgactgcttcaggggcacgctctcctccctccgtatgaaggaaacgaagcggacgcttcccaacagcgccatgctattctcaacgcattggacctggagattgcggcgaagtgggcaaagtcgggcggcgccggggcacaggcggcgattgatttaccgctttacatgttgaggaagacagcgcttgatgaggcactggaaccctatgaactaggtcgcgtcttctaccacctgagccagcgccgcggctatcggtcaaatcgtaaagagcaagcagaaaagaaggaggcggcgatcaaggggaagaaagacgatgaccttggcacggtagagagcggcatcaaggaattgggagaggcgatgcgctccttccgtaccctgggcgaatactatgcttccctcgatccgcacacgcataatgtgcgccgccgttggactagccgcaagatgtatgaagacgaattcgcagcaatctgggagaagcaggcagcacttcatcccacactgcttaccgaagagttgcaccgccagatcaaacacctgcttttctatcagcgccctattaaagcgcagtcgcacctcatcggaggctgcgaacttgaacccggcgagccccgcgccgcctgggccgcgctggaagcgcagcaattccgcgttctgcaacaggttaatgaacttgaagttatttcccccggtcgggtgaccgggatcccgctcacggcagaacagcggcagactgtactggaccttttggaaaactcctccgaaatcacatttaagaagattagcaaggcacttgggttagccgactacatcggcttcaatctgcaacgcggcggcgacaccaaactcaaaggcaacctgaccaacactcatatggctgaagttttcgccgagcgctggacagaaatgtctgaggaggaaaagaagcaggtcgtcgaggattggcggaccattgaccaagaagactcgctcattcgccgtgccatagaatactggaatctggatgaatcaagtgctaaatggctggcatcccggccggcgccgaatggatattgtatgtactcccgcaaatccattcgtaaactgttgccgctgatggctaccggagcgcgcttcagagctgcggaaaaggaagtctatggcatccggcttacaggcggtctggtttatgatagtattccgccggttcgcgacaccttgaagaccttgcgcaaccccgccgttgagcgcgccctcaccgaactgcgaaaggtggtcaacgcacttgttcgcgagtatggcaagccaacagaagtgcgtatcgaattggccaatgacttgaagaagccccgccatgagcgggcagaagcattcaaatataaacgcaaatgggaaaagcagcgaatcgataccaaggaaaagatgcttcgggaacttggtccaggattcgagtatccctcgcgcgccgacgtggagaaagctctgctgtgggaagagtgccagggtgagtgtccttacaccggtaagcgctttcccttttcctcgttatatggagagaatcctcctttacaggtcgagcacatcatcccatttagccgcatcccagacgattccttccagaacaagattctctgctatcacgaggataaccagcacaaggcaaatcggacgcccttcgaggcgtacacggaccccgcgcaatatgaaactattctcagtcgggttaggaactggcgcacgcccaaccccggcaagcagtgccgttttgaactgcgcacactggaggagttggagggattctcggaacgccaattgaacgacacccgctacgcctgcaagctagcctgtgaactcgtgggtacgctctacggtggacgcgatgaaaagaccgataccgactcgcggcaagtggtcttcgcctcctccggcatggtgacggcaacgctgcgcaagagttgggggctggaggcgattatgcgcgagaccgcgccctccgccaacggacagaatcacggcaagccgcgcaccgatcaccgccatcacgccattgatgccatcaccatcgccctcagccgtccgaagatgatcgcgactcttagccgcaacaacgcccaggactcttaccggccgagcaacggacacactgcgcctagaattcaaagtccgtgggaagactttgtcgactccatccgcccccacttcgagaagatgctcgtctcccatcggcccgatcacaggctcaccggcgcgctacacgatgagaccaattacggcaggccgcataaagaggaaggcaaggatgtggtgcatattcgcaaaccggttgaagggctgtctgccagggatataaataacatcgttgacccggcagtgcgcgaggccgtccgagcaaaggcggctcaattaggcggagacctgaagaagtggaccccgaaggaagggagaggcgattggccgcaattgggaaccaaaaacggcaaacagatccctgtcaagcgcgtgcgcattaagaaagcattgagcgtagagaccatcggcaaggacgaacgaacgcggcacgtggcgctttccagcaatcatcatgtagccatctttgctatgctcgacaagcgtggaattgaaaaacggtggaagtccatcattgtttctctctttgaagcgatggaccgtaagcgtaaagggcagccgatagttcagacatcctacccggaggcaggcgattacgttttcaagttctcgctaatgggtggcgatacggtgctattgcacaaggactgcgaccacaatcagaatccttgcaatccttcggtctggcgactgagatnnggtcagctctccctggtacggatcaatgatgcacgaccgaaatcggaaattatcaaggccaaagaatggtggtccccgattgaggatactctccgcgaactcgatgctgttaaagtggtgatcgactctcttggccgaatccatcaggctggaggataatccatgagcaaccgcattcttgagattgcgcatcctgcgtgcctcagcgttaaggatgcaactggtgatcaagcgggaagggttcattccctggattgcaccggtcagcaggataaacaccacgctgctggcacatccgcaatcatgctcgctcaggccgctgactcgttgcggtggctcgttgagggcataaccatgcgatattgggtgaattgggagaagtgggcgctctccgacatttctcctgtatggccggttcgccggccgcattgctggttggcagcgaggagaagcttgacctactcgtcaagtcggcggaaaaacggcgtgactacatgcgctttcacagggcccttctcaaagacgacatcatgatgctcccgttctcggtctgaccgcgcttcgtccccagcgaaatggccgctgaggctcatcgcaaataggttaaatcttgcattccgccgctgggataggtgtggttgttggcgattgcccaataccagttcgccctaaaggaggtattattttgggaaaaacatgacccccggaggatattccagagcaaattcctctatttaaaaagttggaactcctggaacctattttttgtcagtaggtcccaggcgtcctagtgtacatgagcggtgatacccggctatccccagctttcccgtccgaatatgtatacattgtacatgagcggtgatacgcggccatccccagtaccacttcttcggcgtccggtaccaatgttcctcgtccgatggccatccgccggagaccgccagag

SEQ ID NO: 2513 - DNA, 5496 bp, synthetic construct
  source 1..5496: mol_type = other DNA
  misc_feature 1..5496: note = Synthetic
agggctgctcgaccgcttcggctcgcgcggcagcacgtttgtctatctgccggatgtcccgtcggctcttgcggtatccgtaaccatgtccgtccgccttgcttcatggaatatccaatatggaatgcaccccatctttgagatgaacctgcccgagggcgcgcttcgggaacggctccgtcttgccttcgctaaagcgacagggacgtttgacgagttcgatctgctgggcatcgtcgggcgctctcaggtcggacgcttgcgttataccggccaaaaggaacagttacatgaggacgtgcctttccagtccgtcgatgagattctggagaaacgccgcgacggagacctgtttcgctatctcctcgacaagttcgcatctttctccggcatcagcggcgtacagccgaagatcatggtgcgcgatgaagttgcatcagttccgctcaacaagacagtgcatatgcattcccagagttatcgcggcgcaacccacatcgtgaagttctgggaacagaacgaatatcctcagcttgccgcgaatgaatacttctgtctcaaggttgcggagaaggcgggcttggaagtgccgtcctgccgtctcgccgaagacgcgctcgcgctcgtcatcgaccgcttcgacctgcggccagacgggacctatcgcggctttgaggatttttgcgtcctgaacgcccggcgcaccgacgagaagtatcgcggcagttatgagacctcagttatgaagcgtttcggcgagtttgccaactcgccgcacatcaccgaagacctagagcggctctttacgctgatcgtgatcaattgcgccttgcgcaatggcgatgcgcacttgaagaacttcggaatcgtctatgacgatgtcgaaggcgaggctagactggctcccgtttatgatcttgtgaccacggctgtctacctgcccaaggacagcatggcattgacgctcaacggttctacgaaatggcccgcaaacaaggaactgcggcgtctgggtgagacgcgtctcggcgcttccccggcacgtatcagggagattatggagcgtattggcgaagccattcgagacacttcgaaggaagtgcacgcgtacatcaaagaccatcgggagtttgaagaaattggcaacagtatgctccagcaatgggagtcaggtgcagcaacttctctcatataagttgtcgaaatataatggagcgataggtggcgaagacattggaaagcaatgtaaacgcggattgaaatggcttcagcaccttcgtcagccccctcaaatagtggtggctgttttgtataaacaggggctgtctatcgtttggacattccgttcaggacaaatgcgacaagagcgagaaccttgagtgggcactaaatagagaacgccccgtctccggggcgttcaaaggtcgctcatagagcggagccttacgacgaaagcttactaagaatagctgggcaatcaccgctcaagtacactgatatacttttatgtctctgaaaaacatttgtcaaggaattggttgaattttgtcatggaagagtaccggaaatatgttcttggccttgatcttggttcggcgtcgcttggctgggcgctgattactctggacaaatcggataatccaacctcgctggttcatgctggcgtgcgcatctttgaacctggcgtggatggaactgctatcgatattcaggagggaaaggaccaatcgaaggctgtcgaacgtcgaacggccagactacatcgccgccagttacgccgccgtgcttatcggcagtccaaactttttcagcttttgcagcaacactgcctgctgccacgtagcgaatcgcagataccactggcaccatcggcagagcgcgacgctgtgcttacggttcttgaccggcgtctttgtcagaagtggcaggcgtcgtctgtaggaaaagccttcgaagaacttcctctgtatcagcttcgtaaaatagctctcgacgacaagctggagccgtatgagcttggccgcgttctgtatcacttcagccagcgacgcgggttcaaatccaaccgcaaagaagggcgcaaagaatcggagaaggagctaggcgcggtcaaggcaagtatcgccgagctcacggtcaaaatgcaggaagcagatgttcgcactctcggagaatattttgctggactcgacccttgggaacagcgaatccgtggacggtggacctcgcgcaagatgtatgaggacgagttcgcaaagatctggaagaaacaggcaagctactatcccggcgaactcaccgaaaacctgcgccgcgaagtttcgtattggctcttctatcagaggcctattgccgcgcagtcgcaccttattggcaaatgcgagcttgaggggcctaaccatcgccgcgctgcttgggcgacactggaggcgcagcgattccgcattctgcaaaaggtgaatgacctgaagattatttttcctggcaatcctgatgctgtcacgctttctgcggagcaacgcaggcttgtctatgacctgctggaccacgagggcgatcagaccttcgccaacctgcgaaagcagttgaagctggataaaaaaatacagttcaatttggaacgcggcgacgaaaaaaggctgcgcggcaaccgcacgaataagacgatgcgttccgtcttcggagaacgctggaatactctttcaggcgaagaacaaaaacagattgtagaggactggcgcaccagcgaatcgcacgagtcgctggtgcgtcgcggcatggagtactggggactggatgaagccgccgcgcaggcatgggcagaagccaaaccagaggacgggcactgtgcgctttcgcgcaaggccatcaacaagctctacgaactcatgctggatggaatgagcttcaaagaagcggagacaaaggtgtacggcgaccgcttcagcggtggcgtggctttggataaactgccttctttgcatgtccaccgtaatatcaaaggttcaacgaaagcagagaagctgcttgccgatctgcgccttggagccgttcgcaatccggctgtagagcgggcgcttacagaactgagaaaggtcatcaatgcggccgttagcgagtacggcaaaccgtatgaaatccgagttgagctagctcgcgagttgaaaaagccgaggaaagaacgcgagacggcaaccaaacagaatcggacgcggcagaaagaacgcgagaaagctaaagcggatttactgatggagtgcggcattcagaatccgtcacgctctgatatcgagaaagtcttgctcttcgaagagtgcggaggaaaatgtccctacacaggaaagagttttacgctgcgagatttatttcaaaatgcgcagttcgatgtggagcacattgttccccttagccgttatcctgacgactcgtttcagaacaagactctctgctggcacgaggagaaccggaacatcaagcgcaacaaaacaccctttgaagcctacggtaaggacaccgagcgttgggaagagatgctgactcgtatcagggcgtggaggcccggaaatccaggcaagctgaagcggttcatgctgcgcagcgaggatgaactggaagagttcacggcccggcagatgaatgacactcgctatgccagtgtacttgcctgccgtctgctggaatcgctatacggcgggcgtgatgaggcaactgctaccggaacgcgacgccaggttatctatgcctccagtggtgctattacagccacgctacgccgtgcctgggggctggaagcgattctgcgcgaggccgccgcttccagcaacggcgaaagcaaaggcaagccgcgcacggatcaccggcatcatgccatcgatgccattgccatcgcattgtcccgtccgaacttcattcaagcgatggctcgttccgcatcccttgatccccggttcgagttggacagccggtcgtttcgcagaactccggctccgtggcccaattttgtcgataccatacgccctcatatcgagcagatgatcgtctctcaccggcccgagcacaagatgagcggcgccctgcacgaggaaaccaactatggaaggccctattcccacgacggaaaaacgacagtcaatgtccgcaaacctgttacaagcttgtcaaccggggatatcgaaaagatagtcgatccggcggttcagtttgccgtgcagcaaaaagctgcggagcttaacggtgacctgacgcagtgcgagacctcgcaaaactggcccgtcctttttgcgagcgatggcagacatatctcaatcaagcgcgtgcgtattcgcaaggtgatgaagcccactccaatcgcgtcagggaacagagaacgctttgttgccttatcgaatagccaccacacggccatcttcgctcttatgcaggatgagcgcgaagttgagtgggaaggagttcctgtttcactttatgaggctatggagcgcaaacgaaaaaaactagccgttattgataaaaagcatcctgacggagaccaatggcggtttaaattttctctcatgggcggagatacgattgaactgcaccgcgcttgtcatcactctgatggcatgtgctgtccggacatctatcgtatacgtacaattgccggcaatgggcaactgtccatggtcaagattacggacgctcgcctgattaaggacatcaagggagcaggcgaatggtggtcgccaagagcagatgccttgcgaaaactggattgccggaaggttgtagtcgacaccctgggaagggtacatatcgccaatgattgaccgcgttattgagattgctaatcctgcgcggctgagtgttcgcgatgcccagcttgtaattgaacggccacgggacgaacaactgtctctgccctttacgacgccggtcagcgaaatcgccgttctgctgctggcccatcctcaagtcacgctgtcgcaggcggtgctgtcgcgaatcgccgaggcaggcggctcagttgtcactatcgacagaaactttctgcctgtttccatgcaattacctgtacaagcccactttctgcaaacggaaagattcgcaaaacagatgcagctctcgctgcccagccgaaaacgtctctggcagcaaatcgtaagagccaagatttgcgcgcagggagagttgctgaaggaactctatgggaatgattccggactggttgccatgtctgcacaagttcggacaggcgatgctggcaatctggaagcgcaggcggcgcggcggtactggcctctggtttttggcgacttgaagtttaagcgtggagcagaaggaccggaccagaatcgtcttctcgattacggatacatcgtcttgcgagcggctgttgcgcgggcgctttgtgcggcaggcctgcatccttcgattggcttgaggcataagaaccgctacgatgctttctgtctggcagctgacgtaatggagccgttccgtcccgcggtcgaccgc

SEQ ID NO: 2514 - DNA, 5342 bp, synthetic construct
  source 1..5342: mol_type = other DNA
  misc_feature 1..5342: note = Synthetic
tgttggttgataacattgtttttctccttggtgtcccgttcgggagtggtttgtccttcaccaagcgcagcggacaaacccggacgaacgggcaccaaggcagaacgagggcagcggaggtgggaggctggaggcagagcgcggcaagtgccaaacgcgcatcatcgtttggcgcgcagacggcgctggcccgaacagactcaggcaggcccgctcagcgcggctttatgtgctgggccgtccaccatagcggcacgaagtggataaaaggcgcgcgaagcgctaccgaggggtttgcttaggtaggtggatttgtcactttcgagtgacttttgcgatataaacaagaacgccccgtctccggggcgttcaaaggtcgctcaatgagcggagccttacgacgaaagcttactaagaatagtcgggcaatcgccgctcaagtacactgctatacttttacacctatgtaagattttgcgtcaaggtggtgcttgatgttttctgctgcggaagaatcaccgaagtatgtcctgggcctcgatctcggctcggcatctctcgggtgggcgctcgtcgcgctaaatgagaccaataaccccacctccgtgatctgcactggcgtgcgtatctttgaaccgggtgtagatggaacagccctggagattcaggagggcaaggacaaatccaaagctgtcgagcgccgcacggcccggctgcaacgtcgtcaactgcgtagacgcgcataccgacaaggcaagcttttccagcttttacagcaacatggcctattgccacatgccgaatcctcgaaaccacttacgccatctgaagatcgcgatgccgtacttacggcgttcgaccagcagatatatcagaagtggcgcacctcatctcctgcattcgacttcgcgcaactgccgctctatcagcttcgcaaaatcgcgctcgaccacaaattagaaccttatgaacttggccgcactatatatcacttcagtcagcgccgtgggtttaagtccaatcgcaaagagggacgcaaggagtcagacaaggaattaggtgcggtcaagacaggtattgctgaacttgaaaaaaagatgaagaccgtagatgctcgaaccctcggagaatacttcgccggactcgatcctcaccaagttgggcaaaacgttcgcagacgatggacggcccgcaagatgtacgaggatgaattttctgagatatggaagaaccaggccaactattatcctgaacttctgaatcaaaacttgaggcgcgagatatcgcattggctcttctatcagaggccaattgccgcacagtcgcatctcatcgggaaatgtgaacttgaggggaacaatcatcgccgagctgcctgggccacattggaagcacagcggtttcgtattctgcaaaaagtaaatgatctcaaaataatttaccctggcaaccctgacgctcagccactcaccccggaagaacgcaagctcgtctttgacgttctggacagcgaaggcgatcagaccttcgccaaactgcggactcaactaaaactggacaagaagtccgagttcaatctggaacgcggcgacgaaaagagacttcgcggcaaccgcacaaacaaaacaatgatctctgtttttggtgagcaatggaatgctttttccgacgaggaacaaaagcaagttgtagaagactggcgcaccagcgagtccgaagactcattggtgcgccggggcatagaacattgggggcttgacgaaattgccgcacagaagtgggcagactccaaaccggaagatgggcactgcgcactctcgcgcagagcaatcagtcgactgctccctctcatgtttgacggcatgtctttcaaggaatcagaaacaaagatatatggcaaccgcttcagcggaggcgtggcgttggataaattgccacctttgcatgttcaccgaaagatcaacaactctgaagaagtggagaatctactcaccaaactacgcctggggtcgattcgtaatcctgctgtagaacggggacttactgaattgcggaaggttgtgaactcaattgtccgtgagtacgggaagccgtatgaaattcgagttgaacttgcacgcgaattgaagaagccaaggaaagagcgtgaatccgcaacgaaacaaaatcgcacacgacaaaaagagcgagagaaaacaaaggctaatttactacgagagtgtggcattcagaacccatcgcgtgcggatatagagaaagcgctgctgtatgaagaatgtggaggtatatgcccctatactggacgatccatttttctaagtaatctcttcggagagcaccctcaatttgatgtggaacacatcattcctctcagtcgttaccccgatgattcttttcagaataaaactctttgctggcatgaggaaaaccgaaatatcaaacgcaacaaaacaccgtttgaagcctatagcaaggacactgcccgctgggaagagatgcaggttcgcatcaaagcatggaagcaggggaatccaggaaaactcaagcgattcatgctgcggagtgaagatgaattggaagaattcacgacgcgccagatgaatgacacccgttacgccagcgtgcttgcatgtcgtttgcttgaatctctctatggtggccgtgacgaagctacccctattggaactcggcaggcaatttatgcttccagtggtgcagtcaccgccacattacgcagaatgtggggactcgaagcaatcctacgtgaagctattccatctaataatggtcagagcaaaggtaagccacgcacagaccacagacaccacgcaatcgatgccatcgctatcgcgttgactcgtcaacgtgccattcaggcaatggcgcgttcggcctcacttgatagaagattggaacaggatagccgagcttttcgtagcattccctccccctggcccaacttcattgaatccatccgtccacacattgaacatctgattgtttcgcaccgaccagagcacaaaatgagtggcgcattgcatgacgaaacgaattatggtcgcccatataagcacaatggaaaatcaacagtgaatgtgcgcaagcctgttacaggactatctgcaagtgacattgaaaagattgtagattcggctgttcaatctgctgtgcgacaaaaagcagcggaactcaatggtgacttgacgcagtgtgagtctgctcagaactggccctctttaccctccagtgatgggaaggtcattccaatcaagcgcgttcggattcgcaaagttatgactccaacgccaattgcatctggcccaagagaacgccaagtagctctcgccaataaccatcacgctgccatttttgccaaactggatggacacggcaaggaagttcgctgggatagtattcccgtttcactctacgaagcaatggagcgtaaacgaaagaaaatgaccgtcatacaacgggcctaccctgagttttccgagtaccagtttaagttttcattgatgaatggagatatcgtagaaattcttgaagaaggagtaccgctgctttatagattgcgcagcatcgagtcaaacggcgcattttttctcttatctattcgagatgccaggatggtgaaggaaattgttaccacgggtgatcgttggcgaccgtctgctgatgccttgcgtaaattgagctgtcgcaaagtcaacatcgacactttgggaagggtgcatccggccaatgattgatcgcataattgaaatcgccaatcctgcacggttgagcatccgcgatgctcaacttgtcattgaacgaacacagcaggaacaactttctcttccctttactaccccggtcagcgaaattgctgtcttgttactcgcacatccgcaaataacgctttcgcaggccgtactctcgcgcattgcagaggctggtggatcggtcgtgacgattgacggaaaattcctgccagcctccatgcaattacctgtacaagcacattttctgcaaacagaacgttttgccaaacaaatgcaactctcgctgccaaatcggaaacgcttctggcaacagattgtgagggcaaagattcgtgctcagggagaattattgaaggaactctatggcagtgatgccgggctgatcgccatgtctgcccgcgtccgatctgacgatgtcggaaatctggaagcacaggcagcacggcgatattggccgttagttttcgggaatcaaaaatttcgccgtggatcggaagagccaaaccagaatcgtcatctggactatggatatacggtgctgcgggcagcagtagcacgcggactttgtgctgttggcctgcacccctccatcggcctacggcacaagaaccgttatgacgctttctgcctcgccgcagatgtgatggaaccgtttcgcccactcattgatcgtcgtgtagtgcaatggattggcgaccacgaccctactgcgccactcgatcccactacaaagaactggattattagtgcgaccacagcacgctatctttgcgagcgggagcaacgttccctttttgacatagtgctgcggacagcaaactcactggcgcagtgcattactggagaagcgcgtgaaatcgagataccttccttgctcgaaccctgcgcggagatgctacctttgaagcgagaagtgcgtagtgtcaatgcgaagatccctgagcgggctattggataatacaattttatgaaaggactgctcctctctgcgtatcgttctgtgtggctcatggccatgttcgatttgccggtggagacatcggataataagcgtgattacgtgcgctttcgcaaagctctgctcaaagacggattcatgatgcttcagttttctatctatgcgcgttatattccgagtgaagaagctgcagaggcgcatcgaaggacaatccgatctgctatcccgccgctcgggcaagttcgcctgatggccgtaaccgatcatcagtttggaaaaatggaagtcttttatggaaaaaaaccgagagaacccgaagaagcgcctgaacagatactgcttttttgaaggtaatggccgcgccaacctgctatttttcagcaagttcgacgcggcctagtgtacttgagcggtgaatcccggccatccccagccaacgtcaagaagggcgaaaaagcaatccgagtgtacttgagcggtgaatcccggccatccccagccagctacccgatcatgcagcacactcaagagtgtacttgagcggtgaatcccggccatccccagcaaactcaaatgggtgtcgatgggcgcatgaagtgtacttgagcggtgaatcc

SEQ ID NO: 2515 - DNA, 23078 bp, synthetic construct
  source 1..23078: mol_type = other DNA
  misc_feature 1..23078: note = Synthetic
cccgcgcactgtggaagcactggatgtcgacgccctcgagctgtttacgcaggagctggccgaccatcttgcgcgtggcatccgagccgtccacgagcatgatttttcgtggcgctgccataggcggtggtattcccgttggtgtgtcttgcgtgactgttcttgtcgttatggcgccattgtacgggcagcgggccgccggacccaaggggtgggccgggattctgtgaacccggcccctggcgggccgtggaagacggccgactagcgcggctcgatgtcgctcaggtggcggctgacggccagccaggaaccgcccaggccgagcgccatggcgatcagcagtacgctgccggcattggccgcaccgaggtccatcagctggaactgcccgccgtagaggccggccagccggtgtaccggttcggccagaaagcccagcgcggcctgcaccatgatcaggccgagcagccccccgatcaggccgtaccagatgccgccgtagaggaaggggcggcggatgaaggcgtcggtggcgccgatgagcttggccacctcgatctcgtcgcggcggttctggatgtccaggcggatggtgttgcccaccaccagcagcaccgccagccccagcatgatgccgatcaccagcacgccgcgctgggcggtctgcatgatggcatagagccgctgcacccactgcatgtcgagctgggcgcgctccacgccctgctcctgctccagcgcgtgcaccagctgctggatgcgcagcgggtccttcacggccaggcccggctgcaccaccaccacggccggcagcgggttgtcgttgagggcgtcgagcgcggcgccgaagcccgacagctcgcggaattccgccagggcctcggccttgccgatggcgcgggcgttgcccacgtcgtcgcggcgctggatcgtgttcgccagcgcgatggcctgctcgtcgctcaccgactgttcgaggaacagcgagatctgcgcgctctcgtcccagccgccgctgatggcctcgaggttggcgagcatgaggtagagcccggtcggcagggccagggcgataccgatcacggccgtggtcatgaggctggagagcggcgtgcggtagagcttgcccaggctgaagatcagcgaacgggcatgactgatgagccaggcggtggtgcgggcgtggacgtcgggccgcttctggctggtgcgtgcgttcatgccacggccccccgcgccggctcgtcggccagcagccggccgcccttgagcgagatcatgcgcttgcccatgggcgcgatcaggtcgagatcgtggctcgccaccagcacggtggtgcccacctggttgaactcctcgaacagccccatgatctcgcgcgagagctcggggtcgaggttgccggtgggttcgtccgccagcaggatggccgggcggttgaccacggcgcgggcgatgcccacgcgctgctgctccccggtggacagcgtcaccgggaaggccttttccttgtgcagcaggctcaccttgtcgagcgcggcgcgcacgcgccggccgatctcctgctggcggtagccggcgatgatcagcggcagggccacgttgtcgaacacgctgcggtcgtgcagcaggtggtggtcctggaagatgatgccgatgtcgcgccgaaactgcgggatgcgacggcggggcagggtgtgcaggttcttgccgttcaccacgatgtgcccgcgggtggggcgctcgatcatggcgatgagcttgagcagggtgctcttgccggcgcccgagtgaccggtgaggaacgccatctcgccgtccccgacctccagggtcatctgtccgagggcctcctggccggtggggtagcgcttggtgacgttctggaagaggatcatgtcggtatcagtcgcgggccagcagggcgtcgacgaaggcggcggcctcgaagacctgcaggtcctcgatggactcgcccacgccgatgaagcggatcgggatgccgagctgctgcgccagggcgaagaggatgccgcccttggcggtgccgtcgagcttggtgacggttaggccgctgagcttcaccgcctcgttgaactggcgggcctggttgagcgcgttctggccggtgccgccatccaccaccagcagggtctcgtgcggggcctccgggtcgagcttggtcatcacgcgggtgaccttcttcagctcctccatgaggttcgactgggtgtgcaggcggccggcggtgtcggcgatgagcacgtcgatgccgcgggccttcgccgcctgcagggcgtcgaagatcaccgaggccgagtcggcccccgtgccctgggcgatgaccgggatgttgttgcgctcgccccagacctcgagctgctcgacggcggcggcgcggaaggtgtcgccggccgccagcatcaccgacctgccctcgccctgcaggcgcttggcgagcttgccgatggtggtggtcttgccggcgccgttcacgcccaccaccaggatcacgaagggcgtgcgcgtcgcgtcgatcgcgagcggctggctcaccggttcgaggatggcggtcatgtcgtccttcagcgcggagaacagggcgtcggcatcggccagctgcttgcgcgccacgcgggcggtgaggtccttgatgatgcgctgcgtggcctccatgccgacgtcggccatcagcagccggtcttccagttcttccaggagctcgtcgtcgatctccttacggccgagcaccagcgaggccatgccctcggtcagaccgcgccccgtcttggacaaaccctgcttcaggcgtgagaataggcccggctttttcggggcctccccggcggtttccggggtcttgtcgcgttttccgaaaccaaacatgcgtcagtcagtctaccagtgacgtggcgcgccagcggtggcgcggccaggccgtacaatgatgaggtggtgccggcgcgggttgcgcgcggtccggggccacccaatgctatcaccccagcctgtaaggtgaaatcgaacatgccaacaaaagccctgcgccgtgcgctgctgctcttttgcctgctggtcccgctcctggccgttgccggggccgaccggccggcgggcggcgagacccacgaattcatgctgaaaaacggcatgaaggtggtggtgaaggaggatcaccgcgcccccgtggtggtgcagcaggtctggtacaaggtcggctcgtcctacgagtacggcggcatcaccggcgtctcccacgtgctcgagcacatgatgttcaagggcaccagccgctaccccaacggcaccttctccgaggtcatcgccgagctgggcgggcgcgagaacgccttcaccagccgcgactacacggcctactaccaggtgctggccgccgaccggctggagaccgccatgcgcctggaggccgaccgcatgcgcaacctgctcctgcaggaggacgacttccagcgcgagcgcgccgtggtgcaggaggagcgtcggctgcgcaccgaggacaaccccagcgcgctcacctacgagcagttcctcgccaccgcctggctcaacagcccctacggcaatcccgtgatcggctggatgcaggacctggagagcctcaccctggacgacctcgagcactggtacgaccgctggtacgcccccaacaacgccaccctggtggtggtgggcgacgtcgaccccgacgaggtgcatcgcctggcgcggcgctactacggcggcatccgcagccgcgacgtcgcgccgcccaagccgcgtcacgaggtggcgcagatcggcgagcgtcgcatcacggtgaaggccccggccgagctgccctacgtgatcctgggctacaaggtgccgacggtgcccaccgccgaaagcgactgggagccctatgctctggaggtgctggccggcatcctggatggcggcgcgagcgcgcgcctgagtcgcgagctggtgcgcgggcgcgagatcgcggccagtgcgggggccggctacaacggcccgaccagccgcctggacggcctgttcctgctcgacggcacgccggctcccgggcagacggccgccgccatcgaggcggccctgcgcgagcaggtccgggccctgcgcgaggcgccggtcaccgccgaggagctggagcgggtgaaggcccaggtcgtggcccaggaggtctaccagcgcgactccattcagcaccaggccatggtcatcggcacgctggagacggtgggcctggactggcgcatggccgagggctatgccgaacgcatccgcgccgtcaccgccgagcaggtgcaggccgtggcccgcaagtatctcctcgacgagtgcctcaccgtggcccatctcgatccccagcccatcgacccggccaacccgccgcgccagggcggcggcgacctgcactgatacccgaggattccccgtctatgccgcgattcatcgtattgctgctggccctggtcgccctgcccctgcaggcggcgcccgagatccagcactggaccaccgacaacgggctgcgcgtgtactacgtgcaggcccccgaactgcccatgacggacctgcgcctggtgttcgatgccggcagcgcacgcgacggcgcgcagccggggctcgcccagctgaccaacggcctgctcgacagcggcgcgggcgagtgggacgccgacgccatcgccgagcgcttcgaggccgtgggcgcccagtacggcgccggcgcggcccgcgacatggcctgggtgtcgctgcgcagcctgagcgagcccgactggttcgagccggcctttacgactttcctcgccgtggtgggccagccccgcttcgccgcggccgacttcgagcgcacccgccgccaggccttcgtcgccctgcaggcccaggcccaggacccgggcgagatcgcgagcaaggccctgtacgcggccctgtacggcgaccatccctacgcccatccgccgctcggcacccgcgagtcgctggaggccctgcgccgcacggacctggccgccttccacgcgcgccactacgtggcccgcaacggcgtgctcgccatcgtcggcgacctcgaccgcgcggcggccgaggccctggccgcacgggtgagcgcggccctgccggccggcgagccggccccggccctgccgccggtgccggcgctggaggagccccgcaccctgcgcatccccttcccctcggagcaggcccacgtctacctgggcgcgcccggcatgcgccgcggcgaccccgactacttcgccctctacctcggcaaccacgtactcggcggctccggcttcacctcgcggctgatgaaggaggtgcgcgtggcgcgcggcctgtcctacagcgtgtacagctacttcctgcccatggccatggaagggcccttcctcaccggcctgcagacccgcgtggaccaggccggggaggccgtgaccgtggcccgcgacacgctggcgaccttcgtcgccgaggggccgagcgcggaggaataccgtgccgcgctggccaacatcaccggcggcttcccgctgcgcgtggcgagcaaccgcgacatcgtgcagtacctcgccatgatcggcttctacggcctgccgctggactacctcgaccgcttcaccgaccgcgtcgaggccgtgggcattgcggacatccgcgacgccttcgcccgccggctcgaccccgagcgcatgatcacggtcatcgtcggtggcccggaagccgagtaggcccgccgcccggcgtgccccgcgcgccggcgcccccggccgcctgcgcatcatcggcggcgagtggcgcggccggcgcctgccggtgccccacgccccgggcctgcggcccacgcccgaccgggtgcgcgagaccctgttcaactggctgcagggcgtgaccgagggcgcacgatgcctggacctcttcgccggcagcggcgcgctcggcttcgaggccgcctcgcgcggggcgcgcgaggtcgtgctcgtcgagcaggacgcacgcatcgcggcccagctgcgcgagcaggccgccgccctcgatcccgcccgcctgcgcgtcgaggcccgcagcgtgcgggcctttctttccggcgcaccgcaaccggtcgacctcgtcttcctcgaccccccctacggcaagggcctggtggccgagaccctggccctgctcgaacagggctggctggccccgggcgcccacgtctacatcgaggccgaggccgggctcggcgccccgccgctgcccgcgggctggagcctcctcaagacccgtgaggcggggcaggtgggttatcacctggcccgcgcccccgttgcagaggcgctcagccccggttcagacgcctgagctagcctgtccccgacgtgtgtcgaacggcgccccggggtgggcgcccacaggggagacggggacatgatttccatgcatcgaatcggactgctgctgggcgggctgctggccctcgcgcagcttgccggctgcgccacgctcaacgaggccgagtgccgtagcgccgactggcaggccatcggctacgaggacggcgtcgccggccgcccggcgacgcgccttgccgcgcaccgcaaggcctgcgcgaagcacgacgtgcagcccgacctggccgcctacacggccgggcgcgacgccggcttgcagcgctactgccagccgcacagcggctactgggccggtctcgagggcgccgcctaccacggcgtctgcccggccccgctgcgcgacgccttcctgccggcctacgcctacgggcgcgagatccatgtgctggaggcggacgcccgcggcgagcagggcgcgctcgaccggctgtaccgggaggcgcaggacctcgacgagcgcatcgcccatcacgaggccctgctcatcgccccgggcctgcgcccgcacgagcgcgcggacatcctcatcgagatcaagtcgctggtgcgcaaccagcgggccatcgaggcggacatggcctaccacgccgagcgggtcgaggcgctgcactaccaggcggcggagctacgggcccgcagcccctactgagaccctgcccggggccgcgccgggcgccccggtgcatcgcccgggccgacaacccgtgcttgcagcccgccccccgggccggaatactaggcgccatgaatatcaccgccgtctatcccgggaccttcgaccccatcacccgcggccacaccgacctggtgcggcgcgccgcgggcctgttcgaccgcgtgatcgtgggcgtggccgccagcgccaagaagacccccttcttcccgctggccgagcgcatcggcctggcggaacagtcgctgggcgggctgtccaacgtggaggtcatcggcttcgacggcctgctggtgaacttcgtgcggtcccagggggcgaaggtggtgctgcgcggcctgcgcgcggtctccgacttcgagtacgagttccagctcgccggcatgaaccgccacctcgcgcccgacctcgagaccctgttcctcaccccggccgaggagtacgcctatgtgtcctcaagcctggtgcgggaaattgcatccctgggcggcgatgtatcacacttcgtcgacgcccacgtcgaggctgcactccgggcgcggatcatttagaatttcaggcattgctaatttacgaaccaaggtgacgctatggccctgctgatcactgacgaatgcatcaactgcgacgtgtgcgagccggagtgcccgaacggcgcgatcaccccgggtgacgagatctacgagatcgaccccaacctctgcaccgagtgcgtcggccactacgacgagccccagtgcatcgaggtctgccccgtcgactgcatcctggtcgacccggaacacgaagagacccgcgaccagctgcaggccaagtacgaaaagctcaccagcgcctgatgccggtagatatgtacgcgcagcaacagaacacgaaaaggccccgtcacggggccttttcgctttcacgccgcctgcttcgcgggctcgccctctgcctggtcctgttcagcctcgccgcacaggcggcggacggcccgggccgcgcggccattgccagcgcacacccggcggccaccgcggccgggcacgagatcctggaggccggcggcaacgccttcgatgccgccgtggccgtgagcgccgcgctcgccgtggtcgagccctacagctccggcatcggcggaggcgggttctggctcatccaccgcgccgaggacgatttcaccaccatgatcgacggtcgcgagcgcgccccgctcgccgcccaccgcgacatgtacctggacgccaggggcgaggtgatcccgcaggcctcggtggacggcccgctggccgccggcatcccgggcgagcgcggcgggctcgcccacctggccgggacctacggcaagctcccgttgagccaaagtctcgccccggcgatccgcctggccgaggagggcttcgcggtcgacgcccactaccggcgcatggccggcttccgcctcgaggccctgcgcgcctcggcggacgccacccggctcttcctgcgcggtgccaacgtgcccgaggaaggcaccgtcatccgccagctcgagctcgccgccaccctgcgcgtcttggccgagaagggccgcgacggcttctacaagggcgaggtcgcggaaagactcgtcaacggcgtgcgcgccggcggcggcatctggtcgctcgaggacctggccgaatacgagatcgtcgagcgcacacccatccacggcgagtaccgcggcatcaccgtcaccgccgccgccccgccgtcctccggcggtgtggtgctggtcgaggcgctgaacatcctcgaaggctttgatctggccgccatggacgaggccacccgcacccacgtcatcgtcgaggccatgcgccgcgcctaccgcgaccgcgccgaatacctgggcgaccccgactacgtggacatgcccctgagccgcctcacccacccgcagtacgccgccggcctgcgcgccggcatccggctggatcgcaccacccccagcgccctgctgcccggcgtggtggacaccacgcccaagggcaacgacaccacccacttctctatcatcgaccaggacggcaaccgcgtctccgccacgctctccatcaactacccgtttggtagtgcgtgggtggtgcccggcaccggcgtgctgctgaatgatgagatggacgacttctccgccaagcccggcgtgcccaacgtctacggcctggtcggcgcggaggccaacgccatcgaacccggcaagcgcatgctctccagcatgaccccaactttcctcgatgacggcgaacgcatcgccgtggtcggcacccccggcggcagccgcatcatctccatggtgctgctcgccgcgctggagttcagcgagggcagggatgccagggccatggtcgagcgccgccgcttccaccaccagttcctgccagacgccatccagttcgaaccgctggccttcgacgatgcactgcagctggagctgcagtcgcgcgggcatgagttgcagccgctggatgcctcctacggcaacatgcacgtggtgatctgggaccgggagcagcagcgggtggaggctgcgtcggatgggcgaggggttgggaaggccgaagtgcgctgagtgtcaaacttgatgatgccccggattccggggcatcatcgtttcgggcgtcacgaaagggatggccttcttgtttttcggtgtgaaaataaaaaacggccccgctgggaggccgttggtcaccgttaccggtggtgcctgcgagaaattcatctcttggtatgaaaagaactctcaggcttcagtcggttacgctcaatgaaaacctagcatatgaataatcgccggacaagattaacgcgcaaatagggtggcagaatatttcccgtccgccgcctggacgcgactagcgaatagtcgaccataaggagagccactttgcagactgcaaactacattatgggcctggatcttggcaccaactccataggctgggcgctgttatcgctggacggcgacggcaaacctgctggatacctagacggcggggttcgcattttccctcgtgccgtggaggataaaaccccgacacccaagaacgcaaagcggcgcggcaagcgactggcgcggcgcttgatcgagcgtcgtgcgcgccgtcgtcagcggctggagaacttcctcatcaagaaggacttgttgccggaagccgttcgcgattccgcccaaagggagaaggtgctcaacacattgggggatccctaccaactacgggccaaggcgcttgatgacgacttggccaagcatgaactaggccggattttgttgcatctagcgcagaggcgtgggtttcagagcaaccgaaagacgctactcaaggaattgatcgacgatccggacgccgccgatctgatcgaagagttggaccaggacgaaaagggcgacctcgatgctgaagaaagcgccttcaagcattcgattgcccagctggcccaggccatccaccgggccaacaagcggactctcggtgagtatctggcttccctggatggtgatacctgccgacgcaaccgcaaacacgtccccgaggacctgcgcacctcacggcagatgtaccgggaagagttcgcccttatccgggaacgccaagcggcgccattcgccgaggtattgagcgacgcggattgggaccagatcgaacacatcattttctaccaacgcccgctgcgcttccgggccgaccggctcggcaagtgcgagttcgagccgaaatacaaccgggcgcaccgcgcccggctcgagttccagcgttttcgctatctgcaagacatcaacaacctgcaatattttgagggccatgtcggcggctatctgcggctgtccgatgaacagcgcagcaagctgatcaacgcattagaacatgcgccggaactgagttgggccaaggcaagaaaggcggtagggctggaccgcacccagaagttcaatctggagaacagcgaggtcaagaagctgtctggtaatcgcaccgcctgcgccatccgcagggtgatcggcgaggcctgggatcacatgcccccggggcagcagtccctgctcgtcgacgatctgatcaccataaagaacaaaaagaccctcaagaacaggctcgtcaaccattggcagttccccaccaccgacgcggtgcgcctcgctgtactggaactggaagccgaccacggcagtttgtccctcaaggcgatgcggcgcatcctgccgcatctagaggcggggaaaatctataccgatgcgctccaggcggcgggctatcgcatgcgggcacaaaaggtggcgcaagacgatatcgtcgactatctcgccacgccaccggaaacccgcaacccagtggtcaacaaggcgctgcatgaattgcgcaagctggtcaacgctatcatacgccggcacggcaaaccggcggccattcgtctggaaatggctcgtgagctgaagatgaaccgcaggcagctcgccgcctacaacaaacaacaagccgccaataccaaggccaacgacgaggctcgggagcacttccaggccatccatgccggccaacgcgccaagcgggacgatcagatcaagtaccgcctgtggaaagatcaggacggctgttgcgcctactcgggcaggcctattagcaagaccgagctcttcagcgatgcggtggagatggatcacatcctgccgtacagccagtcactggacgactcctacatcaacaaagtgatctgtctggccggtgagaaccgcagcaagggcaatcgcaccccctggcaggccttctccggcgacgcacaacgctgggagcagatcgtgcagcgcagcaagtcctgggcggataaggggcgcgccctcaaggccaaggccgaccgcatgctgcgacaaggggatctggagggcctggacgatttcatcaacagccagctcaccgatacccgctacatcagccgggtggcgctgggctatctgaaaccactgggcaccgacgtgtccgtggtgaagggtcagatcaccgcctggctgcggcatatctggggcctgcatcaaatcctgggcagcgccgacgagaagaaccgcaccgatcaccgccaccatctgatcgacgcggcggtggtggccctgacggaccggcgcctctaccacggcatggcgaaactggcgcagcgggccgatgtgcatggccccgacgatatccatatcgacccgccgtgggccagctttgcacaggataccgatgcattggtgaaaaagaccatcgtgtcccacgtgccagcctggcgcctacggggcgcgctgcacgaggacaccgcctccggggtgctggtggagaaggacggcaaggtccataccgtgtaccgcaagttgctcgacggcagcatcaagaaaaaggacatcgacgctatcatcgacccgaccgtgcaacaggcagtacgcgcccatctggacaaacatcagggtgacagcaaggcagcgttcactccggacaatccggtgttacaccccaatggctctcgcatacggcgcgtcagggtaaagcgggccagcttccgcaacctggatgccctggcggaggagcagttgccggtgcgcgacaaaaacgaacggcccttccgctacatggtttacggcaacacccatcacgtggaggttttccgtgacatacaaagcccgcgcatcaaaacccgcttcgtcaccatgctggaggcggcgcagcgggcgcggcaggtcaatggcgtgaaacagccgattctggacacccacctggacgataaacatgcctacgtcaccgccttggctataaatgatatggtgaaactcaaggatggcagggtttatcgcatccagaaactggagaaggactctgggcgcgccacactacgattacattctgacgccacgacggaaagcggtgatagggttgtgcgcaagtcaattagcgcactactcaatgaaatgggcctagagaaactcgcaatcaatcgcatggggcatatcatgccgtgatcaagcgcaccatcgaaatcagcaatccagcctggctgaaggtaaagcacggccagcttttggtggaacgggacaacgaggtgattgcctccgtgccgttcgaggacatcggcatgctgatcgcggaccaccccgccgtgaccatgacccaggcggtattgcaacactgcgcccaacacaacaccgcgctggtgagctgcgacgagcgccataccccggccctgctggccttgcccatcagcggccacaccttgcacggcaaggtgctgcgcgcccaggtcgctgtcaagcccactttcaagaaacggctctggcagcaggttgtgcggggcaagctaaccaatcaggggtggctgctagaagaactgaagagcagtgccacacagcggctgaaacagttgacctccaaggtcaaaccgggtgacccggacaacgtggaggcccaggcctgcaaatactactggcccgcattgttcggcaaacaattccggcgtgaccgggatcaaaccggcatcaaccaactgctcaattacggctatgccatcgctcgcgcaatgaccgcccgcgccgtggtcgccagtggcctgcaccccgccctgggcctgcaccatcacaaccagtacaacgcctatgccctggcggatgacctcatggaaccgattcggccactggtggatgcccaggtggtggaactggcccggcgggacatcatagaaatcaatcaggacagcaaacaggccttgctgggcctgatggcccagccggtgcgactgggggatgacaagatgccgctcatgaacgccacgcaacgctgcgtgcagcagttctgcgaggcgctgcagcgaggcacgctgaaggccggctggtgctttccttgcgccctggagccatgattgtctttggagggctgcggaccgtgtgggtattggtaatgttcgacctgccaacggacaatgccgaggcacgccgacactacaccaagttccggcaggccctgctggaagatggcttcctgatgatgcagtattcagtctatgcgcgtcattgtgccagcgacgagaatgccgacgtccatgtcaaacgcgtcaaacaggccctgcccccggacggtgaaattcgggtcgcaaggatcaccgacaaacagttcgcccgcatggagctgttctatggcaagtgccgccggccgatggacgccccgccagatcagctcatcctgctctaattcctttctattcagtgacttgcctcagaaggagtgtaaccgactgaagcctgaggcctaatcacaacaacacgacgatttgttccccgcgttctgtgagtgtaaccgactgaagcctgaggcctaatcacaacctgctggctaggcggggcgggggtttcggtagtgtaaccgactgaagcctgaggcctaatcacaacgctcatgccacactcctttcgcgatccgcaagtgtaaccgactgaagcctgaggcctaatcacaaccccagacctacagcgaagccgtgcgccaggagtgtaaccgactgaagcctgaggcctaatcacaaccgcgccttcgagagcgtggccaacgactacagtgtaaccgactgaagcctgaggcctaatcacaactcgccgctgctgctggtcgcatccttgccaagtgtaaccgactgaagcctgaggcctaatcacaacacgccgcacccagcgcctcctcgtgctcgtagtgtaaccgactgaagcctgaggcctaatcacaacgggccgacatcagagaacatcgccttatgcagtgtaaccgactgaagcctgaggcctaatcacaacggcagtggccgacatcgacatggacaacttagtgtaaccgactgaagcctgaggcctaatcacaactggcgcggtcggtaaaaccggcgttctcggagtgtaaccgactgaagcctgaggcctaatcacaactgacacggtgccgaggatgttgctctgctgagtgtaaccgactgaagcctgaggcctaatcacaaccctcagcgcccgctcgcccgtgcagcgcctagtgtaaccgactgaagcctgaggcctaatcacaacgcgctggggtccgtggccctgaccgccaatagtgtaaccgactgaagcctgaggcctaatcacaactccctgcgcctggtaggcgtcggtgccggtagtgtaaccgactgaagcctgaggcctaatcacaacagccattcgagggcggcgaggaaggggtcaagtgtaaccgactgaagcctgaggcctaatcacaacgctggcgtgcatcgtctcgttgttcgcgggagtgtaaccgactgaagcctgaggcctaatcacaactaacgtcgcttggtggtgcggatgaccgacagtgtaaccgactgaagcctgaggcctaatcacaacgcacaaggccgaatcaaagagccaggaaaaagtgtaaccgactgaagcctgaggcctaatcacaaccttcgccaggtccaaccgcctgcgctcgatagtgtaaccgactgaagcctgaggcctaatcacaacttgcttggtgacggttgtctgcgcgggacgagtgtaaccgactgaagcctgaggcctaatcacaaccgcggcggcgcccgggcactggccaacacagtgtaaccgactgaagcctgaggcctaatcacaacgtgttcttcgaggcgaggaagcgatagcggagtgtaaccgactgaagcctgaggcctaatcacaactgaagaggccccgcggcagcggggtcttgtagtgtaaccgactgaagcctgaggcctaatcacaacacgccaaacgatgacgcgctcacccaggtgagtgtaaccgactgaagcctgaggcctaatcacaacgcggcaagcagctcaacatccagcgccaggagtgtaaccgactgaagcctgaggcctaatcacaactgagctgtggggcgagagcaagggcctggaagtgtaaccgactgaagcctgaggcctaatcacaacgtacgaggagggcgcgagcgatagcggaatagtgtaaccgactgaagcctgaggcctaatcacaactgatccgcgtgcatgccggcggtccggtgtagtgtaaccgactgaagcctgaggcctaatcacaactttcgacctggatccgtgcgcgccagtgtcagtgtaaccgactgaagcctgaggcctaatcacaacgctgctctagtcggggtggttgtaacacccagtgtaaccgactgaagcctgaggcctaatcacaactggcacaggcccatgtgcaggccgacgaagagtgtaaccgactgaagcctgaggcctaatcacaacttcctcgtccttgagcgcttcgagagtatcagtgtaaccgactgaagcctgaggcctaatcacaacctgtggtggtggccaacgtcaacgaccctcagtgtaaccgactgaagcctgaggcctaatcacaactgcagtacgtcaatccgtccttgctgcactagtgtaaccgactgaagcctgaggcctaatcacaacttgtacgcgccgcggtagtcgatggcgccgagtgtaaccgactgaagcctgaggcctaatcacaactggtttaccgccacgtccaccgggcggccgagtgtaaccgactgaagcctgaggcctaatcacaacaatggcagcagtaatcgccgccggggggtagtgtaaccgactgaagcctgaggcctaatcacaacccttccgagtggcatatttacctcgttctcagtgtaaccgactgaagcctgaggcctaatcacaacagcaaggccactcgcccgatctactgcgacagtgtaaccgactgaagcctgaggcctaatcacaacgcgcggcggtcaacttcgctgccagcttctagtgtaaccgactgaagcctgaggcctaatcacaacccattggtggagcaggtggtcggggttggcagtgtaaccgactgaagcctgaggcctaatcacaaccgaacatacgcagactgcaccaccaggtttagtgtaaccgactgaagcctgaggcctaatcacaacgcgcttctcgtgaccgagcaggcgctggatagtgtaaccgactgaagcctgaggcctaatcacaacatgaaagagacttcccacatataagctctcagtgtaaccgactgaagcctgaggcctaatcacaacaattgaccgcgtcgactcgatcgagtctgaagtgtaaccgactgaagcctgaggcctaatcacaacatgtcagcgatggccttcaacgtgagtaatagtgtaaccgactgaagcctgaggcctaatcacaacggatggaacggtccacgaagaagaatcggaagtgaccgccgcctggccggggtcggaccaagctaaggctctgagtaatcgataaaaaggccttgtattggccttgaaatcagtcttagaggctcatttttgtccttgaaacgcgcgctctaagcttcgagccgaaccggggtcgcctcaatctgcccccttttccatttctctcatccatgttcctttcctggttcctgcgcaagtcgctctcctgccatacgcggcttgggctgttggcgtgctctcccttgatgggggatgtacccagcagttcacccgctggtctgttatttgcaagtctgccggtaagttccgctgtggccagttgtgccgcggggcagaaggaagccggcacgggcggttccgtgggttgtggctggcagtcggaggcttcgtgcgagatccatagctgcccatgcaggagtgttctgaatgtttttggtgcacgagacgcctcagtctgggcggccgtgcatcatgcccggcgtcgagccgtccactttactaacgaggcgtcgatctggacactgcgagcgatgacatgaccaggcttggacgtatcaaggcgatctggcgctacccggtgaaggggatggcgggtgagtcgttgggcacggcgcatctggacgcacgcggtgtgcagggcgatcgcctgtgggccgtgcaggacctgaagcgccaggagatacagagttgcaagttccggccgtcgctgctgcagtgccgggctcgctgtataggcgatgggtcgggtctgggacttggtgcggtcgaggtgcagttccccggtggcgaggtgctggcgggcgacgatccgggcattcatcagcggatctcggcactgttgggacacgacagtgccttgcggtcgttgaggccgatcgagcacgaggcgttctatcgccgttacaaggccgacgcccacacctggctgaaagagttgaaggccacgttcgagcgcgaggccggggaaccgccgctgccggacctcgataacctgccgcaagccatgcaggactacgtcaccctcccgggtaccttcttcctggtctcgccgtttcatatcctcaccaccgcgagcctggcgcacatgcaggcgctacacccgcagtcggactgggacatcgagcgctttcgccccaaccttgtgatcgagaccctgccggggatggaggggctggtggagcaggcctggctgggccggcgtctgagggtcgggtccgcgcaggttgattgcagtgatacggccccgcgttgcggcgcggtgacgcgccaacagtccgcgatcggtgaggacaagggcatcctgcgacgcatcgtgaaagacgccgaccagaacctggggatttacgcggatatcgtcacggcgggcgagatcggcgtgggtgatgaggtgttcatggcgtaaccgtcgcctggaccagtcggggagctcaggccccggactccccgttcacttagggtgagtccggctggtgttatggtgttctagccgggggcagccacggttcacgtgtgattcgaatgcaccaccttgtccagcgtgtcggtgacgaaggcattcaggctcttgccggatctcgcggcggccgcgaccaggtcgcgatgcaactccggattgctgcgcaccatgaatttccccgagaagggcttgtccggtgcctcgccgcgttcggcgcagaaggccaggtagtcatcgatcgaatctgcgaatgcctgctgcaggtcgtggatggaatccgcctggaacgtaatgacgtcgcgggtattgatcacctcgccatgaatcaactcggcttcggcgtcgatctcgagtttggcgatgtagcctttgtattcgaggatcatgtttcccccggtcctccgtctctatctatctcttgatgtctatgccggcgttttcgagaaaccgccgcatggatttcaccgcgcctttgtcggtttccttctccgggtgtgggcgatggaagaccgcccgcacgccgttgagcgcaatccggacgcgggagccccgcccctcgctgatttcggcaccaagggccttgagcatggactcgatgtctgtccagacgatgttcgactggaccgggtccgtgaatatcgcttccagggtgctctggtgcctgcggttcatgtcagaatggtatcagtatttgatactatttcaagcaaaggttccccgctctgggccggctggggtcggaccaggccaagtctctgattaatcggccaaaaggctttatgtcggctttgtactccgcatccattcctcgtggatacgctcgctccatttcgcggcaaacaaccccgtcgtggccaggcaccaggaaatcccgcagcggcgcgggatagagcacacaggcgtcatagaccacgacgaatcgcatcagtaccccatgtccagttcctgcgcctgcctggccagttcctccatggcctccttgctctggcggtcgcgctcggccttgtaggcgatcaggtcttcgtagcggatgcggcgatgggtgccggtgcgggtgaagggtatttggccttcctccagcagcttgatcaggtgcggccgcgagacgttgaggaggttggcggcctcctgggtggtgagctcggcgtgcctaggcacgagggtgacggcattgccctgggccatttccgtgaggatatcgcgcagcagggcgagggcgtcccggggcaggatgagttcgatgccatcgagctgcacccgggcacgatcggcctccggcatgttggccagtagcttgctcagctcggtggcgctgtcgcgggcaagatccgtggtctcgctatcagggagacgttctgcggtgttcatggccatactcccgtcggaattgtcgcgtggctagtagttgtctacttgaagcgatattaatcgcaataatcgaactcgcaataatcgaaaacccggatgactgcagcactaatcatcgttcagggacgaacatggttttccccaacccataagaaagggcggcgtttcgcgcgaaacgccgcccttgtcattgacgccttgggttcgggagccgggtgacccggctccctggcgactaccctctggccaggtcgaaccggtccaggttcatcaccttgtcccaggccttgacgaagtccttcacgaacttcgcttcgccgtcgccgctgccgtagacctcggcaagggcccgcagctcggagttggcgccgaagaccaggtcgacgcgggtgccggtccacttcttcttgccggtcttgcggtcgacgccttcgaactgttcctcgtccttgccggtggccttccactcggtgccgagatccagcacgttgacgaagaagtcgttcgtcagcgcgcccgggcgatcggtgaagacgccgtgggcggagccgtccacgttggtgtcgagcacgcgcatgccaccgaccagcaccgtcatctccggcggggtgagggtgagctgctgggcgcggtcgaccagcagtttctcggccggcacggtgtagcgggccttctggtagttgcggaagccgtcggcgatcggctcgagcacctcgaaggactccacgtccgtctgctcctgcgaggcgtccatgcggccgggggcgaagggtacggtcaggtcgtaaccggcgttcttcgcggcctgcccgatgccggcgcagccgccgagcacgatgaggtcggccagggagaccttcttgccgccggactgcgcggcgttgaagtcggcctggatgccttcgagcacctggagcacgttggccagctgttccgggcggttgacctcccagtccttctgcggggccaggcggatgcgggcgccgttggcgccgccgcgcatgtcggagccgcggaaggtggaggccgaggcccaggcggtggacaccagctcggagacggtcaggccggagtcgacgatcttcgccttgagctccgcgatgtccttgtcatccaccagcttgtggtcgaccgcggggatcgggtcctgccagatcaggtcttccttcggcacttccgggccgaggtagcgcgacttggggcccatgtcgcgatgggtcagcttgaaccaggcgcgggcgaaggcgtcggcgaactcttccgggttttccaggaagtggcgcgcgatcttctcgtagtccgggtccatgcgcatcgccatgtcggcggtggtcatgatgatcgggcgcttctgcgacaggtcctcggcggccggcgcctggttgctgtcggtggtctccttcggcgtccactgccaggcgcctgccgggctcttcaccagctcccactcgttgttgaacagcatctccaggtaggtcatgtcccacttggtgggcgtcggggtccaggagccttccaggccgctgccgatctggtcgccgcccttgccgctcttgtagccgctcttccagcccaggcccatctgggccatcggggccgcctcgggctcggggccgacgttggacgggtcacccgcgccgtggcacttgccgaaggtgtggccgcccgcggtgagcgcgacggtctcgtagtcgttcatcgccatgcgggcgaaggtgtcgcgcacgtctttcgcggcgagcagcgggtccgggttgccgttggggccctccgggttcacgtagatcaggcccatctgcacggcggccagcgggttctcgaggttctcgtggttctcctcgtagcgctggtcggccagccagtccttctcggcgccccagtagatgtccttctcgggttcccagatgtcggcgcggccgccggcgaagccgaaggtcttgaagcccatggattccagggcgacgttgccggtgaggatgaagaggtccgcccaggagatcttgcggccgtacttctgcttgatcggccacagcagtcggcgggccttgtcgaggttcacgttgtccggccagctgttcaccggcgcgaagcgctggttgcccgtgccgccgcccccacggccgtctgccgtgcggtaggtgccggcactgtgccaggccatgcggatgaacatggggccgtagtggccgtagtcggccggccaccagtcctgggaatcggtcatcagggcatggaggtccttcttcacggccgcgaggtccaggctctggaattccttcgcgtagtcgaagtcctcgcccatcgggtcggacttggccgactgctggcgcaggatgtccaggttcaggcgattcggccaccagtcctcgtttttcgtgccgccacccgagacgtggtggatggggcatttgctcatgtcagacatgggtcactcctttggtggtgggggtttattgattgcacagtgaggtttataggccctgcatgctaatagtgccaatcaataataacaaaagtattgatagtatctttctatcttatggtttctcctcatggggcaatgtgatcaaggcatgcggggaaaatcccacaataaaatacatatcattatatggctgttgggccgggcttctgctagtgttcatgcatgagcaaggaaagctttgaatgggatccagagaaggatctctccaatcagatgaagcatggtgtttcctttctggaagcgcagactgcgttcgctgacccacatcgcgttattgcggaagacctggcacatggtcagggtgaaaaacggtattactgttttggta

SEQ ID NO: 2516 - DNA, 15295 bp, synthetic construct
  misc_feature 1..15295: note = Synthetic
  source 1..15295: mol_type = other DNA
agctcgcgcgcaaacacacggatgcttgcgacggtcctcccgctcgcaaaacacaagacgatgccccgatccgtcgcgcgtgccaaagccgacgccatcagcggatgtggggaacgatcggaagtgagaacggtgccgtcgaggtcgagagcgatcaagcgaatcggcacgcgttcattctgaccgatccggatcggggtcgcctgtccgccgccgctgtttgtcccgatacatagcggcgtcggccgcgggcagcatctggtcgagcgcgaagtcgctgtgcgcggcaccgacggatgcccgcactccgccaaaatccatttcgaacgttcccaactcagcgaggcggtacgccatctcctgtagaccgatggcgtcgatccccacggcaaggacggcaaactcatcgccgccgattcgggcaagacgatcggagtcccggatcgccccaccaatgcgagaggcgaacatccgcagagccgcgtcgccggccgcatgtccgtgccgatcgttgatcgtcttgagattgtccagatcgaggagcacgacaccgaacggtgtctgacgcgcatgctcgaccgcgagcgagagcctctgctcgaaccctcgacgattgaggacctccgtgagcggatccagggaggccaaacgcgtcatctggaggacttcctgggtcagacgggtctggagtgcgtgctgggcggtgatgtcggtgatcacctccgagcgtccgaggctctgaccttcgcgtccctcgatctcggtgccgaccacgatcatgcgacgggtcaagccggtctcggtgacgaggtcggcttcgtagtggtcggcgtcgcgaccctcggctcgcttgaggaattcgtccgcccgacgcccgatcaggcgttcgggagtggactcaagcagattcgcgagataggggttgaccacttggatcttgccgctcggatccaaccgccaaatcccttggcgcatttcacgaaacacgaagtcgtactcacggagacggctgaggagaatcctctcgacggattccccaggttcttcaaagagcagcaccgcatggggagactccgcgtcgccccagggagcgacgcgaatccgcaacagtcgttcgcgcgtgaagtcaggcggggacggaatcacggcgacttcatcgaagacgtcgcccttcagcgcgccggtcacctccggccaaagctcgtggaaccgaggatcatcgagtacgttcaaccgatcgacagtgcatccaagggcgcggacgacctcgccgtgccggtcgacgaccagcactgcgtcgaacagcgcttcaagggcggcaagtccaagcggacttccctgccccgaggaggaaccatcgaatcgcgtcatcacgatacgtttcttgggacgccgagccgaggcgaccggttcgtcgtctgggtccaatggacccgccgtggagtcacactctcatgctttcggtgtaaacaacgtcacaatcaagggcgcggtgtcgcaaacactcaccgagtccgtgaagaaggaggcgctgagccttgggtttgataccgtcggcatcgccaccgccgatcgcgccgacggcttcctgttctaccaggattggctggcccgtggcatgcatgccggtatggactacctgattcggtatgcagaccttcgcggagacgttggccgcctgttgcccgggacgcaatcggtcatagcggtcaccttggcataccggcaacccgaacctatggcgagcgaagtgaagatcgcccagtatgcccgaggccgagactatcaccgcgtcctgcgcaacaagctcaagaagctggcgatccgtctcgacgtcctcgtaccgggccatcgtcaccgggcttgtgtcgactccgcgccgatcctcgaacgggaatacgcccaccgggccggacttggctggttcggaaagaacacgatgctcatcgactcccgtcgcggaagttggttcttcatcggcattctcttgaccaccctgcccctcgacgccgatcgaccggcccatggcggatgcgggacctgtcatgcctgcgtggatgcgtgcccgaccggcgcgatcgtgcagttcgagggacggtggcaagtcgatgcgcgcacgtgcatcagctacctcacgatcgagcaccgaggccagttcacgactgaccaggccgcccaagtcggtgactggacgttcggctgcgacgtctgccaggacgtctgccccttcaatcaggcccgggcgtcgcagccgcttcgcgcgtcaccgacgagggaggccgaccttcgcccctctcggacatggccggatctggaaacggttgcgaacatgagctacgaggagtgggatcgtctcaccgaaggaagtgccgtccgtcgtgctggattcgagggcctccggcggaacgcgcgcgccaacctccggaaccgtcatgaggggtcccggtagaatttccccatgcccgacttttccttcgatatcgtgtctcgcgtggacatgcaggaagtcaagaacgccgtcgaccaagcccagcgcgaactggacaaccggtacgatttcaagggctcgaagtgcgagatccagcacgacaaaaccgatctcaccctcatcgccgacgacgaattccggctccagcagctcaaggacatccttgaaagcaagttcatccggcgcgggatcgacatccgctcgatcgagtacggcaaggtcgagcctgccaccgggatgtcggtccgccagaaggtgatcctcaagcaaggcattcctcaggatctcgccaagaacctcaccaagcagatccgcgatgcgggccttaaagtccacgctcagattcaaggcgaagaagttcgggtcagctcgaagagcaaagacgacctccagaagacgatcgcgttcgtgaagggcctcgatcttcctctacccgtcgattacgtcaatttccgctgagccttgacccccggctacgggcgtgtgcgaaactgaggcccatgaagtggacctttgcattgttcgttgccggcgtcgtgctggtcatcggctgcggcgggggcggcggtggttcggcaggcaaccgtacgcccacggaccaaacacgcaatcggctcgacacctccctcgacgtctcttggaaagcgatgatccagagcggcatccacaccccagcgttcgccgatcgacgcaacgagggcggcggcacgaccggtggcggcaccggcggtgtcggaggcggcatggcgatgccgatggtcggtgccttcttccgcaactttcacgggggcggattcctgtcccccggtggacgcgacaccgaacctggcacttccggaggatcggggggcgacgagccgccgccgtggaactcgttctactacgacgagtatctcgggctttgggtccaagtcgacttcaccgaaggctcattcagcttcctgctctacgaagatgaggcgaagacgcaaccggccggccacatgaccagcacctggcccaccgactggacgacctatccgcagaccatcgagtcgagctatgagttccgcgctggattcctcgccggatcgtccggcagttacgtcgtcaccatgacgaatgactccaccggcacgatgacctacacgaacatcggcaacgacggctcgtcgtcgagcggcaccagcacgtgggcggccggcggctcgaactggcagaacgaagcgactttgagggacggcaagtggttcaaggaccgcggagcgttccaggccgacggctccggccagacccagtcggagaactcgctgggctacaagtggaccatgaattggtccgcgaacggttcaggcagtggccgcatcgaaggtcccgatcctggactccccgcctcgctcgtctggaacgaactcggcgaaggcacgatcacctacgccgatggcagtaccgagccctggcactggttctatggtatcggggatcacgggggaacgaccggtggcgggactacaggaagcacgagcgccggcagcaccggcgattcggatggaaccagcgacggctcgtccggctccacgggggacgcgggaacgacgggcgatcacggtggcggcagctcgaccggtgagaccggccataccggcggatccgggaagtagcctcagccaaagttgggggccgcaatcattgcggccccggttgggaggttgcataccgcggacgaggcattcacgggacagtggagggctgagagacttccttggttccagaggaggagagacactctcaggccccgcccgcggtcgcgtcgcgtgagccgcttcgcccattcgacgttggttccatgataggtagtcaacgggaatcgacccacggttctattacgggtttacgccaaaacatgtacaggtgttcggtccgttcgtccggttgggacccggatttcagacccgatcgcgtctccaagggccttcgacgagccagaggttcacgcgagtgattccgctccttgggcgtcgagcatgctcagcctcttggtcgaagagcggagggcggccccgttcctgctcccaccttaaggcgggacctgctcgatgtcgaggtctacgacaacatggcggatgccgaagtgagccggcgacctatcgccctcactcgaccctggccaccgaccgccgacggcgccgctcgacagtggaaaggaccgggccctgcttggactccgctgtgtcatcatatgaggacgtctaccgctaccctggaccgcagaaacggggcaaaccggaggcccgaacttggtcgaagggcacgtagatcggcgatagttttcgatgggaacgaagagagcggttcggctgaccgcagagggcaaggagaagttcaccaccgcactcaatgagcggtggcagcttcagtttcccgggaaaaggcaaacccgcgaagctcgcgctgagttcctgcacctcagcatcgcgacctcccaaaaactcctcgacgggcagcccgtggacaagtccacgctacagcttgcgttccaacggcttgacctgccttgggatgacgcatattgcgtgcgcccagctgactttgaaccacagcggaagcctccagaaatcaatctgccccatgatagggctgaaagccggcggaagagagccgtcattgcattggccaccgcgcccgttctcgctacggctctatggatttcaataccccgaccctatgctacagtaactgagccatggcggtttgaactggatcgactgctgagccaagggacgaccgagtaccaaaacggtaactacaccaacgcagagcagaagatcctagccgctcttcagatcgacgctcccaagaccttgcaggttcgtgcgcggacaacattcgactactgggcgatatcgcttcggccaggggagacttgagtcaggcaagaagtcactatctggatgcgctagaaatccgccagaagagcgtgaagctgaacgcaggcaccaatctaccgtctctggagatcacgattcctcctttgatggaggccctgggcaacgtagaaacacggctccagatctggaaggacgcggagatgcatctgaacgaggctcttaagcggtatcgaaagcaaggagtgccctccggagttgccatgtcgcttcgtggcttgggcaccctgtcctatgagctaggtcacgacgaacaggctcttcaattgtttgacgaggcgcttcagtcgctggctcctagggacagacagtccgacttggcatgggacattcatgcacgccaagcgctcgccgtcgcacggcaaggcgatggggtttctgccttgcagacccttgagcgatgccttgcccattggaaggaccgcgggcacatccgctggcaaggcgagaccaagatgcagatcgcccaggtcaagtactggcaaaatcgtcgcgaggaagcggtagcgattctgtcctctgccctcacccactttgaaggggttggcgatgccgagaacgcccgcgttgcccgcgaattgctcgcacagaccggcaaatgaggctaacttagctcatcttgactggtctgcgcgagtgcctgccgagcatcttgaagacatgcactccacaagtttcaggcacggcttttggctctcctgcttgtttgccacactcattctcctcgcgttgagtcatgcaccgaactctgctgttgcacaagcgcgatcgcagcaagcgccgaacattctcaagttgataggcaaaccactttcggagttggagtccgcctatggcaagacagtcttggccgagcctaacggaaaaatcggaatcttgagtagtagcggagaagtggaatgggaagggccgcaacatgcgttccgggctttcaagatgaagggcattgagctagccacggtgaacctacacctgagcgaggacaaaatgaagacaggagccgaccttgacaacgaggtgccggcaatctaccgatttcagatgaaagacaaggccgcgggctggaagacgttcttcaagactctcggaatttcctcaaccggagtgaagacaaagcgtctggatagcgcggcgacttctctccaaggcgtcaaagggttgcctaaaggctacaaggccgtgtttatcgacaatgtgaagtacatggtacataccgagctcatcatctcaaagcaagactagctatccaaaaaggaattcacgatatgaatgtcaggctacttcaactcgttcgcatttctgccccaattgctgcggccctcttggttactgcgaaccatggccaagctgccggcgtcacatcgtttgacgttcccagcggtggggctgtgtacgagcaagtgacactgggcaagaccgagatgaaggatctaaagggtcagacgatgtactcgtatccacttgccctgaagaggactggcggtgccttgccgaagatcaaggtcaaggtagctcttccaaagggaaagacgctaaagtccgtcggagcgctcatcgtcaacattcctcctggggggtcagcccctatcctggctcagtcaacttccgcaagcttcgggataggttcatcggccattcaagctgctccaaagaaggattgggcctacctgtcttctctcgggttggcggttgccgagcatgtcaggaagctcaaccctaaggtaaagatcatttttgccgggttctcagcaggcggctttgccgctgaactggcgacttatgcagacgttacccgagtatcgggtctcattcaaatcgggtcctttccgatgtccggcaacgatgctttgccgcaatcgtgtccaagcgttattctcgtgggtcaaagcgactccaatctcgaccaggcaaccgttgcgcatcaagttcaagccgcccgtggagccaaaatcgagctcctgacccacgcagggggccatagttggggttcccaagctgaccaggctcttgcgatcagggcgctggtacgaatgaggtctggaaaggctcctgaggggctgcgaatcagcccagagttgacgtcccgactgctcgccctgagcgccggcgattccgttcgagagctgggaccaccggtcacctcggattatgcgttggtgcgcaagccaggggaggcatttgattggcgtaaagcgttaacaacaagggagatcgtccgtgactttccatcagcaagtttggctattgggacctggatactcaaagggtcgccccttccaggcgtatacttctctctctcatttggcccgtctgggaaccggctcatctatcaaacggaaccggaggcaccttctcggaatagcctgattcaggcacttcaactgccaccagtcacaaaggaagttgagctgaccggccagaccaaaccttggaaagagtggagcctcgaattcggagcttcgttccccaatcacgtcgtgacagcaagggagacgggatatgacactcagcttgagttctcccctcgaggacaacaagcggaagcgcagccactggagaatagcgttagagtcgtggtacacccgaacgccaaattccctgtcaaggacatcttcatcacgtatccgccgtccatgactgtaacaagcattctgagcgatttggagcttcgcgaggagtcggtcacgcttgcaaggggtcggaaggggaacgggtatctgcttgaagcctggaatgcaacgccaaagaagagcgttcccagattgttgaagatcgagttcgagaagttcgctcgctattggtgggtgaccttaaggactccgtacccctaacgtccaacagagtgaggagacagttagctcatcttgacgcgtattcgtgctgatgacaggcctcgcgcttcccgcaatcgtcaacggacaatcaagatgcgactcgaccctcaccccttgccccctctcctttcgcacaatcatcgaaagcagagggggtccggaacccctgctccttgccggatgggacgtgccgggagggagaagaggaggaagatgaggatttctaggaatccttgcgcgcccaacctcccattcgaccgccggtacactggagcgcccatgcagcctcccgccgccctccccacgctcgacgtggggagggcggcatcgatcgggcgggcaaatcgcaacagcccgaggttgccgtttcgctctctggggcaccccagccaggcgtgggcccttggaacagggagcttgcgcgactcgtaggcaacgccgtgaagaagctggtgctgctctcgctcatcgtcaacgtcgtcgtcctggtgccggtgacgtgtgggctcctctcgaatgccgtatgggtccagcaggcgtatggtccgttcacagcggcgcgcgggatcttgctctcggtttacggcgccatcctgctcgtgccgatctggcagttggcggcacgcgatcccaaggtggtggcctcgctgctgctagtgcaggtgatctataaggtgacgacgccgttcaccgtcggggatatcagaaacccggtcgtcatcagcaacttggtgatcgccgccctgcatgcgcttacgatctccacgatctggagcgccggcggcaccggcacgcgttcaggccaatcctaggccacgaccccccattcgatcagttcggtcgcctggcccgtcaccgcgtccacgaaccgggtcgcgaccgccaccgccccgggacgcacctccagcgtgagcgtctcccccgccgcgaagcggtggaagaccgcggttcgatagcgctcgcggtacgtgcggcagtggatcgaggggagccgctggatgaggacttcggtcacgacgccggcggcgttggcgaggtcggccgtcacctcgaccgcccccggcgcgcccgcgcacgtgaaccggaccgcatcgccgggaaaggcgttggccggaggcatcgtcgggggtgtgcccccggggttggcctgaaggaacttcgcgccgagacggttgaagacgagctgggccgagacccgcgaacccgccggaagccccgcttcctgggccgcaaaatcgcgccacgcggtcgcctgggccacatcgagccccttccacgcccggctcacggccgcgagccgtgcccgcgcctcggtctgggccggagttcgagggttgttgacgaacggccgatcccgcagaaccgtaccggccgcggtctgcgcgaacacggcgtttcccgcccgtccgctgaggccacccaagacgacacccgctttgactttcgccacacccaagacgatcggtcgatcccacgccgctcctcagggcaagccaggcccatgcgcaagccaaaactcacggatcactctcggatcactttcggatcactctcgcacgaatggctcttgttacctagccggaccaacgaaaagaccccggtttgccggggtctaagtcgttcgcgatcgccaggctctcgcgttaggcgcggggatcctaaaatcccgccttaccgactcctgccgacgaatcggcgagtcattgttggagtgctcggtaggccttcttcagatacgtgagtattatacaaccatggaagggaagatgtgtgtcggcctcgatctcggaatcaacaatgtcggctggtgcgctttgcgaagaagcgacaacggggttgagatcctcggtatgggaacgttcgtattcgactccccgctggaagacgaaaacaagccgagcgagggccttgcgagccgtaggcgcggcatgttccgacgcgcgcggcgaaccgcgcggcgacgccaccagcgcaagatgcggctctacggcacgctcgccgaatacggcttcctgccacccaagctccgagatcgggtgacattgttctgccgcaacctcgacccggactccaaccgaaggatcgatccctacacgcttcggtcccaagctctggtgcgcgccctgacgccttatgaactgggccgggttctctgccacctcaaccagcgccgagggttcatcagtcctcgcgatctcatggcccaaggtgcattcaagacacgggaagaactggacgctcaagccgacgaagagatgcgcggcatgaaggaagagatcaaacgaacccgagaggcgatggccggcttccccacgatcggcgccttccttgccgcccgacaggcccgacgcgagccggtgcggaagaagaagcttcgcggagccagtgtttcccaacagaaggcgatcgacgagcagcgctatgtccgcgcggaccgccacatgatccaacaggaattcgaggcgatcatcgctgcgcaaaagcaccatcaccccatcctcaccgacagcctggtcgacaaaatccgcagacagatcttcgatcagcgcatcctcgcgacggaccaccgcgttcggggacgctgcatcttctttcccgacgagtggcgcatcccaagggcgagcatgaccgcccagaagttcgtgatcgcccaagaggttgcccacctggagatcagcgacgaccttcaccaaccctatcgcaagcttcgacccgaagagcgcaaggtcttggtcgatcgcctccttctcgggcaggatctcacgtggaccgaggcgaagtcgcttcttggccacggcgtactcgcccgcttttcgctcgaaccggagccgggcaagaagcgaggcaaagccgccgggacgaaggacgctctgcgggggtcggtcaccgcgaagaagatgtacgaaatcctgggcccgaagtgggacgcgttgggagacgccgcgcgccgtgaattggtcggcgagatcgtcagcatccgcgactggctgcgggacatgaaggacggcgcgccccccgccgccatccgccgtcgcatccttttcctccgcaaggcctacgggccggctcaagtgcggtttaccgagcaggaggcaaacgatctcgcgaccgtcgaccttcccgacggttacctcaacgtcagccttcgggccatcaagaagatcctgcccggcctcctcgaagactgcgtctacagcgaggcatgcgcacgagccaacctgaaccacacgtcccccgacacgcccgcagtctcaggcccgatcctgcgttatcccaccgaacaggagatcggccacgcattggttcggaccagcgtccgaagcgccattcgagttctccgctccatcgttggtgagtggggactaccggactcgatctgcatcgaactcccccgagacctcgccgtcggcgcgcagcagcgggaggagatctccaagcgccaggacgagaatgagaaggagcgcatgagcatcgcgaaggagctccttgcgaacggctacccggcatcccccaccaacatcaagaaggtccgcctttggcgcgagctcggcggcctcggccttccctacgaaccggatcgcgtcgtttccgaccttcgggatctcatcgagggcgattacgagatcgaccacatcgtcccccgaagtcacagcttcgacaacggcatggcgaacctcacgctctgcacgcgcgagttcaatacccaggtcaagggcaaccgcacaccgtacgaagccctcgccacgcgcgatcccgaggcgtggaaccggatcgtcgcccatgtgcgggggctcaaggcgatgcccgtcaacaagcgcaaccgcattcttgccaaggaacgacccgaagacttcaccgggaggcacttggccgccaccggctacatcagccggcaggtcctcgcgatcgcccaaaggatcacccgccgtcctgaagacgtcgtggtcactccgggacgtgcgacctcggatctgaggcgcttctgggagctcggccacctcgtcccgctccacccggaggaggaagcagccatccgcgaggaacgcgagcgggaggagcaggtcgaaaagggcctgctgaagcccgaggatctacccgccaagcggtcgtcgggcaagcagcgaagcaactacaaacaccatgccctcgacgcgctggtggtggccctcacggaccgggcttcgcttcaggcgctcacgcgctactaccagctggaggaaaccggttctcccttgctggccgagaaggcgggacgcaagctggaacgggccaagaccctccccgaccccgaccttcagcgcaaggccaccgaagcgctggagcgggcgtcggtcgtgcggcggccccggcgtcgtccccagggcgaactccacaagcagatgccggaggcgggcgtgccggtcggcatggccccaggcaggccctggtcgtcggccgtccgcggcaagcacctggtgaagttcgatggcgacggacgcccggcccaagcgtatcccctcggcaacaaccaccacgtcgtgatctgggagtcgctcaccccgaacaagaagggagagaccgagcgctgggccgaagtcgtcccgatgatcgaggcggtgcgccggcgcaaccggggcgagcccgtgatccgcaagcactccccggacagcaacgcccggttcgtgatggcgctgtgcaagggggatacggttgagatggaggacgggacgttggcctacgttgcaagctttagtccgaaggagcaagaaggaggaatcgacctcttcctgtggcatcttttcgttgcccgacttcccaagaacaaggctgtgggcgagccatatcttgtccgacgaatgcagtccactgctctgctcaagtttcttgccgctcgagttgttctcaacccagtcggcgaagtcgtctaccgcgaaggcggaccgggatgaggcggagcatcgcgatccagcgcccggcccggctgagcctggatcgcacgatgctcctcatcgagaacgaggagggacagcatcgggtcccgctcgaggacctcatggtgatcgtcctcgaccacgaggcgatcgccatcaccgaaccccttctcggcgctctcgggtcggagcgggtcgcgatggtcgtctgcgacgtcaagcacctcccctcggcccttctcctcccgtacgaaggacacggtctcatggcgcagacccttcgcgcccagatcgaagcgtcgaagccgaccaagaagcagctctggcgggcgatcgttcaggagaagatccgaagccaagcccggctcctggtcgaaaagcgtggcatggaccgggggctggccgcgatggcgaaggacgtgcggagcggcgacacctccaaccgtgaaggtgcggccgcgaccctctacttcgccgagctgttcggtcccgggttcgcccgggtgcggcgcgaccgagcgcgcatcgccgcgatcctgggtgagccggtggacgccgacgcgtcgacaaccttccggatcgccaacgccctcttgaactacggctacgcggtgcttcgggccgcggtcgcccgggcagtcgtgcttgccggcctccaccccgccctcggcatcttccaccgtcaccgcgaaaataccttttctttggcagacgacctgatggagccgcttcgagtgttggtcgatcggatcgccttcgatatagtggaagagatgccgcagcttccaaacgatctgacccccgagctcaagcgccgcgtcctcgcgctcctcaccgcggaagtccgctggggaggagcgatgtggccgctcgatgcggccctggaagcctacgcggccggagtccgcgcatgcctcatcggcgaaaccaaggagctggcgattcccgccgcataatcttcggggggctgcgatcgatgtgggtgctcgtcttcttcgaccttccgaccgagacgcgcgcccagcgcaccgaataccggcgcttccgcgagaagctcctccaggacgggtttgtgatgctacagtactcggtctacgctcggtcctgcgccaacttcgaggacgccgagaagcacggggcgcgagtcgaacggatgctaccgccggagggcgaagtccggatgctgacgctcacgagccagcagtacgcccgaatgcggtgctttttcggagaaatctcgcgaccgcccgagcagaagccgcttcaactcgaatttttctagcgccggaggctgggtgaacgaacctgatccccctgctttgaggagggggatagtgtatctgaagaaggtctgaccgagcgccccaacgaagacgttgcttctatgtggcaggctggaagtgtatctgaagaaggtctgaccgagcgccccaacgcctttgcctgcctgaccacatccgagctgagtgtatctgaagaaggtctgaccgagcgccccaacacaaccgggcccatatcagcgcaactatggagtgtatctgaagaaggtctgaccgagcgccccaacatgtctgttccgctgaacgtccagaccccgagtgtatctgaagaaggtctgaccgagcgccccaacatcccctcgcccgcagttgcaggcgagtaaagtgtatctgaagaaggtctgaccgagcgccccaacggcagtcgagcgtactattgggctcgtgacagtgtatctgaagaaggtctgaccgagcgccccaacggcgctttccgtccccctcgggcgagcacgggagtgtatctgaagaaggtctgaccgagcgccccaacatggcctgggaaaccattccgctgcggataagtgtatctgaagaaggtctgaccgagcgccccaacaaacgttttcggcgtttgccacacgcacgtagtgtatctgaagaaggtctgaccgagcgccccaacgcgtcacgcaccgcatcagcgcgttccccgagtgtatctgaagaaggtctgaccgagcgccccaacttacgaagccagcacgtagaccgaggaagcagtgtatctgaagaaggtctgaccgagcgccccaacccagcatgcttatgttggggcgctcggtcagaccttcttcag

SEQ ID NO: 2517 - DNA, 10105 bp, synthetic construct
  source 1..10105: mol_type = other DNA
  misc_feature 1..10105: note = Synthetic
ttcgtcccgcgccagagtctctctcgcctcgtctgtgtcgccccccatgtcgatcaggctcaccctttccgcggccgctgcagggaacacgagggggtgcatccaatagggcaggcacgagatcgccacgtcgcacccgcggatcacctcacgggttcgagcttcgtccctgcgtcgaggaccctgggcacgatcgcgtcgaagccggtctgctcggacagccaccgctgcgcttcttgaacctgagccgggtcctggtccgccaacacgatggactccgcctcgccccgtagcgccaagtcgacgccgccgcccgcccttgcagtcccgctcccagaatcacgtaccgatacgccatgtcgcccccattctgaaggcttacggctgccgaggtcgcggtcctgagccggtttcgctggccgaatccgccagaccggtaaaatcaagcgcccatgccgaagcgctattacatcacaacgccgatctactacgtcaacagcgtcccgcacatcgggaccgccctgacgacgtttgccgcggacgtgaccgcacgctaccagaagatgctagggcgcgaggtcatgttcctgactggcacggatgagaacggcctcaaggtgctcgaagcggcaaacgcagcgggtaaagacccgatgcagttcgtggacgaagtggccggtcagttcgtcgaaatctggcgcggaatgaagatcgaattcgacgacttcattcgcacgactgaggagcggcacgttcgctgcgcgcaagaggtgtttcaaaggcttcgggaagccgggcatgtctaccccggaacgtatgagggctggtacgacgtatcgagcgagacgttctacaaggaatccgacctcgtcgacgggctcagccccgacggaaaccccgtcacttgggtccaggaggagaacttcttcttccgactctccgacttcgaggagcgcctcttgcagcacatcgaatcgaaccctcaattcatcgtgccggaggttcggcgaaacgaagtcgtggggttcctgaagcaagggctgcgcgatgtctgcatcactcgctcgaaccctggctggggaattccgatcccaggcgacgactccaaggtgatctacgtttggttcgacgcgctcatcaactacatcaccgcgacgggttggccggattctgggtgggaagacctctggcccgcggaggtcgaatggatgggcaaagacatcctgacgcgatttcatgcgactctctggcctgcgatgctgatgggcttgggactgcctctgccagccactctcgtggggcacgggtggatgacgctgggcggcgagaagatcagcaagtcgaagggcaacgttgtgcggcctttggagctcgcccaggggctctccgaactcaccggatgcgaacgcgacctggcgatcgatgcggtccgccaccacatggccgcgaccctgccctatgaggacgacacggtgtttacgctcgaagagtttcacaggcggtacaacaccgacctcgccaacgaccttggcaacgccttgaaccggagcatggcgatggccgccaagttcgtgggcggcgcaatccccgacgagcagcccgaagacgaggtcgctcaagcgatctcccacagcgtcgagcagtaccgtcgccacatggaggcgtttcgattggatcgcgcctcggctgcgtcgctcgaagtcatccggttcctcaacaagtacatcgatacgcgggctccgtgggcgctggcgaagtcaggcgaccccgccttgccgcgcgtcctctttgggatggcgctttgcctgcgaaccgccgaggggctgctcaggccgttcatgcccggggtcgccgacgcaatcgcggctcaactgggacagatccccttaacaagtctcgaaggcgtcgggacgcccctacgcttcaacccggctcgaaactgggcgaagccaggccgatgttccccagaattcaagccgagccgcgccgcagcacccgagcccaaagcccagccaccagagcttccccaccccgcaaaggaggtcccgcccagcgaaccgatcggcatcggggacctcgcaaagatcgagctcaggataggcagggtgctggaggcggaacccctcgaaggcagcgacaagctgttgcgcctgcaagtcgtcgtcggaagcgagacgcgccagatcgtagcggggattcgcgcccaatacgccccgctcgacctcatcggacgccaggtggtcgtggtcgccaacttgaagccggcgatgttgcggggcgccgaaagccaagggatgctccttgcggcggtcgatggcgaaggaggcgcaattctccttcagcccgatcgcgaggcccctgaaggcgcaaaggtgcggtgagggccaatcagggcctctttgcgtagcggctcttccattcgtcgagcaggctcaacgcctggatcggcgtgagttggttgaggtcaagcccctcgagttcacggatcacctccggtgtctccatctcgaagagcgagagttgcaacttcgcgacgccgatgtcccggacttgcggagccgaggcgccctcttcaagctccgagaggatctcttgcgcgcgcttgacgacctttggcggcagacccgccatcttcgcaacatggaccccgtagctacgatccgtcccacctggaagcaccttatgcgtccacaccacttggtcgcccacctcggcgacgctgactcggaagttgctaaccgtcggcaactggtctgcgagcgcgttgagctggtggtagtgcgtcgcgaatagggtcttcgatccgatctcagcgagccgctcgatcatcgcccaagccaccgccataccgtcgaacgtgctcgtcccgcggcccacctcgtcgaggatgaccaaactgcgctccgtagcgtggttcagaatgttggcgctctcgatcatctcgaccatgaaggtgctttgcccgagggcgatctcgtcgcgcgcgccgattcgagcgaacacccgatcgcaaaccccggccctcgcgcgcgaagccggaacaaacgcgccgatctgcgccatgagcacaagtaaggcggtttgccgcaaataggtcgatttcccgctcatgttcgggccggtcaagatgatcgtccgcgtctgcggctctccctcttcgggctcgagcgaccccaaaagaatgtcgttcgggacgaagcccggctcggcgtcttcgacgaccgggtggcgaaccgtctcagcttccagcacgtcttcgggcacgatttccggccgaacgtacgccttccgaacggccgtctccgcgaaagaacccagcgtgtcgagttcggcaagcgcctgcgacgtatcgagaagcctccgagaatgccgcgtcgccgattgcattaagtccaagaagagttccgcttccagggcgatcgccttctcctccgccccaagaacgtgcgactcctgttccttgaggtcagcggtgatgtaccgctcggcgttcgcggtggtctgcttgcggatgtactcggcgggaaccttggcgatttgagatttcggcacttcgaggtagtaaccgaacaccgagttgaaacctactttgaggttgccgatcccggtcttcgctcgctcagcggcctccaactcggcgatgaacttcttgccgctgcgctgaatctccctcaaccggtcgagttcggggtcgaatcccgatcggatgatccctccctcccgggtcgagagaggcgggtcgtcgttgagagccgactgcagctccgacagcaactcatggggatcgagaagccccgcccccaactcggccagcctgccttgcgcgacgggtcgaacgctcgcggcgatgtcgggaagccgttcgagcgagtttcgcagtgcggcaaggtccttgggagttgcctttcccgtagcgcatcgcgacaccagccgctcgatgtcggcaacgccctttagggactcccgcaggtcgaagcgggccgctgagttctccacaagccgaccgaccgcatcgtgacgtcgccggatcgcttccacgtcgaggagcggctgctcgatccacctccgcaagagtcgcgcgcccatcgaagtgcaggtctgatcgagaacggcaaggagggtgtaccgccgcgacccatcgctcatgttctgggagagttcgaggctgcgccgcgtggccgcatcgaggcgcatgaagctctccaccgaataagtggccaccgcatcgacatggcccaactgcaaaccgttcttttcggcgtaggtcaagatcatcgaggccgcaatcaccgcgctcggcttgtcctcacagccatacccttcgaggtggctcgcccccaactgccggagaagggtctttttcgcccggtcggctcggggcgactcgatgcaactcaccgcgctgccgagccctcgcgaagccaaatcgccgaactcctgcgtttcctccgatacaagaagttccgacggggagattcgtgcaagctcgttgagcaggctttgctgcatctcctcgccttcgatctgcgtgacggcaaactcgccagtactagaatcgagcacggcgagccccaacttgccgtcgtgcaggcacagcgccgcaaggaagttgttccgagacgaatcgagcaaggagtcctcgaccacggttccggcggtcagcacccgcgtgaccccccgcttcaccagccccttggcttgcttggggtcttcaagctgatcacaaagcgcaaccttgaagccttgtcctaccagccgcgcgaggtacttctcgaccgaatgatacggaacgcccgccatcgggaccctgttgtcgccgtcgtccctcgccgtgagggtgatttcgagcgcgcgggcggcggtctcggcgtcttcgccatagaactcgtaaaagtccccgacacgcatcgcgagcagcacccccggatgctccgccttggcggcgaagtactggcgcatcatgggggtcttgggttccaccgtgaagggagtatggcgcacctggtcgtccgcagggaatccgcatttctcgaatgaggggttcggcctgcctcaagaccgcacggggcggcgcactgggaaacctgcgtctcggccgctccgaaagcggacccgagttccatcaggcagctacaaagttcggagagaagggctctgcaagaacggcagttggggtgagccgaggaaggggctacatccatggcatcacggcgcggggaatgttccgccgcgccgtgagattatccgccgaaggggacgatcgccttgtcggctccaatgacgaccgtagcgttacccgattcgatcgcctggagcaatcgcagttgggcgagttcaaaggacaggagaactgggtggccaagaacaaaacggccctgacgaatcagggccagtttatttcgcgatcgctgaactctcgcaatggttgcggggatcctaaaatcccgccatacagatctcctaaatgagacttgttggagcatccgcaggcttctttcagatactagttgtatgatatcccaatggatggaagacttgtctatggtcttgacctgggcatcaacaatgtcggctggtgcgcgctgcgaaagcaggaagaaagcgtagacatccttgcggtcggcacgttcgtcttcgattccccgcttgccgacgaagccaagcccggcgagggcctaaagagccggcagcgggggcagtttcgacgcgcccgccgcacgacgcgccgacgccatcagcgcaagatgaccctgtatcgcctcctcgcggaacacggattcctgccgccgctaatgaaagatcgcgtcgagcacttctgcaaagacccagacccctatgcgctacgcgctgccgcactcgaacgaaagctggagccgtacgaactcggacgagtgctttgtcatctcaaccagcgccgaggcttcctcagtcctcgtgacctgatgctctggggtacggcaaagtttgaggatgaagaggattcggcagagggggccacgccgaaggacaaagacgaagagcgaggccagatcaagaaggaactcaagcgcactcgggaggaaatggctggcttcgaaacagttggggcgtatctgaacgctcggcttcgaaatggcgcgcctgttcggaagaggaaggtcgcaggagccactctggcacaacaaaaagcggaggatgagcgccgattccgtcgcgccgaccgacacatgatcgagcacgagttctggacgattatggggcggcaggcgaagtaccatccgctcttaaccatagacctgcaagcccagatccatgatcttctcttcttccaacgcatcctggcggctgacgcaagcacaagggggaattgcaccttttacaagaacgaactgaggatgcctcgcgcggggctcaccgcacagaaattcgccatcgcgcaggatgtagcccacctggaggtaattccagggccgctccaggatagccgaaagctcaagaccgaggagcggctgacgcttgtcggcaagctgatgaccggtgacgatctaacctgggatcaggtccggactgagctcaaactgcctgctgccatcttcaacatcgaacccgctaagtacaagatcatcggaaaggacggcaaagagaagacagtcacccaaaagtccggcaccaaaaaagagctacgtggaagccagactgtcgccagactgcggcgcatccttggcgacaagtgggacttgctcggcgaacaagcccagcgcgagttggtgggagagatcgttagcattcgcgactggacccgcgacgtgaagagccggacgaagcccgccgcctatcggcggcttgacctcttcaagcgaaaagcttacggcccaagcaaggtcaccttcacggagcgagaagcaaacgagttggccaccgtggagcttccggagggctacctgagcgtcagcctcaaggccgcgaagaagatcctcccctacatgctcaaggacaaggtgttcagcgaagcgtgcgaggccgccggattcgaccacgccaatcccgagggagagctgcccactgtggaccggctcaacttccctaccgaaaaggacatcacgcacgccgtcgttcgcgcgagcgtccgcggagccgtgcgcatcctgaacgctttgcaccgcgagtacggcaagcccgacgcgatccacattgagctacctcgagacttggcgatgggcgccgagcagcgggaagaagtcgagaaacgccaacgtgagaacgaaactgaacgcaagaggatcgccaaagacctcgtggagatcggcgtcaagccaagcggcgccaacatcaagaaggtgcggctctgggaggagttgggaggttcggcgcttccttatgagcccgatgtgatcattcacgatctcaggtccctagtgtccgacgactacgaggtggaccacatcgtcccccgaagccacgcgctggacagcggcatggccaacctcaccctctgcacccgagagttcaacacccaggtcaagggaaaccaaacgctgtgggaggccgtgggccagcgggaaccagagcgttggcggcgcatcgaggcgcacgtcaagagcatcaagaacatgccgctgcacaagcggcagcgcatcctggccaaagaacggcccgaggactttactggcaggcacctggccgccacaggctacatcagccgcgaggtgctcaaactcgctcaacggatggtcgagaacaagaccgacgtcgtggtggcgccgggacgggcgacctccgagttccggaagttctgggagatagaagacatggtgccgctgcaccccgaggagcaagcgatagaggacgcctggaaagcgttcttggcaaaggcggacgctggtcaagcgaccgaggaagacgtcaagaatgcgaagccgcccggcaagacccgcagcaatttcaagcaccacgcgctggacgccatcgtcgtggcgctcgccgatcgcaaaagcctcaaggctatgaccgacttcttccagcttgtggagcttcgcgatccgcgtttgagagataaggagcaccgaaagctggaacgggctaagacgatgcccgatccgaaccttcgcaacaaggtcgcggcggcattggagcgcgcggagatcgtgcaccgtcctcagcgaatgccaaagggccagcttcacaagcagcagccggatgagaacgtcgtgcgggggatgcgtaatggtgagccttggggaaccgaggttgtcggaaaacacctcgtgaaatacgaccaggaaggccggcggcccaggcgtacccgctcgggagcaaccaccacgtcgtcatctgggaaacaacgcagccgaaccagaaaggggagtacgagcgagcggcggaagtcgtgacgatgttggaggcggtgcggcgtcgcgatggcgcagccgcggcccgaaagtggaacaaggaccaccctgagggacccctgcggcccatcgaaccggtcattcgcaagacgcggccggagcccggctggcggttcgtgatggcgttgtgcaagggggatatggtggagatgtcggacgggtcactcggactgatcgagtcgatttcgatagacaagggcggccagtacgattgcgggatctggcatccgtttgtggcaaacaaaatgaaggacaggacgcctaagaacggatacctgatcacccgagtcaggagcgaaagagactttggcaagattgcggcgcgagtcgtcctcgacccccttggccaagtcgtctatcgcgagggcgggcgcgagtgaagcgctcggtcgccgtgcagcgcccagcccgtctcagcgtcgaacgggcgcagctcctgatagaaaacgacgcgggcaggcacacggtgcccctcgaggacctcgggattctcgtcttggaccacgacgcgatcgccgtctcgggcccgcttctgggggaactcggcgaacagcgggtggcggtcgttgtgtgcaacgccaaacaccttcccagcgcgatgctcctgccctatgaaggccactccctgatggctcagacgctacgggggcaaatcgaggccagcaagccagcgaaaaagcaaatctggaggcaaatcgtggtagccaagattcaaagccaagcgcggtttctccaagagaaactgggccacgatttcggactgggttcgctatccaatcaggtgttaagcggcgacacgtccaaccgcgaggcagtagccgctggcgtttattgggacgcgctctttggagaggactttatccgccttcgcaggaccgaaatggcggagtccggacccggactggaccccaccttccgaactgccaacgcgcttctcaattatggatatgccgtactgcgggctgcggttgcgcgtgcgatcgtgctagccggcctccatcctgcgctcggcgttcaccatagacaccgtgaaaataccttttctttggccgatgacctaatggaaccgctccgagtcttggtagatcggcaagtctgtgatatcttagaaggagagccggacttaccgcaggacctgacgccgtcgctcaaacggggcgtgctcacggtcttggcagcagaagtcacctgggaaggggggctatggccgctggacgcggctttggaggcctatgccgtccaggtgcgaaaatgtctgctcagcgaaaccaaggcgctggaagttcccggcgcatagtgttcggaggaatgcgctcgatgtgggtgctcgccctctttgacttgcccgtcgagacgaaagtccaacgaaaggcgtatcggcgctttcgcgaccgccttctcggaaagggctttgtgatgcttcagtattcggtgtacgcgcgaccctgctcaacccacgaagcggcggagaagcattctcaattcgtcgagtctcacgttcctccggaggggcaggttcgcttgctgagcctgacctcccagcagttcgcgcgcatgaagtgtttcttcggaaaactgccgtccgctcccgagaaggagcccgagcagctctcgtttttttaacgggttagccccggtccgttgccgattttgagttcaaaatcgccccgaaccggggccggatagtgtatctgaaagaagcccgtccggatgcccca

SEQ ID NO: 2518 - DNA, 23387 bp, synthetic construct
  variation 16893..17077: note = n is a, c, g, or t
  misc_feature 1..23387: note = Synthetic
  variation 17346..17643: note = n is a, c, g, or t
  variation 16498..16689: note = n is a, c, g, or t
  variation 15571..15766: note = n is a, c, g, or t
  variation 19003..19236: note = n is a, c, g, or t
  source 1..23387: mol_type = other DNA
  variation 15181..15367: note = n is a, c, g, or t
  variation 18308..18669: note = n is a, c, g, or t
tgcaaaaaattcggtagcacaaatggaagccaatgtcgccgtagcccaaaaaaacctcgattataccatcatcacctctcccatcaatggtatagcaggcatctcctccaccaaccgaggtaatttggtaagcccctccggtcaagctctggcaattgtttccgaaatacatcctattaaaattagattttcagtatcccaagcagaatggatccagcaaagtggtaacactgagaacgccggaatcgagccgggcttagaaatgtcagtcaccttgcacaatggagtgccttattcggaaaaagcaaaggttgtttatacggataacactttcgataatgataccggcagcattatggtagaagctcagctaccaaatgaaaaactcatcttacgccccggtatgtttgtacgtgttaaggcttgcctagctacgaataaaaatgcactaacgattgatccgagatgcatttattccacacaaggcaagtatttcgttgtagcccttaacaatgacaaccaacctgaaatgattccggtaaatataggtgcgatttatcaagacaaacaagttattacacctattaagcccaattccgttaccaccaatagccgactagtcatcaagggcatccaaaaagcactgatggcagtcaaagataaagacattaagctcaatccccttcctttcaaggcagattcagctgaataacccctattacaccatccaatcatatgtacgagttttttattaggcggcccattgtggccatttgtactgccatcgtcatcatactattaggggcgttttctatcagcaaattacctgtagctgagtatcctaatgtattaccacctactattatgctatcggctagctatcccggtgccgatagtgagaccatcgttaaatcaatagcttcacctattgaacaacaaatttcgggtgtagaagatatgtcttatatgtcttctatgagttccaatagcggtgatctctcgttaactgtcgtatttgaaatcggttctcaaccgaatatcgatgaggtgatgacttaccttcgatacggacaagctgtttctcaattgccatcggaagtacaggcattaggacccacgctcagaaagtccagcggtatgccgactttggttttcagcctttattcacccgaagatacctatgatggtttgtggctatcaaattatgcctacatcaacttggtagatcctgttaagcgaatcaaaggtgtgggcgaagtacaagttttcggttcgggtcaatatgcaatgagaatatggcttaaccctgaaaaactatcagcttacaacattactgtttcagaagttaaacaagccatttcggctcaaaacaacgtcaaccctgcaggtaaaatcggggctcaaccatctccatcaaatcaacaatttacctatacggtgaaagctccgggtagattagttaccgtagaacaatttgaaaacattgtcgtaagcggaaataacgatacttctgctatcgtcagattaaaggatgtcgctcgagtggaacttggagcccaatcttatgatttcaatacgacagttaatggtagcacatccgcaagtgtttgtgtttatgtttcccccgatgccaacgccattgatatggtgaataaggttaaagagcttcttgatgctgaaccattccctcccggcatggaatacttggtatcattagatgcgacacaatcggtacgtgtcggtattaaagaaatcgtacagacactcttcacggcattaggcttggttgttatcgtcgtatttgtattcttacaaggctggagaggtactattatccctgcgtttgccattccggtatctatcataggtggtttcattattttcccattcatcggatttaatatcaacaccatctgcttgatgggtatggtattggcgatcggtttggtagtggatgacgccattgtggtggtagaagcggtacaagctcacattcaggaaggcatggctccggtacctgctaccgtacaggcgatgaaagaagtggcaggccctgtagtaagtacggctctagttattgcttgcgtattcttacctacactattactccccggtgttacaggtttgctatttgaacaatttgccgtgactatcggcttttccatcctgatttccgccttatgtgctttatcattaagtcctgctttatcatcaagacttttgcatgatgaacacgccaaaaaacgattattagacccgctttatgacggtttcaataagttgtttgataaagtgagacaagcttatgttgatatttgcagtttcttgatcaaacacatttgggtcccattcattattttggcaggtattcttatcgccttattccctattcaaaaagcaatcccggcaggtttcttgcctaatgaggaccaaggctttttattagccggcatccagatgccaccaaatacttcattgaaccaaacggcggaagtttcagctaagactgaaaaattactcaaagacatccccggagttgaaacggtcaccacggtgaatggctttaacctcatgtccatggtgcaaaactcatacaactgtgtgttcttcatctcacttaaaccatggagcgaacgcaatacacctagcatgacggctgcatcactttgtggtcaaatgaatgaaaaaatgggagcaaatgtcatatcaggtattccttatgccatccaacctccacctatcccgggcatcggtacttccggtgatatctcattcttattggaagatagaaaaggtatcggtgaaaatttcctaaccgaaaatacggatcaattcatcatcgctgctcaaaaaaaacctgaaattgcttcgattaccaatttcatgtcaccttccaacttgcagtacaacttaaatgttgatacggcgcaagccaccctacaaggagtccctatcagtgatatttacaatacgatccaagcttacatgggtagtatgtatatcaataactttaatatttacggccaacaatggcaggtatatatgcaagcagattcggagttccgcaatgacattgataaaatcaatctttactatgtcaaaaaccaacaaggcgacgccgtaccattaacctctgtcgtcgatgtggagcatggctgggcacctgagtttttaatgagacaaaaccaatataattgctccatgctcaatgtgacaccggcagcaggttgctctacaggtcaagttatggatgccctcgaaagcactttccaagaagtttgtccgacggggatgggatatgactattccggcatgagcttccaagaaagccaagctcgcaaagggatttcgatgacgacaatcttcattgcctcagccatctttgtttaccttatcttggcatctctttatgaaagttggtccctcccaatagccattttcatcaccgttccattcgccctattcggatctatggttggtttatatatgtttggccaacagatgaatatctactcttccattggtcttttgatgatcattgccttgtctgccaaaaacgcgattcttatcgttgagttcgcagtactggaactcaaggcaggtaaaaaccttatggaagccactgtcaatgcatcgagaatccgttttcgtccgattctcatgactagcttcgcattcatcttcggttgtttaccactagctatcgcaacgggagccggagcagcggccagacaaagcgtaggtatctgcgtaattggcgggatgattagtgctattacattaggcattctactcattcctcctttcttctactttgtcggcaaacgagtcaatttggaaaaacgccttaatccacctccgggcactaaggttgacgacacacctatttaacctcttgtcatataccaaataagcaaaggaatcatccttagctcatagtcaaaagagagccggttatctaatagccggctctctcattttataatcttaaatatagaataaaaaattaaggacgacgcacgatggcacattgcataccggcgcgctctgccgcttggataccggggatggcatcttcaaacacaatgcaacgattaggatcggcaccaatcttctccgctgctaataaaaacatatcgggagcaggtttcccgttttctacatcatcaggtgtaatgataatatcaaaaagtccagttaaacccgctacttcaagcgtttgtaacgcaccgggtaacgcactccccgtagcaatggcaataggaggcttttctcctagtgatgaaataaaatcaatcacttcttgaataggagcggcaccttgatcggctagcatatctaaataaatggctcgtttttcatgagctacttgagttggctccatcgagcaaccatatttctcatttaaaaacagcacaacatcttgggcggatttgccaccacaactataaaattcgtcttcaagaaaggcttcataaggcgctccggccctctttaatgcctctcgccaagcatgataatgcaccggcatgctatcgactaaagtaccatccaaatcaaagatgtatccctcaaacgttgcttccggcaaatcaactcgttttttcatgtcggcatgcttcataacgtttttactcgataaacaaaagcattccttatgacttatgcaaattttccggacatttaccgcgaaaaaagaaaccctatgcttgacaaattctttgtatgcgttaaagttttccgcactcgaaacgaaaaccgaaacttttttataacatggctaatacaaaatcagcactcaagcgtatccgtcaaacggcaactcgtacagctcgtaaccgcgcaacgaactcccgccttaagacccttcgtaaaaaaatcgccgtagccgttgaaaccggagacaaagaatccgccgctacagcatataacgttttctcttcagcaatcgacaaagccgctaaaacaggtgtaatgccagccaaccgtgctgctaattacaagagcaaagctgctaaatccatcgctaaaatcgcctaagttttaacttcggttttcaacgacttttatgacaagccgttctgtttatcagagcggcttgtttcgttatcatttggcatatggtagacccatcacgcatcgagaaggctcaaacaattatcgataatcccactgattttaaagtatgtgaatcatgtggatccatcgtgggccgctgtacggaagtttgccaaaattgcaatgcgtaccgcttcgatgaaaaccctgaatatgtagttgagcaagccgttttacttgcatccagagcacaacgctctgtgacccctgaggatttagcttaaatcctaatgatcttttatcgacactaaaaaacgcaaggaaaacctccttgcgtttttttgtataatatcgctgaagcaataactactacttccttaaatctgcgatacggttaataaccgcctcgatcaaattggcaggacaagaagcacctgccgtaatacccactttaataggtttacctaaattttgcacgacaggaggggtggacatactttccaccttcttcgtcgtcgtattaaatgaatcgattgcatgcaaagattgaatggaatcagccgattcaataaagaaagtaggcacgatattttttgcaatatcgaccaaatgagtagtattggaactattgtgaccaccaacaacaaaaaggacgtcaagatgctccgagagcaaatctttaagggcatcttgcctatcttgggtagcaccacaaatcgtatcatagacaaaataattatcatcatcaccatcacgatcaatgatggcttgtctcaccatattttgaatatgctgagtttccgttttaagcatggtggtctgattagccaatcctaactcctctaaatcttcatcaggatcaaatccgggagaataagcacctttgaaatgcgctaaaaactcttctttattacctttgcctaaaatgtagtcacacaacattcgggcatcattatcatcataaataacgagatatttccccgtaccgcgatcacctaaagcacgagaggccgtagccgtagtctcttcatgagaagcttttccgtgaataatggatgttacacccattttggcgtaattttttactcgcttccaaactttcatcacatcaccacaagtcgtgtctaccacatgcacgcccttttcttcaaggcgattcattaaatcaatagatacaccaaaagccggcacgatcactacatcatttgcctcaagcttttcacaattattgaccatttgcccccaaggtagtttaactacacccataccgatcaattgacggttcacctcgggattatgaataatatcgccaataaggaacattcgctcggtagggaaaaccttccttgccgcataagcaatatcaatggcacgtcttactccattgcaaaaaccaaattcctttgccaaatgaaactccgtatggcctaaattatatacattaccggaggctctgatatggttaatcaaatcactttgatagtgattttcgatttccttttccactcgctccatgacttcggctcggcgtacgttaacacgtgaagaagacgctttttgagacatagcactatcattcatactttttctcttaggtcaagctaatcaccacttgccaaaacacccgaatcaatgtattcacagggcatgattttagcgttggcacccatgaaagatattactgatctggctttcattaaaacgcttaatgatttaaacaccttaccggactattttatcaccgaatattttagaacggttccccatcacaaaaaactcgatccctacatcctccaatcgatcaccaaaaacccgacaaataaaccggtctgggggcaattggtaggcactgacgcgccctcactcgtacgagatgcgctcaaattattacaaaacggcgctgcaggcgtcgatttaaacatgggatgtcctgcaccacttgtttgccgtaaaaatgcaggcgggggcatgctacgcacgctacatgaaatggatcaagtcttaggacaactgcgtgatgccttacctgaaggaaaattttccgtcaaatgccgtataggcttcgaatatccggaagaatttgagcgaatcatcccaatcatcgccaaacatacccctgatcgactctgcatccatgctcgtaccgttaaagaaggatatcgtagctcggtacaccctaaatgggtagcttttgctaagaccatctattcaggtgaaattatcgccaatggtaacatcgtcgataccgaaacggcacaatcatggattaatatcgcacagcctcacggattgatgataggaagagctgcgctaagaaacccttggatttttaatcaaatacgcgaaatgatatcgggggagaaaattacgtctcacaaactttcagatctcctcacctatattgaaagattattagaaaacattaaaccactacaagaccccttgattgaggaaaagcttattcatcgtattaaaaaataccttgtttacacggtgcgaggtctagatccccaactagactattacatgaagcgcagcaaaaccgaaaaagactttctgaatgtgtgcaaagaatttctcaataacgatgaagcctttcctatcttacctcctgaagatacacacttatttgcacactttggtagcttgctatgtgattaaaaataaggtaaatagttatctccatttcaccaatcacatgaagaatatccttttatcgcttcttttcatcagcatcactcatgcttctgaaactcctaacgatttaatcaagggagtggaatttgtcatgcaacacatgccagctcaagataaaggaaccatcgatgagacacgcatcactcaagatgtaaaattagctttaaaagtaaaagaaacttatccatgggcccaaaataccccttgggaagtttaccaaaatgatgtcttaccctatgcggtagttaatgaagatcgttgcgattggcgtcagcaattcttagaaaagtttgcaccacatgtggcagattgcaaaaccggcaccgaggccacacttaaaatagcctcaatcattggagacaccctcaaagtaggctattccattcagagaaacaaacctcaccaaggcgtagatgaatcactaaagtcaggcaaagtgtcttgcacgggacaaagcattttactcgtttgcgcattaagatctatcggcataccggctcgcatggcaggtattttgtcttggaaccatattcgaggcaatcactcatgggtagaggcatggtgtgatggagaatggcaaatgatcgagtacaatgaaaaaaacttcaatactccgtgggtcatgcacaatctcaccatgattgatgaaaccaagcccatgaataacgttattgccacctcatggtctaaaaactcacaagagcccgaacttttcttccccatgatttgggaagcaaaagttaacacgaaaacatcatcaattgtttttcctcaagaagctcgtagcgttccgggcatcaatgtaaccaaaagatacggcaaacttgcaaaagcatggtatgaacaacaagcggacaaaacacccggctctgaactgctcatcgaattaaccgaactaaaggataaccaaacgcacagaatcgaagcaaaagcgacgcttagtgacgaacaagggaaaaccatcgcagaaggcactacaccatcatccacggcagatatgagacaatttctcatattaaaactaccgcaagatgtacaaacagccaccctcaccatcacgcatcctgagtctgaccaaacattcacccaaacagtcaaacacacgcaagctcctttacaaatcattcgagcccaaatgcgttaacccatacatctatctcgctatcttcgatcaccctactaatcatcatgaaaaaaatccctctttttttcaacccgacagctaaaagcgcgagagctgcaaacttccgtcgatggtcaaaaaatcatgacgacattcttcaccacattgagccatccagcgccaatgaaatggtcgaaatgcttaaagaagaagcaaagaaaaacactcccgttgtggccattgccggtggtgacggcacattatgccatgcagccgctgccctgcagggcacggaaacacgtttagggatcttccctgccggtactgtcaacgtcttttcaaaagaaatagggcttaacggttcctataaccaagctttaaaagctattacccaaaaacaaaataaaccgatcgatttattttgcttcaatggcatacctttcatccaaatggcaggaataggccctgacgctcgtgccgtagaactgaccacatgggaaatgaaaaaaagattttcagtcctatcctacggcatttccgccttaaaaatgatcagggaaactcaaccccaactcacactaacaacagacgagggtaaaacttatcaaggaaatgcaatcctatgtggcaacggtcgcaaatatgcaggccctttcaccttatttcgccacgcccaaattgatgatgggctattagatgtcatcatctacaaaggccctattagcaccatagcccacacactacttaatcactttattaaaggtggcgcaactgaacctgacggcttccattatgaatatattcaaataaaagaagcccacatcaagtccaatatatccgccccatttgaattagatggcgaccatcgaggatcatcccccattcatatatcaaaaacagccccggtacacatcatcgtaccctaaaaaatataaagcggtaaacctataacaaaaaagcgatatggagaaaaatctcaatatcgcttttttaaaaaatgctctttttaccggtgtgtattaactagaatacagggaaacggtttgcatttctaattttgtcttgaatctgcgataacaataaaggatattatcatttattgcaataataaaattaaaaactatgtcttctcttcaattttcctttgatatcggttatgcatctattggttggtctgtaataaaatcattaactaaccaagacaatcctgaaatcatcgcagcgggtaccgtactatttcctaaagatgattgtttggcatctcatcgtcgcgattatagacgactgagaagaaatacgagatccactcgccagcgcatggaaaggattaacaaactattgatatcggtaggaatactaccaaacgatatcgatttagagcaagggcacatggctccattctttttagcaactcaagtacttaaaaagggaaaaatccttacagctgaagaattgtggcaagtactcaaatggtatggacataatagaggttatgacggcaattctcaatggtcgaggcaagatgaagacaatgaagatgctgaacgagtaaaagcagcaaaaaatcttatgcaacaatatggcactgataccatggcagaaactgtgtgtcgtattctacaacttgatatttctaaagaccaacctaattttacagatcaaactcctgcttataaaactttaaatatagcctttcctcgtaatgttgttgtggaagaagcgactcaaatcatcaaatctcatatcaatcaaataccgggattaagcgaagaaatcgctaatttattgatccaatcgggcgatttatcctcggaacaacgtgaatttttaaaaacgaaaggaatcgcgtatctccccaaacgctaccgaggaaatttattgtttgggcaactcatacctcgttttgataatcggattattaaacgatgcccccttacttgggctcaaatatatcaaactgcgatcagtgaaggtaaaacagaaaaagtagcaaaggcacaagctgagaaactctccaaagtagcacaagcaaacactaagtctttttatgagtacagattcgcccgtcttttagcaaatataagagtcaaaggattacctcttaatgctactcttaggcgtaagatatttgaattagccaaacaattaggcaaattgacagctaaagacattatcgagacaattgaaaaagatcatgaaaaaggagtagatacaaacattatcaatatgtttaccctacaccctgattctgaagaagccctagtattatgccctgcaacagcttgtgctaaatctaatcaattattcaaagaggtctatccccaattacctcatttcattcaaaaaatgattcttaagacacttaataaaggcagtgtcaccacattggcgaaaattaagcaactcttagaacattactcagaagataccaattggctggaaaatctagtactgcaaaaagcgaaatcagagctaaataaatccaaaaaatcaaaaaaggaaagcacacctaacacattagaaggaataactcaaacactttggaataaaacgattaaagcaccaaccgcatcaggcagggcgccatattctcagactattttaaggcaagttttagatgaagtattggaagggtatgacccaaactcacctgcacatagcgaacaacatccacagggagaaacaaaggaaaaagatggagtgctctatcctctactcgatcctaactcgtcagttagacaacttcaaaacgaacgagacctaagcgatttaacaaacaatcacctcatccgacatcgtctattgattatggaacgcctaatcaaagacatggtcaaagaatttgctcaagacgatccaaacaaggttactcatacaatcatagaagtaacccgagaagtcagcaaattttccggcatgactgctgaagaaatcgcaaccgaactcaatgctagaaatcgtgatttcaagaaagcatctgattatctgcaaaaaaactatacgggagaaattacaggaggactaatacgaaaatgccgtattgctatggatatgaattggacatgtccatttaccgggaaaaaatacgatgctattcatctacctcagatggaaaaagagcatatcgtaccattctcgaaaaggaacacccactctctttcggcattagtattaacttatcccgaagtgaacaaaatgaaaggggcccgtaccgcacttgaattcatcaaagaatcacaaaacacctccgtcccaggaaaacccgaactatctatcatgaccgaaaaactctacaaagatttggtcaataaactagatattaaaggtcacaaggatgatgaaaaacgcaaaaaggcaagaaaacgccttcttttaatagataaaatcgctaataaaaagaaatcagcaaccgttgaggataatgaagatcaggatttaggctttacagaaggggctttaacccaaagttcacatcttattaaactagccatcaaatcacttcagactctcttaccttcttcgcaatatttaaccatacctggggctgttacatccgaaatcaaaaaagcatggaagttaaccggctgcttagctcaggcctgtcctgaaatcttagatgccaatacaggaaaacctaagctcaaagatgacatccgtggcattactgatttgcaccatgcactcgatgctttaaccatcggtttgacacaacattacctttcagccggtaacaatggtactgcttggaaagctatccttaaacgctccatgaaaaattcgattatcgaccccgatgatcacatgaaaaaagtcatctataaagtgcggtcaggcaataaccaacttcaattattagatttgccttcccaagtcaaaaataccattgcgaaagcgttaaatgaaaagagaatcgttcaacacattccgtcagatcaaagtggcgctaaattagatgaaacgatacggagagtgatatctacagaaagcaaaaatggtaaagtgatgatttcattagctcaaaaaaaatcaagagttgaaaacggcaaacgtattaaaactttaaaaactgatgagaaaaaacctagcatgctaataggcattaatccaacaggtaaatctaaactcaaaaaaatcaagggggctattgttatcaatgaaaattacggtatcgcccttgatccaactccaacgatgattcctcattttcaagttcatcaaaagttaatggatttaaaagaaaaaaatggaggtaaacctgtgagaattctaagaaagggtatgcaaattaatatcaagaatcccaaaaaacctgaaaaagatggcatttgggttattcgatccattaaagattcttccagagatggactattaataaatttacagcgtaaggagttaaatatgaatatagaaaacaaaaatattaaaaattggagggatgttagagtctctactttgttaaatcatttctttgaaattcttaatcaaccttatacaggaaccccatcatgacatgtcatatcatattttgagtatcaattcacctaactgtactattacgtgctccaaaggacaattaatttacattgattcatcacaacaaaagaaaactatccctttagaagatgtagcaagcattgtaattgcttcttttaatgctcaactaacttcttcttttctcatctcagccgcctcacataaaatatcggtcattttatgtgaggcccataaaccggcagctatcttgctgccggcagaccgtgccagcgatacggaattactaattaaattatctcagctcagctcaaactttaaagctaatttatggacaaaaacagtacaggcaaaatgtcttaatcaattgaatttggctattcaatgggatgcatctcacccccttatcgatcaatttaaaaccatagcatccagacctaataacaataaagaggccttatgtgcaaaaatgttttggaatgtatttgcccatcatcatgattccacctttacaagaaatcaagatgaagatgggatcaattcattactcaactacggatatgcggtcctactttcttccgtcttacaaaaactcttcgctttaggtatcgacccaacttttggcatatttcatcgccctagagaacatgctacacctctagcttatgatttaatggaaccttttaggcctattattgatgcaaatgtctcacgttggatttttgctcaagaaaatcaatcacctttgcaaataaacgaacaatttaaacgccatatcgtagcttctctacaagcttctatcatatatgattataaatccttgactctgcaagaagcgattgagcaagtttgtagatcctttaggcaggcagtgattcatcaaagccttctcaaatataaaccatggaaaacctcaactataaaatgggctggctcgttgtaatgtttgatcttcccgtcacaaccaaagaagcacgacacgcatacacgaaatttcatgatttcttgttggaagatggttatataatgatccagtttagtgtttatgctcgagcttgtgtaacctatgcacgccaagaaactcatcttagacgacttaaacaatatacaccacctgacggctctatcagagcttttattcttactaatgctcaatgggaaaaaatgatgattttctatggatcaccttcaaaacaaataaatcctgaagaacttccggaacaactcttattttggtaattttttgtatgctaaaatttaaaaatcattacgaaaaattcttaaaatttatcaataaccaactaaccaataaaaaataagctgggtatggttatacccagcctgtttttagattcaaggcaaaacacatgaaacaagaagaactgaacgaaatttgttatacccagcctgtttttagattcaaggcaaaacacccgaggtactaataccccgggtgtgggagttatacccagcctgtttttagattcaaggcaaaacgtatggtaatggtggtcaaatggtagaactgttatacccagcctgtttttagattcaaggcaaaactttgtacaatgttggcgaatcggctagagtgttatacccagcctgtttttagattcaaggcaaaactgctttagctatgccgtctcgtccttcaaggttatacccagcctgtttttagattcaaggcaaaaccttttcgctcatgcaagcattttgagctacgttatacccagcctgtttttagattcaaggcaaaacgaaatccttgcaagtatcaaggatgattttgttatacccagcctgtttttnnnnnnnnnnnnnnnnnnnnnnnnnnnnnnnnnnnnnnnnnnnnnnnnnnnnnnnnnnnnnnnnnnnnnnnnnnnnnnnnnnnnnnnnnnnnnnnnnnnnnnnnnnnnnnnnnnnnnnnnnnnnnnnnnnnnnnnnnnnnnnnnnnnnnnnnnnnnnnnnnnnnnnnnnnnnnnnnnnnnnnnnnnntttttagattcaaggcaaaacgacgtttcgcaacgtgaggcggtcgaatcagttatacccagcctgtttttagattcaaggcaaaacttaaatatctaatcatatgctatttccagtgttatacccagcctgtttttagattcaaggcaaaaccttgcttagggaatgcgtaaatctcacgcagttatacccagcctgtttttnnnnnnnnnnnnnnnnnnnnnnnnnnnnnnnnnnnnnnnnnnnnnnnnnnnnnnnnnnnnnnnnnnnnnnnnnnnnnnnnnnnnnnnnnnnnnnnnnnnnnnnnnnnnnnnnnnnnnnnnnnnnnnnnnnnnnnnnnnnnnnnnnnnnnnnnnnnnnnnnnnnnnnnnnnnnnnnnnnnnnnnnnnnnnnnnnnnntttttagattcaaggcaaaactctcggaattgtttaatattttccgtaaatgttatacccagcctgtttttagattcaaggcaaaacccgatctcgtcgtaaccatgtctttacagtgttatacccagcctgtttttagattcaaggcaaaacacgttgtgaaacgtcatggcggttttttcagttatacccagcctgtttttagattcaaggcaaaacggaaactattagcattcctgtcacaaagatgttatacccagcctgtttttagattcaaggcaaaaccgtcgccttcaagccaagctaagtgcttgggttatacccagcctgtttttagattcaaggcaaaacattcgtgcgtgtattttgcaagtgctgcctgttatacccagcctgtttttagattcaaggcaaaacaaaatgagtgccactccacatgaccccaacgttatacccagcctgtttttagattcaaggcaaaacttgtgacggtgcctcaccaagcttgctaccgttatacccagcctgtttttagattcaaggcaaaacaagaagcacaaggcgtaacactcggtaaaagttatacccagcctgtttttagattcaaggcaaaacttaaaagccttggttctcacttgtaaccatgttatacccagcctgtttttagattcaaggcaaaacaagaattaccattcattgatataacgtatggttatacccagcctgtttttnnnnnnnnnnnnnnnnnnnnnnnnnnnnnnnnnnnnnnnnnnnnnnnnnnnnnnnnnnnnnnnnnnnnnnnnnnnnnnnnnnnnnnnnnnnnnnnnnnnnnnnnnnnnnnnnnnnnnnnnnnnnnnnnnnnnnnnnnnnnnnnnnnnnnnnnnnnnnnnnnnnnnnnnnnnnnnnnnnnnnnnnnnnnnnnntttttagattcaaggcaaaactcaggttggtcacgtcggagtcgccaataagttatacccagcctgtttttagattcaaggcaaaacacgccaacgccaacaggaacatgcccgcatgttatacccagcctgtttttagattcaaggcaaaacagccgtatttgactcagacgccgataataagttatacccagcctgtttttnnnnnnnnnnnnnnnnnnnnnnnnnnnnnnnnnnnnnnnnnnnnnnnnnnnnnnnnnnnnnnnnnnnnnnnnnnnnnnnnnnnnnnnnnnnnnnnnnnnnnnnnnnnnnnnnnnnnnnnnnnnnnnnnnnnnnnnnnnnnnnnnnnnnnnnnnnnnnnnnnnnnnnnnnnnnnnnnnnnnnnnnnttttagattcaaggcaaaacaatatcgagcttggcgaaaaatttgacattgttatacccagcctgtttttagattcaaggcaaaacaaagacaaatacctggcaccgcttttttcagttatacccagcctgtttttagattcaaggcaaaacaaaagggctaagacaatggctcaggccaaagttatacccagcctgtttttagattcaaggcaaaacaaatacggcagttggtgcaaaagacgtagcgttatacccagcctgtttttnnnnnnnnnnnnnnnnnnnnnnnnnnnnnnnnnnnnnnnnnnnnnnnnnnnnnnnnnnnnnnnnnnnnnnnnnnnnnnnnnnnnnnnnnnnnnnnnnnnnnnnnnnnnnnnnnnnnnnnnnnnnnnnnnnnnnnnnnnnnnnnnnnnnnnnnnnnnnnnnnnnnnnnnnnnnnnnnnnnnnnnnnnnnnnnnnnnnnnnnnnnnnnnnnnnnnnnnnnnnnnnnnnnnnnnnnnnnnnnnnnnnnnnnnnnnnnnnnnnnnnnnnnnnnnnnnnnnnnnnnnnnnnnnnnnnnnnnnntttagattcaaggcaaaacacgtagagctattagtcgctaacaatgatagttatacccagcctgtttttagattcaaggcaaaacgctgtgaaagtgtataagtctcttgtactcgttatacccagcctgtttttagattcaaggcaaaacacggtgtaaagtgttataattgtggtgaatgttatacccagcctgtttttagattcaaggcaaaacgccgatcctgttactaaataccaaagcaccattatacccagcctgtttttagattcaaggcaaaactttccacggaatatcataaatagcaagtgcgttatacccagcctgtttttagattcaaggcaaaacaccttgatgaagttccttatgatgaggatggttatacccagcctgtttttagattcaaggcaaaacaaagggctgtaggtcggtcttcgagagggtgttatacccagcctgtttttagattcaaggcaaaactaaggcggtacaggcttcaacagaatacaagttatacccagcctgtttttagattcaaggcaaaactggtaggggcagacttaaaagtttcagtaagttatacccagcctgtttttagattcaaggcaaaacaatcgcaggtaacttacatgaagttcctatgttatacccagcctgtttttannnnnnnnnnnnnnnnnnnnnnnnnnnnnnnnnnnnnnnnnnnnnnnnnnnnnnnnnnnnnnnnnnnnnnnnnnnnnnnnnnnnnnnnnnnnnnnnnnnnnnnnnnnnnnnnnnnnnnnnnnnnnnnnnnnnnnnnnnnnnnnnnnnnnnnnnnnnnnnnnnnnnnnnnnnnnnnnnnnnnnnnnnnnnnnnnnnnnnnnnnnnnnnnnnnnnnnnnnnnnnnnnnnnnnnnnnnnnnnnnnnnnnnnnnnnnnnnnnnnnnnnnnnnnnnnnnnnnnnnnnnnnnnnnnnnnnnnnnnnnnnnnnnnnnnnnnnnnnnnnnnnnnnnnnnnnnnnnnnnnnnnnnnnnnnnnnnnnnnnnntttttagattcaaggcaaaaccagttagccacatgttttcttgctcgtcaagttatacccagcctgtttttagactcaaggcaaaacacataaatccttataagccaactacttatagttatacccagcctgtttttagattcaaggcaaaacaaatctacttgtttgcgttggtgctattctgttatacccagcctgtttttagattcaaggcaaaacacataaatccttataagccaactacttatagttatacccagcctgtttttagattcaaggcaaaacagctgcgttcaggaactcagctaatttagttatacccagcctgtttttnnnnnnnnnnnnnnnnnnnnnnnnnnnnnnnnnnnnnnnnnnnnnnnnnnnnnnnnnnnnnnnnnnnnnnnnnnnnnnnnnnnnnnnnnnnnnnnnnnnnnnnnnnnnnnnnnnnnnnnnnnnnnnnnnnnnnnnnnnnnnnnnnnnnnnnnnnnnnnnnnnnnnnnnnnnnnnnnnnnnnnnnnnnnnnnnnnnnnnnnnnnnnnnnnnnnnnnnnnnnnnnnnnnnnnnnnntttttagattcaaggcaaaacagaaaaagacatcccactaacccacgccgagttatacccagcctgtttttagattcaaggcaaaactgattttagtggtactgccaaaacaaattagttatacccagcctgtttttagattcaaggcaaaacagcaattaggaatgaaaacatattgaaaacgttatacccagcctgtttttagattcaaggcaaaacatacaacaccccaattacaagagtttactagttatacccagcctgtttttagattcaaggcaaaacacgtagagctattagtcgctaacaacgatagttatacccagcctgtttttaaattcaaggcaaaaccaaacaagatgtattggattccgtggaagcgttatacccagcctgtttttagattcaaggcaaaaccaccgccatgacggctatctcggatgttcggttatacccagcctgtttttagattcaaggcaaaaccacgtgtattcgttattgctacccgatggcgttatacccagcctgtttttagattcaaggcaaaactagaccccaaacaccctcgccgatgacggtgttatacccagcctgtttttagattcaaggcaaaacataacgctccggaggctagacctcatgggggttatacccagcctgtttttagattcaaggcaaaacccgtaaagccaaaagccgtcaatgcccccagttatacccagcctgtttttagattcaaggcaaaaccggtgcaggtgtgattaaagtcggagctgcgttatacccagcctgtttttagattcaaggcaaaacatgacaatgacgaaccctctttgctgatcggttatccccagcctgcttttagattcaaggtgaacatgtctaggcgaaattataaaattctgaataaaaatggtataaacgtataaaagaatggttcatgaatgactgtttacttaacccccatttcctttaatgcatctatagcgctcactagaccttgacgggctgctcgtttaaaccatttttttgcctttttttggttttggggcactccaaaaccgtttgaatgcatgaagcctaaattattttgagcactatcaagtccttgtttggcagctctacggtaccattttactgctagcgaatcatttttctctacaccctgcccatcataataggcaacagctagattatattggccgattgaatcgccgtgtttagcagattttttgtacaatttaaaggctttttgataatctagatcaacactcaacccctgggcataataataacctaaacaagcctggccctgagcattattttgtttagcagattttttaaaatatttaaaagcttttcccgtatcttgctttacaccaataccttcagcataacatctccccaaatgtacttgagcagatgaattaccggataaagccgatttactataccacttaaatgcctgtttttgatctttatctattcctctacccgcttcgtagcattcacccaaagcatccatggcatcatagccacctctagacgcagactttttgtatagtttaaatgctttctttttatccaatttaacaccagtgcctgtattataacaaatagccaaattatacattgcctcgacatcaccttgtttgcccgctaggcgaaaccacttcgcagcttgataatcatccttattagttccaactccatcaaaataacaaacacctagataaaactgccctaacacatcgccttgcagagcagctcggtgataccatttaaaagcacgaaacacatctacataagtaccgaggccatccatgtaacaacgccccaatttatattgactaacggcatgaccttgttttgcagactttcgataccattttatggcttcaacttgattttcctcaaccccaaacccttcttcataacttaaagctaaattatattgagctagcatatgcccctgacaagccgcttgataaaaccattttaccgcttttaactgatctttttttacaccttcaccctggtcataacaaacacccaggagatattgtgcctcagcacattcttgtttagccgcttgtttatagcatttagccgcctttaattgacttttggtacaaccttccccctcagaataggcgcgaccaagattcaattgtgcttttgcatatccttgtttagctgatttacgataccaattaactgccttaacttgatcactctttacaccacgacccagatcataactaatggctacattgaattgagccacctgatgaccttgtttagctgcccttttataccattcaaaggctttcaccacatctcgcttaacgccatcaccggcataataatataggcccacgatatactgagcttcaacatcaccatcgtgagctaatttaagatatttcttaaatttgagatacttcttattttttatcacgtcagatgcatgttgagaagaagcttcatctatatgattactaatggccacactctaaagctattaccattgtaaaaaatcgtcaagataacataccacaatgacaatagttttatagccaatctaacgaggaaaacgtatgaaccgttgttaaaaaatatgaacttggctcttaatctacctacgttcaaataaagctactatatcaaaatcgtgttaaacaattccaatataacaaattacgcatgaaattatttatctcatgcgtaattgattacaaaatattctatttatacattacgtaccttgcggcgcagtaacattcccattaggcctacaacgcttaataaagctgagcttggttccgggttgtggtggatggtcatggagatagatggggagattgcatatccgttatcattgccattgactccattgacaaaaaatcctttatccccggataagagcttattgtagtcatcaactagattcccattttcatcgtaggagcctgagccattataataagtactacaatgtaggtttgggcttgcccatgagtggatatcataagaatcactccaagttaataaggaaccattggcttgagccatatcagccatcaattgatcataggtgcttgttcctccgccctgagcattggcaccagcagatgtagaaacgaaatgaactgaataagatccttctgtagaaatcatcatatctaaatctaaaacaacagatgagtcgcttaactgaaagccattggcagacataccttgaatcacaccggaagaatcaactacaacagcatagtaagtacctgcattgacgctgtcattaattgagatcggatttagatttagagaaatagcgcttaaacccacagtggagtgagtactcatccacgagtctttttcaggtccttctaagcgaatagaagttagagcaaaggtaaaagctgacatttgtttgtaggctgtttcattatgagtatttacagccgtgtttaaaatggtttcggtatgaaaagagtcttcaaatgatctatccgcacctcgcgacgcagaaaaaccatttgcaatacttgcagatgtcattaaaaagaaacaggctaatgagtacaataaaacgctaaaggaatttttcatgacgccatggcttatacaggaatttatttaagagtcaaattcgtcacaaaaatgcgattttcgagaatttagaatgggttatctaaataatagaacaaaatcacataattcttttacaaaaagatatttctaaaaaatatattttttagaaattgagcgttcaaaattaactcaggaatagtgtcatactataccacctaacacccaaacaagataaaacgtttattacgtgattattacaaaatttacacacgttatttaatgtatgtaatcatgccgtatgatggtataaaaaaaaccctgacacatcgaaatggtcagggctataaaaagtgaatgcaaaagttattaaacttttggtttgtcttcagaattaggagcaggagctgtctgttctgactgggtataaggagcagtattcggcggagcaatcggggtggatgctaccgtcggagttttaggttgctcttttgtttgatcggaattcatcaattcggtttcaaactcattttttgcctttttaaattcacctaagcttt

SEQ ID NO: 2519 - DNA, 23546 bp, synthetic construct
  variation 4546..4547: note = n is a, c, g, or t
  source 1..23546: mol_type = other DNA
  misc_feature 1..23546: note = Synthetic
tatctttacatttggtacttcattcaaattgagatgagcccacccgggtgctgctgaaattttcttatttttttgcatttttgctccaattctaaatatcaaattttacaaattattatctttgttccggttttttccaattctgccattcgctcttttgtgatattactatcagttataaacgcctctgcctccgaaagcgttccgttagaagcgagatctgtacggcctatcttagaactatcggagagaatataagttttttgggcgcggcgacgaatcttctggtcaactttggctattcgcatatctgcattaaataattcgccatttaagccgattccatcagccccctgaaaagccagatcaaccataaacatatcaagaaccttctcggcaaccacaccagttaaatcaggactgccctttcttaatatcccaccaagaagaactgtttgcacacctgcagaaaactgcaatatcgatgccactgcgagactaggtgtaattactgtcaaatcactaaaatcttttagcaaatacgcaagctcgagcgtggtcgtaccagtatcaataataatcttactgccaggtttaataaattctaaagcctttttggcgatagcattttttgcttttttgttggcactgcgccttgcagcaaaatcaaactcgaattccattctttcggcgggcatgacgcccccatgtgttctggttatatggccctggttctggagtttatttaaatcacgatgaattgtcatatcactgacattaaatttcttcgccaatctacttacatcaaagacctctcctgcctttatcatccggcatatagcattttgtctttcgtgtgaaatagatttttgtgccatctgcaattccaatatatgttaatttaatacaaaaataacatattataacattattgtcaacaactaaaaaaataattaggcatttttttgtattacacttgacttatttctaaattggttataacatttaaataatactaaatcgagttaaagaatgccggaatacaacagattatataactctttaagagaacagattttagacggctattatgccgccggtcagataatcccaccagaaaggttgttgtgtaaaagcttcggagtctcaagaattacagcaagacatgcgataagacttctgcaggaacaaggacttgttgaaaggtttcaaggcagaggaacttatgtacgcagtattaatccgaaaaaagtatctattgtaaattgtgatttttcaggttcgattcgcaaaaacgccccggaaatgacaaggaaactaatttgttttgaaaaaatcctgcccccgcagcaaatcgctgaacagcttcttcttaataaaaatgaagaatgtatgctggcgaaaagaagcgatattatgaataatgagccgctcgcttttgaccgagcttatatacctttaaaatattcatcgtctctaaatgaaaaactgcttgtgaaaatagattttctggagatgtggacgagatcagaaaaaataaagatttcttatggtactcaaaatattgaagctacgggcgcaagcagcgaagatgttgaaatattaaacgtcaaacctgaaagtccgatgctatttgttactgacgttgtattcaattcagacggcaaagctgtggcggttttcgaatctgtatatcgcggtgatagaataaaatttatttcaacaaactctaaaggcaaagtaaatgtcaacgctgttgattaaaaacgcaaatattgtttttccagacaaaataagcaggaattcggctgtactcattgttgatggtaaaatcgcgaaaatatattcctcaaagaatacgcccgataaacgagttaatgagataatagacgcaaacggcaattatctcgctccaggattcatagatttacatatccacggtctgcaaaatttcttaatagataacggcacagaagagttaaatgaaatatgcaaaattctgccgcaatatggtgtaacaggttttttgccgacagtctgccccctgccaaaaggaaaggactctgaatttctctccacactttcaaaggcggaaactactggagcacaaattttaggctttcatcttgaagggccattcctgacattgacaggcgcactgtcggaagaagcattgggaaaagcagatattgagagaataaaaaatctaataactgcggctaaaccttatcgagcaattttcagtatttctccggatttcgaagatataacaaagttaatacctgtaatggccgaaaatggacttcctgtttttattactcatacagcagccaacgtaaaacaaactatggatgcaataaaagcaggcgcaagtcacgctacgcatttttatgatgtattttatccccctgccgaaacagacccgggagtaagaccttgcggagcagttgaagcaatacttgccgacagaaatgtaagtgttgattttattcttgatggtgttcatgttgacccaattgcggtcaagatggccttgcagtgcaaaggaaatgatggagtttgccttattaccgatgccaatatcggagcaggtatgggaaaaggcatttataacttcggcagcgaaaaagtcgaaatcgataagtatggttcgccggcaagattagtcaaaaacggcggactggcaggaagcggattaacaatggacactgctgtcaggaatgcagtgtctatgcttaatattgatttgccattagctgtaaaaatggcaagtacgaatccggcaagggttcttaaagttgataaccataaaggtaagattgcagaaggatatgatgccgattttgttttaatgaacgataaatttaaagtattacaaacctggataaacggaaattcctcttttaaaaattaattgaaaaggcagcaaaatgtcaaaatttgaatttgaaccggcgaaatttatcccattcagagataaaaaggtaatttcgaaatgcagagctatcaagcgtgaggatatcgaaaaacatcctaatccagactttagaataaaagtcgtcaaagatgaagatttaacgtttttatggtttggtgatttaattgccaggctcaagcttgccagtgatgcaaacaaaaaaattgtaatgattctgccaaatccctggccgggctatcgtcatgttgcaagaattatcaacagatgcaaaataaattgtaaaaaactttgggcttttgcgatggacgaatacgctgaccagaacggcaatatcgctccggaagactgggaatttggctttagccatgcaatgctgaaatatttctactatgaaatagacgaagacctgcgtcccccacgcaagcagtttgtatgcttcagtgatttaaaagatatcaatgattacagcaaaatgctcgcggacctgggcggagctgacatttgttacagcggccccggctggacaggacatcttgcattcatagaaccggacgctccagaactgcaagccccccttgaagaatggaaaaggttgggtgctaaaattgtaacacttagtccatttacaatcgctcaaaattctctgcacggctgtttcggttttagcggagatcttactgcggttccgccaaaagcggctactttggggccggcagatgtcattgccgccaaggcacgttttgacatgcacggcataactatagctggaagcaaaagctcttggcagagacttacaactcgcctggtacttcatgggccggtaacaccaatgctgcctgcatcaatactgcaaacattaagaactgatgtttatgttactgaaacatctgcgatgaatatagaaacaaattgggacatagggtattaattgcaataagaaagggacaaaacaatggataacaaattatttgcaggtgcagcacaagttgatatttcgcctaaggattcacaatttcttttcggttatccgcacatagaaagatacagcacggggatcaatgatccgctgttgagttcggcgctctaccttagtgatgaacggacggcggcaataatggtcgctaatgatattgtgttcgtgggcaaaaaaagtgcacagcgtatccgtgaacgtattactgcacaaaccggcattctcgccggccatatcatgataagcgcaacgcatactcattctgggcctatcacggtggattacatcagcaacgaggccgatcccatcgtgccaaagaccgatcagaaatatgttgcgtttatggaagaccgtatcgtcgaagcagccatcgcggcatataaaaatgcgcagcccgcccgcgtcggccttgcttgtgccgacagtaccggcatcggcacaaaccgccgtgatccaaaaggccctgccgatatgcaagttccggtactgcttgtgcaaaacgcagcaggcacgaattctatcgcgtgtatgctcgtatgctcgatgcacccgaccgttttacatgaagactccaaattggtcagcggcgatttcccggcatactcgcggatgtatctgcaaaaacattgtgttgnncggcatgtgaccaaagcaaatacctttgccgaggcgcagcgtcttggcgagattctgggcaaggcggtcgaaaaagttcttccgacgatccaattcacaacctctgcaacaatccagtgcaaacaagcgctgctcgatctgcccaagcggacgtttcccgatgtgccgaccgcacagaaaaaactcgacaaagccattgcacaacttgaataccttcgcacaagcggcgcaccgcgtcaggaagttcgcaccgccgaatgtgattggttcggcgcagaagagacattaacaatggcaaaagccgctgccgaaggcaggctgtcgcaggcttatgaattagcattgcctgccgaaattcagattgtaaaaatcgggccgtgggcatttgtcggctggcagggcgaatgttttgtcgattacgcgctggcactcaaaaaactttttgccaatacctttgtcatctcatgtgccaatggcgaactgcagggctatattgtgacagaagaagcgagtaacgaaggcggctacgaggcgtcaaatgcgcttttgagctataaaagcggcgacataatggtgcacaatagcacccaattgctgcggacaatgtgaggtcggcgtggaatttgttgccggcatagaccttgacgcatacagaaatattttaaaaattatagaatatgatgttaaaacaacaaatataaggcaaaacattcatgaaaaagaataaaaatgtattatttggcatgtctggcggaccgacgccggtgatcaacaactctctgagaggagtcatagaaacctgtcgcgcttacccatccgaattcgggaaaatatatgccggctggcacggaattgaaggcgttctccaagaggaactgattgatatatcggctcaaccccaaaaagaaattgatctattggctacaactcctgccgcaggagctgttggcacatgtcgctataagctgtcggatgatcgtgcggaagattttgagcgaattatcgaggtgctaaaagctcacaatattggctactttttctacaatggcggcaatgactctatggataccgccaataaggtgtccttattagctaaagagaaagatctggatcttaccgtagtgggaattccgaaaacggttgataatgatctgggcgatcaggagatgacatactgcgaccatacccccggttatggctcaatcgctcgtcattgggcttatctaatccaaaatgccaatgaggaaagcctcggctgctgcacgcacaatcccgtcatcgtcatggaggcaatgggccgcggtacaggtttcattccagccgctgtccgactgggagacccaaaccgtgaaatgcctttgcttgttgcgatgccggaaaagaaaattcctattgagcaaattgccgacatcgtcagcgacaagcttaaacaacacggtcgttgtattgttgttatgaacgccgggcaggagttcgaaccttgcggtggaaaagacgcctttgggcatcccgacgggcttactgtttccgggcgtacacaaggcctatttttgaccagctatttgaattcaaagaatctttccaaatatggaccggctttgtgcaatgcttggggaattgaacagcgtatggtgtcggcgcttgcctccaaggtcgatcgagaagaagcttttctcgttgcaagacatgccgttgaaattgctctcaaggacggaacgggctggatgtccaccattgagcgtaaatccggagaaacctatcaagcgtattacgacaaggttgcgttaactgtaattgcgaactctatacgggaagtgccgaatgactggatcacagaagacggttttgatgtgactgacgatttcgttaaatacgccaaacctctcatcggtaacgagtgggccgaggtgccgcttgaaggtggcgtccagagatttgcccgtttcaagaaaattttcgcggagaaacggtgtaaagagtatgtgccgatgatgtacaggctatagaaaaaagcgggaattaaataataattaatgataggagtacactgctgtccggtaaaagtttcagggattgaaggacaaaacatgcctgcggcgcaaaaagtaacctttggcttcagctaaaacaaaatacaataaaatgtgaattcctgacatctgaaactactgaaccagcaactctcggagctgtaaagctgacttccggattatgttagtagccgcttattaaaaaaaatggaaacgcgttcgccagtcgaaaattcttttatcatcttttttgctgtgcaaaattgtacataaaacattaatttagttttttaaggcaaaagtatatgtatccaaaaatgccggattttgaatttctttgtgaacagataacagcctatagtcagtttcaatatgagtgtggtgccaaaggtgttatatctattatcaaagatgccgaaaaatatctcagcaaagcgattgctgatctaaaaaaactacctatcgataaaaagaatgcccaaaaagagcctaataaattaagtgaaatacgcgaactcagatcttcggggccacgaagattgtgggaaaaaataaatacagaaatatatcttaacaaactggaaggcgcattgcttggaagactggcgggctgtacacttggtgcatcggtggaattttgaccaattaaaaaaatgcaggaacatgcgcattacttaggtcaaccttttccaccaactgattactggcttgaaactcctgatccttatcaataaaatgttggcatgcgtcaaaagtgactgacgcaaatggctttttttatggttttttcacgtaagagacttgacaacaaccacaacaagtgtttatattaccacaacttagattttgcgcccgtagctcagctggatagagcaacggatttctaatccgtaggtcacaggttcgaatcctgtcgggcgtatttctaattttctgcgtaaatctatagcagtacaagaggttatatttttcttaccttcattcacgtgaatttcaccttcgctggattttgctgcatttttatgagttttgatggcattttcattaaaattcgcagtaaaattttctggcacatcacaagtacctgttttggctttttcttctctcacaatcttgatttcaggcaatttacttaccgctttagctttgtcctctaaacttatatgagtatatatgttcattgttaaatttacatcgctatgacgcatgagcttttgagcatcttgcggtaatacaccggacttggcaagtaatgtgccaaatgtatgtcgcaagctatgaaaatctacaatgccttcctctgttttgtattctatttcagcaatttctaaatctttacgaatcatcttggcgcctgcatctttccaaataagaaaggctttccgatgaggtaatgcaagatgctctttaaaatactgctcaatatcttttgccagttctggtattaacggcaaagtatccgtctttctattttttgcattagttgctttaatcgttacattaggttctttacaaaatataaagtctctgcgttccaaagtataaatttcgttgtaccgcagcccagttcccaaagctaatctatatacaaggcttctttcatatccggttaagccgtgatgttttttgccaacgagtgtttttgatataagtttatctatttctgctgttgttaatactctgcgaggtcttttcttatcaagatttttcaattttgttataaattgaactggattttgcattatgcgttctgtttttagcaaccatctacagaatcttttaaaactttctaaataactattgatgcaattagcagatttacctgcattacgtaaatccgacatccaagtttcaatgcgttcagttttaatatccgatggcaataagaatttgcatttttcgattactcttataactttagcgactgattctcttacatgatgtgaacttcgctcattagattctaaacttttacgccattgaagcaaatgccccccagtaacttcataaatttctttttttgaatttttagcttttattttactaacaatcattaggggttcaaaaccagcgtttgtattagcatctaaaataccccaaccgcataatttttctctaaggctgtttggctggctttcaataaattttcttaattcagatgttaaaggtctgttgcattctttcaaagctacaatatcaacaatattttgtgcgatatatttgcttgtagatttatctggtgaagcggcaattctatgctcaatttgcagatggtctttgaaaaatatattccatcgcaaagattccttatgtttaccgctatcccaccaagtatgttttcgaatgcaatatgaatttaatgtgcgtgccatttatgcaacctctttgccttgcctcatcaattcccatttctcacgaacaggacaccttgccccaatccattcctctaattcagttttcctccattggattgttcctcctatgcgtataggtaagggcaacaatccttttttatctctttcacgaacaacgctttcgccgcactgcaatattcttgcaacttggggtattgtcaacaactctgcatcattgtgaattattgatttatctaaaggcttttcaacagctgcaataatttgggggatagtatctattttttttctaaaacgttttgcatattggatagaaaaaaggtcatcgtctacaattatgtcgcggtataagctaccatcaaaaccataatcatctgcaaggcgagcaacacgttcgtcttctggattaacaattttgccatcatcacatggagataaatatgtgtcatgtggggacagttctaaaagttgctcatacttacggattaacttctttaagtaaacctctaaaaactctacatcccttttgtttgtacctatctgacatttcatctatacctcaactgttctccccaactgtattttataatgggcggttgactgtccagtcgaggtttaaacagtccagtattaggtaattacgctatactgttccgcccatctaattatagactatatggattcacaatcaatccatttaattaataatcttgtccttctattattattatctaaaaaaaggggaggtttttttctgtgaaaaaaattgaaaaattgcataataaacctaagatgcttacacataaagagttgcaattataaaaaaattaaaaaaaataattatttggattgaattgcgttattttaaattttacgcttgggactaagaaactcataaaaaaaagagaaagccgaagctttctcacattttagggcataaagcctttattatatgtgttgacaattcaagcaatctcaaatacacatatactttatattagttattatattaataaggaaaatacttgtcaattaaatttaggagaggaaaatgaaatatcgtttgtcattagatattggggttggttctattgggtccacaattttatcattagatgagaaaaacagggcaaattcaataatagactgtggagtttgtatttttgaggtatcagaaggagcagaaaacagaaggctcaaacgttcgcaacggaaaaatacttacagaactaaaaagagaatcgatttactttccaaagaacttgctcaagccgggctttggagtctggatgatgatattcagtttgaacttataaaactctctccttatgcaatacgtgctcaaggcgtaaacggcaaacttaacaatattatggaaattggcagggcaatattgcatatggccaaacatcgaggcgccggttttgttgagatgaataaattggaattggagatagaaaaaaataacgaaaaaatcgaagaggattcagacaagaaaaagaaaaaagaactttccgaatatgccaaactaaaaaaacatctggaagaaagcggagctaaaaccatcggcgaatatttttttatgcgaatgcacaaagcctataaaaataataatatcactgatgaaaataggagatatgtacgacagagaaaaatgggcgataaggtcaaagttgattatgcaataccgagatatcttgtcaaagaagaatttaacctgctttgggaaacacaatcaaaatattataagcaattaaaaaataatgggcttaaagataaaatttacgacatattattttatgaaaacgattcccgcccttatgcaacaggaaattgtattttcattgaaaatgaaaaacggctcaccaaagcacacccattaagcgaaaaacgcagaatttatgaaactgtcaataatattagagttcaggagcataaaattcagcgaaaacttagaaaagacgaaagagataacataataaatgaattacttatgaaagggcaaaaggcgggcaaaaaatccatatctgaattattaatgcttgataaaaccttcaaagttgtattggatgatatgataaagccttatttgtattcaatgccggaatacaaagcgattgattttctaaataaacttgatgatgaaaagctggccggcattgtcgaatttatggcagaacctaaaagagaagacaaaaaggattacctgtacaatgatgaaaaagttattgaaatactaaaaaataaattcagtaccgatgatgagcggcaaatatctcaattaattgccatgcttcccaaaggcagaggttcattaggcaaaacagcaaccacaaaaattcttgaactgcttaaaaatgatgtaatttccattcgagaggcaacggacaaacttgctgcaacagataagcagtttatatcagaagaagagatagcaagagctatgcagggcgaacatgatacgctgccatattatggcgaaatattaaagactgatactcaaccaatggctgactggcaaaagcaaataaataaatcattaaatccgcttgaagcaaaatatggcaaaatcgcaaatcctgcggtgcatagaatacttaaccaacttcgcagagtagtaaatgatattataagaatttatggtaggccttatgatataaatatcgaacttgccagagaagttggaatgagcagcaaaaagaagaaagaatatgaaacccaaaagaagaaaaacaaagaaaaaaatgacaaagctgtcgaatatcttacgcataaagacattcggcttagagttacgagtacgaatatattaaaatggcgattggcggaagaacaaaactggaaagatgctttttctccgcaggacagaatccatccaagatttgaagggtttgaaattgaacatttaatacctgaaagtctcggtgggacggatgcgcctataaatagagttctaatcaaaagaagcgacaatctgaacaagggcaatatgtacccttatgaatatctgcaaaataaacatggcgataaagtttacggaatcttaaaagagattcgagccaacaaaaatatgcctgccggtaaaaagtggcggtttgaaagcgatgcaaaggaaatatttgaaagaggcgaagatgcagacaatattacacgatatctaaccgatacgagatatgtttgcaaattagcggctcgatacctgaaagtcattgtcgattacaagcaaggcgatgaaaataatacgagagttttaacaataaacgggggacacacagcaaagttaagaagcatttggaatcttgacggaattgaatatgatttgatggggctgaaggaagaagtcccggaatatctgccggataaaacccattttgtaaatcttgataccggagaagttttgtatcaagaagaactcgatgttgacggtaactggaaaaaatgcaacgatataaaaagtaaacattggaagaaaaaaccaagaatcgaccatcgacatcatattatcgatgcaattaccattggttgcgtaagcagatcagatatgcagaaaatcaactggtttgataaaagagattatgaacttccattgatgcagttgccaattcctttaagcaatggggataatgacggcaaagccagacagcttgaaattttccgaaacaccattatcgaaaaactaaaaaatacaaaagcttatcataaaccggaacatagtaaaaacggacaactccataaagaaaccgcacgagttgcatttatggataatccagaacattctgaagaaaaaatcaccaaacacaacaggcctgtttccgctattttaaaaacaagggaaaatcttaaaaacctgttaataaatacaaataccatcaagcccgaatgggataaagacattgtgcaagatgtgcaaaaaatgataaagttaaaagaagcgatagaatcacattttgaggtagctcaatcgcaattggaacaggaaaatcagcaacttgtccaaaatgggaacaaagcaaagaaaatcagcgagaaaatagtattgcaacgtgcttttaaaattgttcgcaagaataaagaatataaatatgatacttttcctgaatatgaaaacaaaaaatcatttgtcgatgtaccaaaacataacgtggtatatgacagcggaaataattattgtatggatttttatgtaacagaaaagggtgatgttgggagggaaataattacgcagtttgacattaacaaaagggcttttgtaccggaatggaagaaaaaagggcttaaacctttatggtctgttcagcagggagacatgatagaattagatactccgccagaatggaaaaaatacacagataataacaggtgctttgcggtcattaagaaattcgacaaaggttttacttatataaaataccaaactgacgcaaggggcgaaaaccggaaagaggaagaaaatatttctatcaaacaaaattttatcggtggaggattaacattttatgcagcatctaaagcgtgtaaaattgaattaacgccctttggtaaaatagcaagaaagcataagaaactttggaatggcaagaaaaaaacgactaaatagtttaagcgattggcattttatgtgggttttttgtatgttcgatttgcctgtaaaaacagaaaagcaaatacgccgggctacggcctttaggaatctacttttagatgaaggctttgtaatgaaacagttttccatctatataaaacctaccggcacattttcaaccgccagaggactcgtgaagaaattatcctcgctgattccagatggcggtttggtatcgtttatgtatgttaccgacaggcaatttgcacttgtagaaaatttcattggtgatatgccaacgacaaatgaagaatttatcagacgccagcatgaacaactgacattgttttagtttagataattcattgtgggaagataaaggtttttttctgcctcggcgtaaaccctgctcaaagaggatgcgattttgtgcataacctgattgggcgtggttgttatttcatcagttgtgattgatttgtcgagcaaacttacaagccttattttgttttctgtatccaactcgaaaaggccgtctttgaaaaatatttcgtaaacttccatatcgacaaaaggtctgaatggctccatcaaatcatccaccaaaggcatagaattattgggattgcagtgttttatgccaatgctcggattcaagccataggatacaacagctctagccgctgtgcttcgcaagatggtatagccataatttaataatgtgtttatgcccggctgttctctgtctctgataaaatcccggccaaaaatttcagcaaaataatgcttcgcagcctgaccttcacaatttgtactatcatccgattttacttcgccagcaagatttaaaagatattcatattttttatttaatatttttaaggccattgcctgctgtgtgattttggcggttataatggatttccaaagctgtttgttaagtggcttttttgtttgtgcttgaaacatcatacgcctgctctggtgaaaataaccgtcaaatggtaggacaatactttttggcaaatgtttattgtcgcagaatattacagggatatttctttgagcaaattcgagcatgacattatgagtataacaaaggtcgtaggcattaaaaattactgcctgaatatcgtcaaaagcaacagagccgatttttttatctttctcataaactcccagtgaacctctgtcttttttaagaaatcgatttaatcctgaaatctcaattattctgccgcaatggtaggtattcatattttgttgcctttttaaaaatgcacaaataaaatggcttggattaagccaaaaccatttttttctacttcaaaaagagcgcaaaccgtttacccacaaagactttgcgcagtgatattgtatttgagattgcttgaactgtcaactataacaaaatcggcgacgcgattgaagccgcttggattgtatttgagattgcttgaactgtcaactataacttatgtctgcggtaactattatctcagtgtattgtatttgagattgcttgaactgtcaactataaccaagagtgcacgcgccagtatttgcagtgtattgtatttgagattgcttgaactgtcaactataaccatcagcggttttttaacttttcatttttaattgtatttgagattgcttgaactgtcaactataacaagccatcaacaggattaagattttccatcattgtatttgagattgcttgaactgtcaactataacgtttttgtgtagctcaatttgaaggcccagattgtatttgagattgcttgaactgtcaactataacaatagttttaaatttctttcattttttggtattgtatttgagattgcttgaactgtcaactataacgttctttcacccggccttacctttaattcaattgtatttgagattgcttgaactgtcaactataacgctgtgctttatcggtcgatgccgccggttattgtatttgagattgcttgaactgtcaactataactacctccgagcacatcagtttcagtttttcattgtatttgagattgcttgaactgtcaactataaccctttcccgcttcggctgtgtcttgaggggattgtatttgagattgcttgaactgtcaactataacgtgctcaaatgaataccttctcttttcaaagtattataaattgcctgtcttgttttattcagtttattagctacacttccgatagataaaccgctttgcaataatggcacaatatcctttgcaaataactttggtcttttcccaagttttacacctttggcctttgctgccgccataccgcgtttagtattttctctcaaattttctctctccatagcggcaattgcgaataatacgcttgcgattaattgaccgacagcaccagaaaaatctaattgctgagcggttgctataactctaacatttttatcaagccattcggtaagaattgtaataccatcttttaatgaacgactcagcctgtctaatttccaacatattacagtatcaacttttccattgaaaatatcctgccttaatttattaaatgcgggtcggtctgctgtggagcctgtgattttgtctttgtaccaaactaaattgctaaaaccatgattatcacaatactcttttaaggttttttcttgagaccataatcctttttcttggtcaagggtagatactctacaataaagtgcaatgttctttgaatgtttatatttaggattcatgagatacattataaccgctatttttattatgtcaagtataacgtaccttaaacttttaaattttaatcattagtttcgctactaaaaactaagataaattacaattttatagcttacccttataatttacactgtaactctttcaatttaactattctttacgtattctggcagagttccgaagtgctttttaaaccgtagatgtagctcctcttcgacagcggctttcctatccgtacaagcccatcttacgaccaacatagaaacatcctccccttgccggatgcgtttgcctgttgaatgaggtagagttcccaatattaagccttttaaaatacgttcacgaagattagaggctttaccaatgtgtagccgttcttgatttgctgtcttctgctttacttcgtacactcctgactctttaggtaaatctaagttaatgctaaagcttttaacttgttccactctatccattcagtccattcaagctgaataggtggtatagaaattaattccatggccattcaacgattactcctattacaaattaaaaaaaaaatgatgaaaacctaatatttcctatgtttactattatatcatattcctataacctattttaaatttcatagaatggcttgaaaagctttatactttaaatatatgcgagatgttaaaagcttatcaatataatatatattataccttttatacatacgtgttttgacttcgattttttatataaaaaagctcaatccaatacattttttacttgtttttaaacattaaataagtatgattttgtctgtaattaaatattgatattcactaaattttttggcgttccagttgaaaccggcaagtttaaaacgaaggatatgcagaaagttagtgcccctctatggggcattgcttgcatgttccttcgtaggccttgccgggcctcaactgggcatgattgtagcgatgcccttttttaatgcatcctataatcatattttctgaagtttcgtaagcatgattttattattaaagaaggttataggaaagggaaaataaaatgacagatgcagaggcattaggaatatcagtaggcttagtaataaccattgttatcgttcttatcattgttgtaggtattagtgcagttattagattatttattaatatttccaagacagcagaaaatacagagttgatgaaagaggcgctaacaaaaaataatagtccaaacaatcaaaatgaggttgcagcacaacaggactcaatacctaaaatcaaaccggagaactgtgtgaaaagccaaactgctgaaacagaaaagttaaaccaacgcttacaaaaattgcagaaagataaggaaatgttactctttcttgttacgacaacaaaccgtaaaattgctgattctccatattctgataaatttcaagtgcttctgagacagatagataatattttacaaaaaatcaacgattaaactgaaaaaccttttaaatgccctataactaaatccatgcagaaatactacaaattaacgatgaaaaccctttataccttggataaacgcgaaattcagatgttttaaaaggaacaaatcaccgttttttgcataaaattaaatgcaggtgtacggttttcccacttataaaaacgagactgttaattatatgcgggagaaatgcctatttcaatgaattttaagcaaatttgaaatattgaaaaaccgttaatatacaccttatcataaaaaattctctatctaacaattttaaaactttacttttttacaccagtccactgccgtactttttttaactcctgtgatgttttcaatccgtctccaagaattccccgcttttcgcaattctattacagatattaaatacttatgccgtcgttcttttttgtacccttgattattctttcttggacgtccgccttttttattttttgcatcttgacccattttagtatagcaactcgtaatccctccaactccattttgttgctcattaggtttaatgagcgtgcaaagtggtacattacgcgtcagcacttgtaacttttgaaaatcctttgcagtaggctgtctattatattgtggcatccattcaagatgccttaaaaagcggtcagttgaaacagcaacaataattgcttctttaccctgttctatcaattcttgtgttttatcgacagcagccagtaaatccgttcttagaccatttatagatttacctgaaaatatttcagtgtagtaagccacaatagggttattatactttgcgagttctttttgtagtgattttatttgattttgaagattccatttttgagcaggtgtagattcacgcaaataaataatgatatgtgcattgggatgattttgcaaatatggctcaagctgaaacagataatcatttgcatttgcaggttgttcagaagcaatccatgctctaaccctaatgcctaatcctaaacttcttctactcatgtttgtctccaattagaattagaattgcagtttttatgcttattggcaatgaaggccaacgattgatgatttttgctaaatcttcttgtattttactgttatttccactaaaattcgcactaaactgattttcagtgttactataacctattgactgtatgtcgtttatatttttagcccgattactttctaatccgtaggtcacaggttcgaatcctgtcgggcgtatttttattttaaggcaaattttcacagatgaaatgtcttaacgaccttatttatcttcttgcacttatcgcatacagccccaaaatcttgtaccgagttctgacacagaaccgttacaaagaagggtgggctgagcggctgggcgaaatccgcagaaatttccccgaaaaaaaatgcgtctgggtccacgctgtcagcgtcggcgaagtaaacgccacaaaaactttaattgccgaactgaaaaatcagttcccgcagtatgaaattattatcagtgcaactacagataccggcgtcgaacaggcacgcaaactttacgccgaagattttaaagtcttctatttcccattcgatttttcttttatcgtacaccgtacttttagcaaattaaaacccgacctctgcctgcttatggaactcgaagtctggccgaatttcacttcaaaagccgcgaagttaaacatccctgtcgtcgttgtcaatggccggataagtgatagaagtttcccaagatataaactcataaaatgttttgttgaaaaaactttttgcaaagtctccctcttcctcgcccagacaaaagaatacgctgaccgcttcattgccctcggcggcagaaaagatactgctatcgtcaccggcagtttaaaatatgacacagcacaggtaactgataaagtcgaaggcgcagaaaaaatagctcagcagattaacatcgcaaaccagcgtcttttcgtcgcaggcggaacaggccccggcgaagaaaaaatcattatcgatgtatttaaaaatttaaaacatcacgcacaattcagcgatgttcgacttgcgattgtcccccgcaaaccagaacgcttcaatgaagtagcagacctaatcacaaattcaggttttgatttgacacgattcagcagactaaaatccggcgagcaaaaagaagaaacaaatagcagcaccgtcatcctcggcgacacaatgggtgatttgagaaaattttattctctgtcaaccatcgttttcgttggccgctctctcgtacctatgggcggctcggacatgatggaatcagccgcgatgggcaaatgcacaatctttggcccacatactttcaacttccgtgaaaccgtaaaggaccttctgcgtgcaaaaggcgcaatcgaagtaaaagatgaaaaacagctttatgaaactctaaaaaaatgcctcgacaacccgcaattcgcaaaccagatcgcctccgcaggccgtcaggtcataataaatagtcaaggcgccactcaaaagacaatcgcagcaatccttgacttactttaataactttcgcgtgcttcccggaatcattgccgcagtcctgcgtaggaggacaaggcgcaactgaaaaatcagttaatgaaattttgaacctgctttaaaaaattgtctgcgaaattccttcgggcatactttcttgatttgtctgaatctgcgattgaaattcgctatgccctggaatcccgacctgaaacatatttctgatatattcatatctgtctcgatcagcatcgaacatgcggaattaattcgcatttcattaagataatcgatgaaatttttgcccgtcgtcctcttaaaaaatctgctcagtgccgaatcactcatatgaatactgcctgcgacctcagcaagatttatttcttcactgtaatgttggttaatatattgaagaaccttatcgattctgctgttctgctgcgtattggaatttttttcaaaaattttaacagacagaacttccttctcatcacagcatccgagtctttcaagaatttcgagcaggctcaaaagtttattaaaattcttttcattctccatagcaagcatcctgccgacaacttcatttctaacttgcccccgaaaacaaattcctgcattgcttttattcaatagcaaactgaccgttttgaactccggattattccaaatcatatctcccgcaaaacgttcatcgaactgaataacacatgcttcgtttacatcagacgtgccggctcgactcgattgccatgtgtgcggcagattcggaccgatcaaaacaaggtcaatcccgttataattgccaatgttatcgccgacaaacctttgccccctccccccgtaaatcgccgtaagctcatattcattatggtgatgccaataaaacggaaattcacggtctttccttatataatatctgaaagacaaatcacaagagggtataattttctcaaaattcgggatcatatcgtacctaaaacttatactttattgccatattttaacactttttaggtagttttaaacaaaataataccataaatcgcccgaaattgcgcagttaaaatcccccaaatactatataaattagaagcagattttagaatttttataggatttatatgagaaaacctgatttcaataacttgctaaaagtccttaacagacaaaaacctgatcgtccgaccttattcgaattctttctgaacaagtcgctttacgaaaaactcgccggcgaaaacgtcgtcgccgaaaaccgcgattggcaatggaacacagtctgtccggtactcattaacgcgttcaaaaatgcaggttatgattacgtcactgttcagggcagcacatttacttttccgatggccgaacccgaacacaaaaaaacaatctctttgaatgcaggaaacactatttacgacagaaacagttttaaagcatatcaatggccttcccccgaagacagcgattattcccagctaaaaaacgcgctccaattactacctgaaggaatgaaactggttgtttgcggcccaggcggtatcctcgaaaatattatagctcttgtcggttacgagagactttgtatgatgctgtttgacaatcccgatttagcaggagacatcttcgccgcaattggcgaaaggctcgttgagtattatagaatttgctctgcattcgattccgtcggagctatgatatcaaatgatgattggggattcaaaacacaaactatgttatcccccgatgatatgagaaaatacgtcttaccatggcacaaaaaaatcgtcgatactgttcacaatgcaggcaaacccgtcattctccatagctgcggcaaactcgatgaggttatggacgacataattgcgattggctgcgacgccaaacattcgtatgaagacatcatcgagcctgtcgaaagtttctacaaaagaatgtcggacaaaatcgccgtggtaggcggcatcgacctggacttcataattagttctccacttgacaagataaaaaaacgctctctggaaatgctcaaactaagcgaaaccaaaggtgcctacgcccttggaacaggaaacagcgtccccgactacgttccagacgacaactattttgcgatgactaatgtcataagaaaagccgaataataccgagagccttgcttattatcgcatcttcagcatcgcagtcgccgcccacaaaaacggtgcctgtccgtgtaaatctccggtcttggtcggcctgttcaaataatgattgtacatctttccctgccccgtcccgacacatacatccgaaacctgcccgtctttaacttttttcacaagtcctttccagccgttctccgcagtcttttgataagatttatcaagccatccgttctttactccggtcgcaattgcatacgtaaacatccctgtgctgctcgtctcttcataactttccgcgtcaataactatctgatgccaaagcccgctcttcgcctggtattttttcagccccgccatcatcttcaaataaacatccatcagttcctgccgcttcggatgttccttaggcgtattttccaaagtcaatgccatcaccgctgccgcccaaccattgccccgcccccagaacaccggcacttccgctgtatgctgaaacaatccgttctgctgctgcaaaaccttcgcgtatcccaataactgcgtcagacatctatcaagataaatctctttccccgttgccttataagcctgcacctgcagcgaaccaaccataaacatatcatcgacccaaagccgcgtatacgccgtcataccatcttctctcagcttcgcccattcatcatctgccagctcaaccgcgaccttaagatactgctcatctttcttctgaagataaagttcaaaaggcaatatcccgaaaacattccagtcaacatgtcctgcccttatcctgtccgtctttggcaatttgcgtttatccgcgcctgtcgctttatcatatgaataaaaaatctcctgcgatgtaatctccgccgtattataattcgcaattacagcatctattaatttttgatttccgcttgcttgagcgaatttcaagacaccgtaatacgaacacactgtcggatacctcgcagccaccggaattgacaacacattttccgcaaccgcattcccaatttttacaattcccttatcaagtttagcccccggaccagtgccgggggtgggattctgagcattgcgaagaatccctttttgcgtgtc

SEQ ID NO: 2520 - DNA, 23447 bp, synthetic construct
  source 1..23447: mol_type = other DNA
  misc_feature 1..23447: note = Synthetic
caatggctgcaagaatggtaataagagacgttggaagagttttagattatccatattctgaaacagataaactagcaaaaatgataccaatggaagttcatataacaattccaaaagcactagaacaaaatagagaatttaaggaattatatgaatctaatccaagtgtaaagcaattaatagatatagcaattaaattagaaggactaccacgtcaggcatcaacacacgcttgtggaatagtaattacaaaagatccagtagatacgtatgtgccactatatgtaaatgatggaaatatatcaacacaatatacaatgaacttgcttgaagaactaggtctactaaaaatggactttttaggtttaagaacactaacagtaatttcagatacggaaaaattagttaagcaaaatcgtggaatagatgtggaatatgacaaagaaatgaatgatccaaaagtgtataaactatgggcaaatggagaaagtattggaatatttcagtttgaaagtcaaggaatgacaaactttatgaaagagctaaaaccagactgcttagaagatataattgccggagtttcattatatagacctggaccaatggatcaaattccaagatatatcaagggaaaacaaaatccaggacataatgtttacactcatcctgcattagagccaattttaaatgtaacttatggctgtatggtatatcaagaacaagtaatgcagatagttagagaactagctggatattctcttggaagagctgacttagtaagaagagcaatgggaaaaaagaaattagacgtaatggcaaaagaaagagaatattttataaatgggcaagtcgatgagaacggaaatgtattagtgccaggttgtgtaagaaatggtattgataaagaatccgctaataaaatatttgatgaaatggctgaatttgcaaaatatgcttttaacaaatcacatgcagcagcatattctgtagtttcataccgaacagcatatttgaaaacatattatccagctgaattcatggcagcaacattaaatagttttttaggaaatttagataaagtaccagtatatatctatgaatgtaaaagattaaatatagaaattttaaaaccagatataaataaaagttttacaaaatttacagtacaagataacaaaataagatttggattaggaagtataaaaaacgttggtgtatccgcaatagaaacagttattgccgaaagaattaaaaatggagaattcaaatcatttacagatttttgcgagaggatacaaagtggaacagtaaacaaaaagtgtatagaatgtttgattaaagcaggttgttttgattcaatgagccaaaccagagccactttattggcatcttttgaaaaaataatggatacaataaataatcaaggaagaaattcacttgcaaatcaagtaacaatgtttgatatagttgaaccagaagaaacagtaaaataccaatatacagtattaaaagaacttgacgaaagagaattgttatcacaagaaaaagaaatgcttggaatttatgtatcaggacatccgttagaaaaattaagagaagcgataagcaatcaaacaaacattacttctatacaaataaaagatttgaatgaagaaaattcaggaaactttaaggacggtcaaacagtaaaatatgcaggaacgataactggaataaagaaaaaatatacaaaaagaaatacaataatggcttttgttacagttgaagatttatatggaagtgcagaacttgttgtgtttgatagtgtttattcaagatgtgatagtatattaatagatgaaaacgtagttttagtagagggaagactaaatatcaaagaagatgaagaagctagaattatcgttcaaaatataaaagaattttcggaaaatgacagtgccaataattcaaacggaagaaaaacaaaaatgataatagatataacagaactaacaagtaatcaaaaagaaagattaaaaggcgccataaaatttttctcaggagataaagtaaatatgagattaagcataatagaaaaaacacaagaaaaaccatgtggagcaatattcttaacagaagaaacattagagcagtttaaagaaatagttggagagaaaaatattttgcttaaataacaaatgtgctctaagattgaattataatacaaaagatgttaaaatataaaaagttttataattgactaaagtcaatgaaggagaaaaaagaaatggcaggatatgtaatccatttagcagtagctaaagaatatttaagaaattttagaataaaagatgaaaaagagtttttaagaggaataattgccccagatttgctttcacatggagataaaacaacaactcattatagtgaacatggtggatcaggtgtaaatctcaaggaattcttaaagcataattcaattagtacagaatatatgcaaggatactttttacatttggtaacagattatttattctatgatacatattttccaaacactattaacgaaacaagacaatataatgattacgatatattgaataaagaattaattgaagaatataacatagatattccagaagacatcaaagatgttgttcaatttaaaacaggagaattagaattacttgatagagaaaaaaaagatcaaatgatacaagaaatttcaaaaaaatcattatctgaatataaaaaagaagctatgaaaactgagaaagtaacaactaacttagatgaaaatgaaatggttacaatgaatgaaagcaaaaaagataaaataaaacttgcaatagcaattatagctatgtgttttgttatgctatttttcgtaaatcaaaaacaaggatttcattgtgatgaaatattttcatatggttcttcaaatagtgcatatgaaaatgttttttggtcatatcgtgataaaacacctatgcacaaattcatggaagccaagatatttcaagacggaaatattttcgattggataggaagaatcaaatattattttgtagaccatgtagatgaaaaagatgaatttatagctgaaaaaatggcagaagagaaaatgatatggagaacacgtgaagaagcgatagactatttagaagcaaaagataacagatttaattatgcatctgtttattataatcaaattcaagatgtgcatccgccattgttttattttttagtacatacagtgtcatcaatatttaataacacattttcaaaatatataatattctttataaatttaccatttttcataggaacatgtatattaatatggaaaatattaaatttaatacggaagaaaatcaatatcaatattagcagtattattatatggtttaagtataggtggaatatcaacaatgatgttccaaagaatgtatatgatgcttacattttttacaacagcatttttatatttgaacttattcatagtaaaaagcgaatataaggttaataagaaaacgcaaatactgcttgcgataactgcaatattaggatttttaactcaatacttttttgctatatatgcggcgttagtagcaatagtaatgatagtattatttataaaaaataaagaaacaaaggaattgtttaaatatataagaactttagtaatatcagctgtaataggaattgttttattcccattttcaatagatcatatgttaaattctgatagaaaaataggtggattccagtcaacaaattatgcagacagagtattaacatattttaatatgatattaagatatttcggaagtaaatgggaaataatgctagcactatttgcgatagcattacttgcaatattaataaagagaaaaacagaaagaggaataacagcagtaataattttcccaacaattatatacataatgttagttgctaaattagcagaattcttagagttaagatatgtgatgaatatattaccaattgtggcaataatgataatgatggcaattggatcaatttttgaaaacaaaaaatataatataatgcttgcaacagtagccctaatattattggttggctatggattcttaacagaaaaaccattatatctatacaaagattataataagtacattgatatatcaaaaaaatatagtgatgacgatttagtatatgttggatatacattttttgatcatatacaaagtttgcctgaatttacaaactacaaaaaaacatttatgatttataatgatcaaacagatagattaaaagatgacgaagaattatcagataagaatgaattcatattaagtgtacatagaaatatggaaccagaaaaagtagtaagtgaggtattagaatatacaggtttctcaaactatgaacttatatatgaatgggatcaagaaattaatcaagtaatttatagaatatatagataattttgacaaagtaaaaaaatatgctataattataatgtaaaatgaaaagcaatgaggaaaaggagtacatttattaaatttattacagagaaaagaagaattgctgagacttcttataaaaaataaatggaaggtagtttctgagttgatatgatgagaaatttaaaatagtcatatccgtgtaagatacgttaaaatctaatgagaaaataaagaaatttattttaaataaaggtggtaccgcgaagacatgtcgcccttgcattttagcaagggcgatttttgatattatattaaaagtttataatatctattgctgtgcaaaggaggaaaaatgttagaaattagtgcaaaaccagaaggagcagaattaacaagtatcaaaaaagatggaattgaaaaacttcatgatggaaaagaattttggaatagacaaagtccaattttgtttccaatagtaggaaaattaaaagataataaggcaataattgatgataaagtatgtgaaatgggacaacatggatttgctagagatatgaagtttgaaatcgtaaaagatggaccaagcacaaaggaatatgctttaatttcaaatgaagaaactctaaagaaatatccataccagtttaaacttatagttaaatatcaagtaaaagataatacattaactgtttcatatgaagttgaaaacaaggataataaaaatatcttttttggaataggagcacatccagcttttaaatgtgactattctacagaaaaatattatctagaatttgaaaaagaagaaagtgaaataggaatcttacaattagaagaaggacttataagcaaagctagattaaaagaagaagtaatagatgacaataaaatatatctaacaaaagatatatttgaaaaagatgcaataataatgcaaaatattcagtctaacaaaatatatttaaaagaaaaagaaaaagaagaaccaattctagaatttgacttcacaggatttccatatctagcgatttggtcaaaaaagggagctccattcgtctgtatagaaccttggtataatacagcagattataaagaatcaacaggaatatttgaagaaaagcaaaaaataattggattaaacccaaaagaaaaatttaaatgcaaatacaaaatcaagtttttctaaggaaaaggagatttgaaatgaaaataaaaaagttacacatactaacgattattgctggaattatatttgtaaatataggaatattccattcaaatgtatggtttgatgaatgttattcagttggaatggcaagtaaaacattcgttgaaatatggaatattggcggacatgacgtacatccggttttatattattgggcactgcatattatttatctattaactaatggatcgattatggcatatagaatattttctagtattcccataatgatattaggcattttaggatatacacacattagaaaagattttggagaaaagacaggactactatttacatttttagcatatttttcaccaatgtcagcaacatttgcaaatgaaattagaatgtacagctgggcactattactagttacagttttagcaatatatgcatggcgattagcacacgaagaaaaactacattattacataattttctttttaagcagcttgcggaagtatttatatacattattatggacttatggcagctggattaataaatctaattttattagtatacttagtaaagaataagaaaaaagaagtgtatataaaacaaataatattaggaataatccaaggactattatatttaccatggataatttatttttcatcacaattaaaatcaatgcatgataatggattttggattagcttaggaccagaaacaataatccagataggaagcttgttattttccggaagtttatatgcatggataggatttataatttcactttttgtatatggatatttaatatacttaataagaaaagaagaaaaagaaaatataaagcctgtaagatatgcattattagtaatagttttactaatacttgcatcattaataatgtcagtaatattatggtcaccaattttatattatagatacttaacagtagtagctggacttatgatttttgctatttcatatatgttcgcaaaatcagctaaaccatgtatattatacacatttatagctataacaattctaacaacaataccaagtaatataataatgataagccataactatgataaatcaaataatgaaccaatagattttataaaaaataacatacaagaaaatgatgtaatagtatatccaggaataggaacaggagcaataatgtctgcaaaatttcctcaatataaacaatatttttataatgctgaagattggggagttgaagaagcatacaaagcatttggaccagcaatgcaaacatatacaacagatgattttctaaatgatgaagaatgtcaaggaagaatttggcttgtattagatttttataaagtagactactttaatgaaaaattcaataatgagaattatagagtattagccaaaaaacaatactttactaaatataataaagaaaaagctcaaaacaaagagacagaatataatatttatttaatagaaaaaataaatcaataaaggagagagaaaaaatggatcacaaattaaatgacaagttaaacccaaaagattttgaagaagaaatctataaaagttgggaagaaagcggaaactttaaaccttcaaatgataaaagcaaagaaacatattgcataatgatgccaccaccaaacgtaacaggaaagctacacatgggacatgcattagatgacacaatacaagacatattaataagatttaaaagaatgcaaggatatagaactttatggttaccaggttcagatcatgctgcaatatctacagagatgaaagtagtacaaaaattaaatgcacaaggaataaaaaaatcagatttaggaagagagaaattcttagaagaagcatgggcgtggacaaaagaatatggaggaataatccaaaaacaacaacgtaaattaggatgttcatgtgattggagcagaaatagatttacattagatgaaggaatgtcagaagcggtattagagcaatttgtaagattatataataaaggactaatttacaaaggaaaaagaatggtaaattggtgcacaagttgtaatacatcaatttcagatgcagaagttgaatacaaagaagaaccatcacatctatggcatataagatataaaattgttggagctaatgatgaatatatagaagttgcaacaacaagaccagaaacaatgcttggagatacagcagtagcagtacatccagatgatgaaagatatacacatttggtaggtaaaaaatgtatattaccaattatgaacaaagaaataccaataatagcagatgagttcgttgaaaaagaatttggaacaggatgcgttaaaataacgccagcacacgatatgaatgactatcaagcaggattaagacacaacctagaaataatagaagtatttgatgaaaacttcaaaatgggtaacttagttcctgaatataaaggaatggacttattagaagcaagaaagaaaatagttgaaaaactagaaaaaattggagcattagtaagaacagaagattacacacataatgtagcaaaatgcgaaagatgcaaaaatacaatagaaccaaaaatttcagagcaatggttcgtaaatatgaaagaaatggctaaaagagcagcagatagcgtaagaaacggagaaacaaaattcgtaccacaaagatacgaaaaacaatatttccattggttagacaatatacaagattggtgtatatcaagacaattatggtggggacacagaataccagcatattattgccaagaatgtggacatataaatgttgcaaaacacgcaccagaaaaatgtgagaaatgtggaagcacaaaattagcacaagatgaagatacactagacacatggttcagttcagcattatggccattctcaacacttggttggccaaatacagaagctgaagactacaaggatttctatccaacacaaacattagtaacgggatttgatattataacattctggatatcaagaatgatgacacaaggacttgaactaacaaatcaagtaccatttaaagatgtactagtacatggaattgtaagagataatcaaggtagaaaaatgtctaaaacattaggaaacggagtagatccattagatgtaatagatcaatatggaacagacagcttgagaatgtctttaatattaggaacaacaccaggaaatgatataagatatagtagtgataaagttgaagctgcaagcaattttgcaaacaaactatggaatgcatcaaaattcgtattaatgcaattagaagatattgaagaattcaaagaaaatgatataacagaattagatttttcaaaaatgatagacatagacaaatggataatttcaaaattaaatacattagtaaaagaagtaacagaaaatatagaaaaatatgatcttggagttgcagcacaaaaaatatatgactttacaagaaatgatttttgcgattggtatatagaaatagtaaaacctcgtttattcgataaagagaacgaatcaagatacacagtacaattcatattaaactatgtactatgcacaagtttgaaattattacacccattcatgccatttataacagaagaaatatattcaaaactatatcataaagaagaaagcataatgatgacaaaattcccagaatataaagaaaaactagatttcaaaaaagaagaagagatggcaacagaaatgatgaatataataacagagatcagaaatataagaagcaaaatgaatgttcatccaagcaaaaaaacaaaattaatatttgtgacaacaacagcaaaagaagagattaaaaaatcagaagaattcttagaaaaattaggatttgcaaacaaaatagaaatacaagaaacaacagaaaacataccagaaaatgcagtagcaataatttctaaaaatatggaagtacacattccatttgaagaattagtagacatcgaagaagagaaaaaaagattagaaggtgaaaagaaaagactagaatctgaagtacaaagaggagaaaaaatgctttcaaatccgggcttcataaataaagctccagaagctaagataaatgaagaaaaagaaaaattggctaattataaagaattgttagcaagtgtaattgaaaaattgaataagatgtagatatgaataaaaagttggcaaataatgtaataatatgttataataaaactaatttactggaaatggctattgacaaaatatgagagttattataatataattatgtgctaagggaatggcacattttatatcatatcaaagtagaataggtttctataataagacctaagttttattatgaaacttatgagtcgtaaagctctagctgcccagaaatgggcagctatcttcattttataggaggaaaaaatatggggtatagaataggattagatattggaataacatctgttggatggtcagtaatagaagatgattcaaatggaaacccaatacgaatcatagatttaggatcaagaatttttgacgctgcagaaaaaccaaaagatgggtcaccacttgcgaaagaaagaagagatgcacgtggattaagacgtagattaagaagaaaaaaacatagaatagaaagaacaaaaagactcctagaaagatatgacataattactaaaaaagaaatagatgaaatgtatgcaaaccaagctcatgttaaacatttatataatgtatatgagttaagagttttaggaatagagcaaagattaactaataaagaattagcacgtgtattaataagtttggtaaagaaaagaggatataaatcaaatagtaaagcagaagaaagtaacggggaagcaggaaaattattaacagctacgagagagaacgaaatattaatgcaatctaaaggatatagaacagttgcggaaatgtatttaaaagatgataaatttaaagccaaaaacaaaaagggagaaatacttgtagataaagatggaacgccattattaaaaataaaaaattcaacaggagattataaaaatacaacattaagaaaattattaatagaagaaataaaactaattttaaacaagcaaaaagaattaaattcaaaaatcacagatgattttataactgaatatttaaaaatatttgaaagtcaaagaaactttgatgacggtccaggttttccaagtccttatggtggtaacttaatagaaaatatgcttggaaactgtacatttgaaaaagaagaaaaaagagcgccaaaagcaacatacacatttgaatattttaaatttttacaaacattaaatcatattaaaatagaaacaataaatataaaagatgatggaacaataaacaaggaaaaaagagaattaagatcagaagaaaaagaaaaattaaaagaattagtattctcaaaagtaacagttacatatagtgacgtaagaaaaacattacaacttgaacctaatcaaagatttaatatgtttacatatagagatttattaaattatacagaagaaacaaataaagaaattgaaaaagagaaaaaattaaaagaatttgagtcttataaaaaaataaaaacagcattaaatcatattgaaaaaaattatataactaaattaacaacagatgaactagacgaaataggttatgcagtaactgtatataaaaatgatgataaaagaaaagaatacttagaaaatcatacaacaaatttatcaaaagaagcaatagaagaattattaaatcttagcttttctaaagtaggaaatttatcattaaaggcaatgaaaaaaattattccagaattagaaaaaggtgtaacatatgataaagcagtagataaggtgtatgaagatttcagaggaacagtaaatactcaaaagaaaagaaaactaagactgaaagattttgaacaagaaatatcaaatcctgtggttagaagaggtctatcacaagctataaaagtattaaatgcaataacattgagatataatgaaaaatttggaaagccagacgtagttgtagttgaactagcaagagaattaggaaagaactttgctgacagaagaacaatagaaaaaagacaaagtgataatatgcaaacaaatgaaaaagcaaaagaatcaattatagcattaggaaaaaacaatccaacaggaaaagatatagtgaaattcaaactatggcaagaccaagattgtaaatgtatatattcaggaaaaacaataccagttgaagaattatttacagatttagtagatgttgatcatataattccgtacagtcaatgttttgacgatagttacaataataaagtattagtacttgcaagtgaaaatagacaaaaaggaaacagagttccatataagtatttaaaagaaagcggaaagaacgtagaagaatacgaaataagagtaaatacacttattagaaataataaaaagaaacaaaacttattaagacaagattttacaagagaagatgcagaggattggaaggaaagaaacttaaacgatacaaaatatatatgtaagtacatgtacaatttaatcagaaatcatttagaattttcagacaatccgaacttcgtgcgaaaagtgtggactgtaaatggaaaattaacagcacatataagaaaaagacttggaatagaaaaagtaagagacggagatacacatcatgcagtagacgcaacagtaatagcaatcacaactcagaatatgattaataggttaactagatattatcaatatgtggatggcagatatatgaacaataaaggggaatatatagatatatatacaggagaaataattaacgcaaaagagtatgaagagaaaaatggtatatattttcctgaaccatggccaaaattcagaaaggaattagatattagaacaaactgcaagacaagagaaagaatgattgaatgtttagaagcagaaaaaatttatacatatgaagactatgatgatgtagaaccaatatttgtttcaagaatgcctagaagaaaagttacaggaacagctcatctagatacaattaggggaataaaagaaaaagatggagaattaaaaacaataacaaaaactgaattaactaaattaaaactaaaagatggtgaaatagaaggttatccagataattgtaaacgtgatgatagattactgtatgaggctttaaaaaatagattagtagaatttaatggcgatgcagctaaagcatttagtgagccattttataaaccaaagtctgatggtacaagaggaccaatagtaaataaagttaaaattgaagctaacacaacaatgggagtaacattaaatgatggtaaggcattcgcagcaaatggggattgtgtaagattagatatattttatgttgaaaatgagggatattattttattccaatatatgttagtgatactgtgaaaaaagaattaccaaataaagcatgtgtagcaggaaagaaatatgcagattggaaagaaatgaaagagaaagattttattttttcaatatatccaaaagatttattatatattcaaggaaaaaacaaaattaaattaaatcctgttgtaaaagataaagatccaattgaagttgaagaaattttagcttattatttaaaaattgatatttcaactgctacaatagaaataaaaagcaatgaaaataaatacgtaaaaagaggactagggggaaaaggacttaaaaaattagaaaaatatgaagtagatattttaggtaattatcataaagtaaaattgcctgaaaaaaggttaccttttaatataaataaaaaatagaagggagggaagctttaatatttatcttaaagcatccatttgtctagcattatgcgagataaatgttttaagcgaatactatggctttcagaaatatctacgtgcaaacagatgcacacataaaagtaaaaaatgagcaactattaatacaaaatgaaaatggagagcatacggttccactagaagatattaatagtatttgccttgaatcattaagaacaagtattacaacatacacattatataaaataattgaacatgatattattttatatgtgtgtgattcaaagcatcttccatcaggcatattaattggaacaaataattattcaagacaacttaaaaatttgcaaatgcaatttaatatttcaaaaccattgctaaaaagaatttggcaagagattgtaacagtgaaaatagttaatcaagccaaatgtatggaagagttgaaaaatgaaaagtttaccaaattattagaaatgacaaaaggcataacatcaggagattcaaaaaatgtagaagcaaaagcagcagcgttttattttaaatcaattttcggaaatgattttaatagaaataaagaatgtattgagaatgctgcactaaattatggttactcaatagtaagaggaatgatagcaagaactcttataatgtatggatttgaaccatcattaggaatattccaccataatcaattaaataattttaatttggcagatgattttatagaatgtttcaggcccgttgtagatttgtatgttataaatacagtagattttagaatgaagagactaacacctgaagaaaagcaaaaaatatacaatgtaatgaattgtttagttttaatagatggtaaaaaatttaatattcaaggtgcaattgaatatatgataaaaagttattcaacaagtatgaataaaaaagaaaatttgattaaattaccatatttaattgaattagaagagtataggtatgcataagtttatgagaatattagttttctttgatttaccagttaaaactaaaccacaaagaagaaaagcaacacaatttagaaactttttaattaaagatggatattatatggtgcaattttcagtgtatgccagagtttgtaatggaaatgatatggtggaattacataagaaaagattaaaggccaatgtgcctgatgatggctctattagagttcttgttattacagaaaaacaatatgaaaatgttgaaattttattagggagaaaatctaaatatgagaaaccaatcgaatttgaaactttatctcttttctaaaaaaagagataaaataaggaaaaaattaattaatttaatatattttttaaaaagaaaaaagctagtaattattgatattactagctttttgtagggaatattatatcatatcaaaatataatagggaactataacattaatttctttgatagacattcttcctttattatatcatatcaaaatataatagggaactataactgtggtcctgtttcccctgtgtcgccttttattatatcatatcaaaatataatagggaactataacttggttctattgcataatccaaaggtagaaattatatcatatcaaaatataatagggaactataacaagatttttataacagatttattttcaattattatatcatatcaaaatataatagggaactataacgaaaaaagcagcttttttatattttcttaaattatatcatatcaaaatataatagggaactataaccactttaactaatgcttgtaattgtttttcattatatcatatcaaaatataatagggaactataactgcgtgcattgtatttaaatgataaagtttattatatcatatcaaaatataatagggaactataacatatatagtgtatatgtgatatacttgttaattatatcatatcaaaatataatagggaactataaccttatcctccttatacattagcatagctatattatatcatatcaaaatataatagggaactataactctgtaagtggaataacaccttctcttccaattatatcatatcaaaatataatagggaactataacccaattgaccagcagcttctgccaccgctgattatatcatatcaaaatataatagggaactataacactagcccaaaactcacttgctgttactgtattatatcatatcaaaatataatagggaactataactgggctggcgtgtatgccaatgcgaactggattatatcatatcaaaatatagaaaacgatagaactatttacaaaatggaataatgaatacttatttgaagtagagattgtgctactacacacctagtaataggtcaaaagaaatgtcggacaaggtacaccaaccaaataacaaaccaaaagagctatggaaacatagctctttttctagaccttaaaaattaaattatactggcaaaaagcattcctaagtgtcgaaaaaggtcgatgagttcccatatttcgtcaaaggaaaaaaatggaaagaaaagaatatacaatatataaagttctaaaggagggtcgtatgaaaattgatttcgacgagaaggacaagctcttaaatttagagatagatgaagagatagatcatcatagagcagaaatattaaggaggaatgcagattatgaaattcaaagacgtaatccgaaaagagttatacttgattttaataacgtttattttatggatagtgccggaatcggaatggtaataggcagatacaaaaccgcgtcaatgattggtgcaaagattgaaatgaaaaatgtaaaaccaaatatacgaaaaatatttgacatgacaggtgtgttaaaaataattccaattgtagaggaggaacacaaaaatgaaaaaacagtatgacaatgaaatgagactagaatttttaagtaaatcttgtaatgaatcatttgcacgaatcacagttgcagcatttgttgctcagttagatcctaccatagaagaaatttctgatataaaaacatcagtatctgaaatagttactaattcaataatacatgcatatgattctaatgatgagattataaaaatacatagttacataattgataattgcgtgataatagaaatttcagatactggtaaaggaatagaagatgttgaaatggcaagaaagccattatatacatcaaaagcagaacttgaaaggtctggaatgggctttacaattgttgaaagttttatggatgaacttaaagttgaatcaattgtagggttaggaactaaagttacaatgaaaaaaattataaaaaaagaacaaaatttattagattgttaggagatattaattttgtatgaaactacaatagaagaaatcttagaagcacaatctggggataaagagaagttaaatgatattgtagaaaaaaattcaagattgatatggagtatagtaaaaagatttaaaaatagtaggtacgaaactgaagatttgtttcagattggtgctttaggatttataaaatcaatcaaaagatttgataaagaatataatgtgaagctgtctacatttgctgttccatatattataggagagttgaaaaggcattttagagacgatggaattgtaaaagttagtagaagtttaaaagaattgaatatgaaaatagagatgcttagaaagcagtatgaaaaagagggaaaagaattaacaattgaaaaaataaaagaagagttaaaggaatcaaaagaaaatattttattagcattggaagcagaaagagaagttaaatcaatagacgaagatatggatgatggaagcgaaaatatgttaataaaacaagtaaaagttgaaagttatgaagatgaaacaataagaaaattagtattaaaagaagaattaaataaattagaagaaaaggaaagaaacataatagtattaagatatttttacaataaaactcaaagtcaaattgctgaacaatatggcataagtcaagtacaggtatctaggatagaaaagaaaattttattgaaaatgagagagaacataaaggagaaattgtgaaaaatataattgaaaaaataaaaaaacactatgtattcttttttttattttctagtataggagcttttgtaatattaccaatgtgcctaacgcagagctttgaaataaacaagaatacacaaagaatagaaattaatgttgaaaagccaagcttagatttaggtgtacaatataaaaaaataaatttattacataataatgaaaatgttgtggaaacattagagttagaagattatttgataaatgttgtggcagcagaaatgccagttgagtatgaagaagaggctttgaaagctcaagctacagtagctagaacatacactttataccaaattgaaaatggtcataagcatgataatgcagatgtttgtgacagcagtacatgttgtcaggcatggatatctaaggaaaaaagatatgaaaaatggggagacaatcaagatgagaaatggagcaaattaacaaatgcagtatattcaactgctggtgaagtcataacatataatggaaaaccaattgatgctttttttcactcaaatagtggaggaacaacagaaattcctataaatgtatggggcggaagtgatttcccatatttgcaagttgtagaaactagtggtgaagatgaatatagtcaatattattctgaaaaagaatatacaaaagctgaaatagaaagcaaaatgaagtctgcttacagtgatttttcaatagactggaatgaagagaactgtatagaaattctagaatatacagaaagctctagaattaaaactttgaaaataggaaataaaaatatttcaggtgttgaagctcgaaaaatttttgaattaaagtcatcaaatttcacatatgaaatatcagaaagtacagtgaaatttaaagtaataggatatggacatggtgttgggttaagccaaacaggaagtaatacattggcaaaagagggaaagaattataaagagatcatagagcatttctttaaaaatattgaaatagaaaatataaaagataaataaatataatcttctctttgtataaatacataaaatatggaaatacttgtaataaataaaatataggaggagagtatgaacagaggaaaaagatataaatctactatgctagataaagaaaaaagattttatataattggtgtaggctttttaactgtgttaataatttttatatttgcattatcaggatataaagccaaaaaagaagctaatgctaagatagctcagatggaatcagaggaaaatttcgatgctacaatggtcagttcaacagaagataaaagtataaatgaagttgaaaataaggctgaagaaaaaattgcaataaatacatcaaatattactaataatacagtaaaccagataaaagaaactccaacgccagaggtaaaagaaacacctaaaccagtagagttacatttttcagtaccattagaaggagagattgcaaaagatttttcagattctaatttaacatattctgaaacattgcaagaatggactgttcacttaggagttgatataaaagctgaaaaaggaagttcagtattagcatcagaagcgggaactgttgaatctataaaaaatgatccaagatatggaataacagtaacagtagttcacgaaaatggattcaaaacaatatactcaaatttacaaacagccgaatttgtttctgagggacaaacaatagaaaaaggacaaattataggatcagttggagataatgcagcctttgaaattgctgatgatccacatctacattttgaaatgacaaaagatggaactaatgtaaatccatcaacttactgggagaaataaacattaataatatttaaagataaaaatctgatagatatttaatagtataataaaaagctcaagaaattaatcttgagcttctattttattttaattaataattacttagattgtttaattttttttctatttaagatttttataaaaatgattaaataaactaatccaattatccagccgcataatacatcagttgcataatgcacacctaagtatattcgactaatacctattaagaagattatagcagaaagcagtggaacaaatatgttttttaatcttttatttttcatatatttcataatatagtaaataattaatccataaaaaatcattgacatcatagaatgcccacttggaaaactgtaagaattttcaactgtcataactaatgtttgagtaggacgtggacgtctaacaataatttttattaaattatttaatataacaccaattaaattagcagataaaaatgtaagaaatatttttttatttttccacgaaataactgcaacagataaaattccagaaacaataactagtgtagaaccaagtgttgtaattagtttcataattgcaagtatagtattgtttacaggaaaaatagacattataaattgataaatgggtaaatcaaaaagtatcatatagtctccctttcaaataatatacaaaaattatagtatattaaaaattaaaaagcaacatatgaggttgattttaaaaaagatgcgtggtactataaagatgactcgtaaacaaagagaagaataggaggtattcatatgattatagaattacctgagatgttctacaaagcagacggaaagaaatatgtacgggttaaaaatggcatactagagattcatggatactgggactttgagaaactcatggtacagctggcgtatgaaatgaaaggcaaatgtcaatgctattattgcagaaaaagtgtagatccaaagaaaataactattgatcatttattcccaagcgattttgggggaatgtcaattacaaataatttggaaccagcatgtcagaaatgcaatagcagtaagtctaacatgaaccaatacgaatacggcgtgtggaggactatacgggatgaagaagctcagaaaagtttctatcatagtgtagttgccaaaaagaaaaagagaaagttcaacgctaaggtaaaaaaaggtttcgatttacctaaaagctgggttgaatatcggaggttggatagtatccaaaaaatcagcaaagtaagcaataccaatagtaataagttcaaaagaatgttaacttttgcaagaaggtataacaaactcccaagaacgattgttgtatctagaaatggaaaactcctggatggagcaacagcatacgaggtcgctaaaaagctgagatttgtggaagtaccagtaactgttctcgaaaatgttgtcatctatagagcctaatctgtttgctaaagaaactcccctgacgatggttaggggagttttcttatctttttattgtactacaatgtgaatattgatataatacaacatatatgagaaatagagaggataataaaatgaaatatataatagatcgaatagaaaacaatttagtaatctgtgaaaatcaagaaactaaaaagatggaagaatttcctaaaagtatgtttcaagaagaaataaaagatggagatgttgttataaaagaaggcaattcattcaaaattgatgaagaagaaacagctagcagaaagaaacatattgaagacttaatgaaaaaattaatgaactaaaatcttcagaaaggaaatactaacatggcaaataagtggacaaacgaacagttaagtgcaataacacaaaaaggtaataacatactagtagcagcagctgctggtagtggaaagaccactgttttagttgaaagaattataagaaaaataattaatgataatgtagatatagataaaatattagtcgtaacatttacaaatgctgcagcatcagaaatgcgagaaagaatattaacagctttgtataagcaaattgatgaggatccattaaatcaaagactaagaaaacagatagtattattaaataaagcaagcatttgcacaatagatgcattttgtttagatataattagaaataatttctttgaaataggagcttcatcaaactttagaatagctgataacacagaattagaattactaaagcaagaagcaattgaagagacttttgaagaactatatttagaaaacgatgatgaatttaataaattaattgaattatatgctggatacaaagatgacgaaaatttaaaaaatataattttaaaaattcataattacattcaaagtgcgccatttccagaagattggttagaagaacaaattgaaaaatttaatatgagtaacatagaagatttttcacaaacagaatggggaaaaatcattttaaaaaatttcagggatgaagtattaaattcaattcaaatcctagaaagcagtaaacatcaattagatatgattactgaattatcaaagttttcactagtcgttgcagacgatataaatcaattaaaatttttagaacaaaattgggataactgggaaagagcacacgaaatagctaataatttaaaattcaaaacatggccaacagataaaaaagtagtaagcaatttaaaagaagaaactaaaaaagccagagataatgtgaaaaaaagaatatcaaaagccgtatctcaaacatttatatataatacagaagaagcggttgaagacattaatgcaatgtatccaatactaaaaaaaataaaagacgtaacgttaaaattcatggaaaagttctcagagaaaaaatcaaacaaaaatataatggactttagtgatatagaacattatgctttaaagatcttattaaaaaaagatgaaaatggaatatatcaaaaaacagaagttgccaaaaaatatgaagaaaaatttaatgaaatagctattgatgaatatcaagatagtaacttagttcaagaatatattttaacatcaatttcaaatggaaaaaacatatttatggtaggcgacgtaaagcaaagtatatatagatttagacaagcaaaaccagaactatttttagacaaatatcaaaaatatggactagaaccaaatgaatatggccaaaaaataaaactattcaaaaatttcagaagtagagagaacatactagatacaacaaacctaatattctcagacattatgagtgctgactttggtgaaatagaatatgatgaaagtgaatatttgaatcttggagcaacatatgaagaaccaacagaaaatgtagaatttgcgggaaagaccgaactagatataattgatttgaaaaaagaagaaaatgaagatggcgaagaaatagaagaagatagttcaagtgagttactagaaaaaacagaaatcgaagcaaaatttgtggcaaacagaattcaaaaattaataaaatcaaaatatcaagtatatgacagaaaaacaggatatagggatataacatacaaagatattgtaattttgttaagagccacatcaaatacagcaaacgtgtttgaaaaagaattactgaatttaaatatacctgtttttagtgatcaagcagaaaactatttggaatcaatagaaataagaacaataacatcattactaaaaataatagataatccatatagagacatacctttagtaacagtaatgagatcaatcataggagatttcacagataatgaattgatcgaaattagactaacacaaaatgaaggatatttttacgattcattaaaagaagcaaaagcatcgccaaaaatagatggtaaattaaaagaaaaagtaataaattttcttgataaactaaacaaatggagagaagaagaaagatatcttccattaaatgaatttattcaaaaaatatatgaagaaacagattattacaactatgttagattaatgccaaatggacaagtaagaaaagcaaacttaaaaatgttattagacagagcaaaagattacgaaaaaatcagcttcaagggattatttaattttattag

SEQ ID NO: 2521 - DNA, 16318 bp, synthetic construct
  source 1..16318: mol_type = other DNA
  misc_feature 1..16318: note = Synthetic
aatcggaaataatggagttagaatcacaatttagatgtaatggatcagatggatatattgcttggctagatgatgtgttagatattagaaaaacagctaacagtgatggatttgatctagattacgatattaggatttgtgatactcctaatgaagtgagagatataatttttgaaaagaataaaataaataataaagctagattacttgcaggatattgctgggattggataaaggatggaaaaaataaatcagatgtatttgatataacgattccagaatatgattttgcgatgagttggaatttaggtaatagtactacatgggcaattgactctgattcagtaaatgaaataggatgtatacatacttgtcaaggcttagaatttgattatgttggagtaattattggaaatgatttaagatatgaaaacaacaaaatagttacagatgttacagaaagagcaaagacagaccaatcaataaaaggtatatataaaatgtatcaacaagattttgataaagctgagaaaatggcagatgaaataataaaaaatacatataggacgttaatgactagaggacaaaaaggatgctatatttattgcacagataagaatttagctgaatatttaaaaagaagattaaatcaaaatgaaggtatcgtttatcctgttgataaagatgaaaattatgctgatttaatggttgcagaagatagtgaagaatatagatatgaatgaaaattacatggaataatgattataaaaataaaatatattatggagattaaatgagagagattaaagaaatattagaagactatccatcattaaaattacagtatgaacaagtggaaagaatgagtttagttaaatttttactaaaaaaagaacagaggaaagaactagatagaataaaaaaagaaatgaataatttaataatgactaccgaagaatataataataatttttctgattatggatggattgcatattcactaataaatgtagaatttatgaaaaaagctaatcaattatttaaggacaatggtattacagaagcagaagagtttattgcagattattacatagaaaactcaaagaaggctaaaaaatttattcaatattcatcaaatgaatttagaagaagatctaatataattgatgaagcatttcaagcatatgaaaataaacagtattattcagcagttactttgtttttaactattgcagatggagtgataaatgattttacaaaaaataaaggtttttttactgaaggattagatttagactgttgggattgtttagttgagtgtgataaaggtttaaaaaaaattaaagatatatataatttgcctaggaaaaggacaaatgaagaaataataaaaatgccttatagaaatggtattctacatggaagagatttgaattatggcaataaatttgtttctggtaaatgtattgtaatgttattagctatttcagaatggataaaaaataaaaatactgaagacaaaaggaaagaacaatatataaaggatgcaaatccaccagcattaggagaaagtttaaaaagacttcaagaaatagagaatacaagaaaaataattaataactatgaaagtaaaaaaattgttgtaggaaaggatattccaatagctggtaagaaagaagagtatgctcaatatgatttcatctataaatttgttgaaactttagaaatatggaaatcaaaaaattatggagaattagcaaaacgatttgaaatactatttaactatgaagatagagcaggatatagacctaaaaggtgtagagagatttttgaaaaaaatattttgatagaatttaaattaattaatattatagaccaagcaatatgtatgaaagttatagaactcgaagtaaaactacaaaaagagaataaaattgttaagggtataatgaaaatcggaatggtatatgaaggacaaaaagatgttttggctattccaaataaaaataacggtgagtggaaaatttaccctagagatacaaaaatattatatgaaagttaaaaacaaggaggatattgtgatttatattactggagatacacatagtgattttcaacgatttactgaagaaaaattcccaatacaaacagaaatgaccaagaacgattatgtaattatatgcggagattttggaggagtatggacatttgaagaagaaagtagtagagaaaaaggagcacttgattggttaaataataaaaactttacaaccttatttatagatggaaaccatgaaaattatacaagactatataattatccagtagaagaatggcatgatggaaaagtacataaaataagggactctgtatttcatttaatgagaggagaaatttttaatattgataataagaaaatatttgcttttggtggtgctagatcacatgatatacaggaggggatattaaatcttgatgaagaagaaaagatatatgaataccgtaaaaggggagcatattttagaattagagatttttcatggtgggatttagaactcccaacaaatcaagaaatggaaaacggaataaaaaatctagaaaaagtaaattataaagttgattatattatttcacattgctgtcctacaaatattcaagcacttcttggtgtgggaacgtataagaaagattatttaactgactatttgcaagaaatatctgaaaaatgcaaatttaaaaaatggtattttggacattatcatgattatagacaggtaaatgaacagtttactttgctttatgaagatatagtaccgttagaatatgaaagcatattttaaaaatattgacaaattaagagtaaaataataaactaatatcagttagaaaaagttttaatacttttgcggaactatgttctatatgagcatggttctatttttctttatattatgaataaaacaataaaattgtagaaaaattaaagataatgactagaattatttgacttaatatattttttatgataaaatgatattgccatcaaaaagtggcactatttttaaggagatggcatatgatgaatacaataggaggtcaaattagaagtcagaatttacttaaaattaaaaagattgtagatgatgataacaatggcgataaatttataattgccagaagagataaaaacattgaatttatgagagaatacggtttaaaccatgaagatgttaaagacattataagaggacttactgtagaagattgttttgctggtccagaagaagaccgaaatccaaagtatgacggttggatatttaagtttaatccaatgtttgaagatacgcagttatatattaaaataagaatagaaaatattgaaaagtcagtttgtttgtcagttcatgaatttggtaaatatgatgaggtgaattaaaatgagagtatattgtccatattgtaaaaaagaagtagagtatagaattgaaaaaagagatttaaaagaatttagaggaattgaagtaaatacatttgaaaatgtagctatatgtaatgaatgtaatcaagatttatatgttaatgaaattgaagatgaaaataataaaagaatatatcaaatttatagagaaaaaacaaatattataaaagctgaagacattattaaattaagagaaaaatatgatatttcgcaaagagaattaacatctattttaggatttggaaagatgactattaatagatatgaaagaggaggacttccaacaaaatctcaaagtgattatattaaattattaatagaaaatgatgataagtttatagaaaaagtaaaagaagcatatgaaaaaaataatattaatgaaaaaacttataagaaaatagtatctgaagaagtagaaaaggacattagtaaaaaagaagtgcaagacaatattagaagatatttaaaatctgtattaaatagaaaacctgatatttataatggatacaaatcattagatttagaaaaagttgaaaatataatttcatatatagcaagtaaggtaaagaatttaacaataacaagtttgaataagtatttatggtatattgacatgttatcatttaatgaaagaacagttgcaattactggacttacttatcaaaatcaaaaatttggaccaactattgtatataagaaatatgatgaattatcattgttagatgataaatatacaagagaagatattgaaactgaaaatggaaatactactaaaattataagcaataataattttaatttagataaaataagtagtagtgaaaaagaaataatagatacaataataaaattactaaagaataaaaatgtgacagatatatctgaaatatcacatagagaggatggatggaaaaaaactaaaagatttgaacaaatatcatttgaatatgctatgaatttaaagttaattaaatagatgatagaaagcaaaatattttagtttttactagactattttgctttttgtttggaaaggaggacatgatgtaccaaattataagtgctttaaatggattcataagagaagaaatgattccaaatccatttgattttatatcagataatcaattaatggtgatgttgtttacttatttaattggtagaatgatattacatataatatcattttctatgtgtggagtgttttataatagaggacaagcatctgtgttaggaagtataggttatatgattgctttcagctttaatgttttgattcttataaatataagtaaagtatttgatagcattttaacaataagtattatatataccattattgttattgcaatatttaagctgttatataaattaaaagaaattgtatttatgtcataaaaatataaagtgttacaagattcgacaaaaatataaaaattattattatataatacaaaaaactaagttaataaaaagtagggattaatatgaaagatattagcggagtattttttaaacaatacaatcaaattataaaagaagcaagagccgattcgaaattagaatattgtctatgttgtaataagaaagtaagtagtttttgtaattcgcattctttacctaaatttatattaagtaatttaagtgaaatgggaatgatattaaattcaaatcacttttttgaagccccatttataaaagaagaaaaaggtgttaacaatagtggtaccttccataggatttgtaatgaatgtgataataatttgtttaaagattatgaaaatgaaaataaattattagaactcccaagaaaaaagattatggcacaaatagatttaaaaaacactttgaaaatgtatgataaaagactaaatgaaatttctatttatagaaaaatgcttagtgagacagatggattttggaaaatggaacttttagaaaagcaaaaagtaaattatctagatttgaatgaaataaaaaaagaatttcaaagagctttggatatacttaataaaaagtcaacgtctagttatgaattaatctattggaatgtattagattatgttgcacctattggatttcaaggacatatagcattgcatggagatttgaaaggtggaattattaatgatatatataatcattctcctaaatatgttatagaaaacattaatttgtgcgtatttcccttaaaagaaaaaactgttgtaataatgtttattaacaaagaacataaaaaatataaactttttatacagcaatttaaaaaattaaaggaagaagaaaaattaaatttaatttcatacattataattaattatagtgaagaattttttatatcaccaaatagtaaaaaagatatattggaaaatgatgatataaaggtaataacaagaaatgtttctgatatgattgctttgaacgaagaaatggcaaagaaaatgaaaaaattgaaatttttagaattaatggagtataaaaattttactaatttattagcaaaagaaaattctttaatagatggaagatagtaaattttattagatatccagattaagaaaggagaataaaaatgataaaagagttagaaaaatcagattcaattataggcataattaatacaataaaaaaatattttagtgaatatgatcaagatatatatttgcctgcaattataaaagaaggcgattttatgtatgagagatatggaaataaaaagaaaagggaatctagtgatttctacgctaaattaataatacgaccaataagttcaaaaataacacactcttggttaatacaaaatatggtatataatttttataacggaaatgaatattcggaaaataaaattgttgatccattggactttgtatataacataattgttcataaaaatgtatatggcaattctatatatacattaaaccctatgctatataacgatgaaagttcaattagtgaagaaaattataaaaataatggtattgcaaatttatattattgtgattcttatcatagtgagaataagataaatgtattaaaaaatgaaaatgatgatatatatatattaaaagaagtattagaaaattatgtttttgcacaaaatccatcacgatatggaaatggggattatattttatctgtagaatttgaatatagaaataccaataatcatattaaagatgttgataattatcaagatgatacttcatttatagataatataaataaagaaaaaaaggattatttatggttaattggaactattgatattccttttgttataaaaagtgaacaacctctaaatattgtggtaaatgacttaaaaggaaacaaaagaacactaaatgaaaataattataatgacgatacagatgcaggtttaattgttttctcagaagactgttttgaatatttacgacagagatatattatattaggattaacaatgatagatacatataatgaaaatcaatcatatataattgataacttagaagatatttttgtgttttgggaaggagagtttaataaattaccaagagaagtaaaagtaggattagagaaatataataatattgaaaaaagtacaggaatagtatcaccagcaatgtttgaatggcaactaaatgctaattgggactggaagaacaaggcatatccttcacaatacttaggagaatatttaatagaaaattatatagaacttgtaaaagaatataaatgtaatatagttttaccaaaaaacgaagaaatttttaaagagcaaataaataatatattggaaattttaaatattaaaatagaagatgtatataaaaatgagaatggatatagagcagtattagaaataatgaatcaagaaaaaaaagagaaaaataaagaaatattaaaatcgttgtttgaatatttttgttcaatagttttagagaaagtagataaaaattatgttagaacgatacatcgctaaagataataactataaaacttttttcttgattggttctaatggtgctggtaaaacttataatttattaagaatatatgaaagagatacaacaaaaaatatatatatttctgaagaaggagagatacataataggacacacaaaaacaaagtaaaattagatttagataataaggtatacatatttgaaagtgatgaaagacaaagaggaaatagagaagctaataatatttcaaaaacaataagtataaatccgagattaatagaattattaaccttttgcaataaagaactaaacaatataaataaaataaagaaaaaatcaaaaggacaagctaagatattaaatattttagaaataatgacatcaatttttctaaattctgtttctgttattttatttgatgagccagagaattatttggatgattcttatttaagaattattgcaaaattatttgctcttttagaaaaagctgaaattaaagttatagtagcaacgcataatcctagactgtgtgaattatgtaatatgtatatagacaatgtagtattaatggatataaaaaatgttgatgggagaattgaatatatacaagcaaatttaaccatggaagaggttaagaaaatatatataaaagtagcagatatagtaaaaggtatagaaattcaaaataaatataatcaagatgctggaatattaaaaaaattgaacatgagtgaaaatgatgtgttgtttgaggatttgattaaatatttactgcaatcagaagaattttatagagctttattttataaagatattttgttagtggaaggggaaactgaaaaaataatcttaaaaaaagcctataaaaatatatcggataattcttatttttttgttgtgaatggtaaggcttttttacctttttttgtagagatttttaataaattaaataaaaatttaaaaattgttttcgatagtgacagaaagcctgataaaaatagtagtactgcagttgctattaccgattattttgaaattaattataaaggaatttgtagaatattcgaatatgatttagaatctaattttcggtatagatttagagggttttagagtaaataacggttttagtaaaaaagataaatttatgataaaacaatttgctgcagaagaattttttaaggataaaaataatttagataagtttataaattttttaaaatgagaatatattatttccaattgtgccacaaatttgcaaaaatgtggcacaattggaattttacatctgtgcttcaaattatcaatattgtagcacaattgtaaaatagctattcctcaaaacatcccataattagctgagagccatctacaaatccattcctataatacttttcattccaatatccaagataatccaaaaaattatcatcaagagaattaagttgacgtctaacaaaatccctattctgtttaggaatagaattcaaaatcttatcagaaatctcatcaaaataaacccaatgttttctatcctcatcacaagcaagagaagaaagctcatcctctctatataataaccactctttcaaaatatcatcatttacttctctaaaattaaccatttgttattcctcctatacatatataatttcattcaaaacaatttcttcagctctatttttaatattattcatagattgaacccattccatttgatgatgttcttttaattgttcattaatattttcagattcagaaagttgttttataataagatttactttgttattagcattttcatctatatctagcagatattgttttaaagtaccagttataagtaattcagtatataatcctttatcaaaattctttaaataatttaatctcaattgcccatattttccaatgtgtcctttaggttgcataggcaaatacaaatcaggaataaaataatctccttctctgtgataagtaattttattcataataaaaacctccaaaaataaattttaggtctcccattaacatcaaaattttatacgaacatgtgtattaaatcacttggggaaaagttggggaaaaacttctcaaaaaagttccaaaaaatacacaaatgttcgaaaaaccattcccccaatttttattgaaatatcagctaaaacccttgatttcactaaattacacaaacctttcaactacaactcataacccgaaggtcgtaagttcgaatcttacccccgcaacaaaatttatcaaagaattgaaagttccttgtttttttatttgcctaaaaaagtggcgaaagtttttttgaatgaaaatattatagcaatattaaaagtatctaagaaaattatttaaatatgtaaagtgcaaatattataggcaaaaaattgacaaatggaaaaatatgtgatattatataaaagtaaattgtatatggaacatacaatttattatatcatatcaaagtagaataggttactataataagacctatgagtcgtaaagctctagctgttcataactgaacagctatcttcatatatgggaggtaataatgaattataggataggattagatttaggtattgcatctgtaggatgggcaattttagaagatgataataaggggaacccaaaaagaattgtaaaattaggttcaagaatatttgatgcagcagagaatccaaaggatggatcgtcattagctttaaatagaagagaagctagaaatacaagaaggagattaagaagaagaaatcacagaattaaaagaacaaaaaaccttttggaaaagtataatattattacaataaaagaaatagaaaatatgtatgcaacatataaatttcaatttaatccatacgaattaagagtaaaaggactagacgaaaaacttactaatagcgaacttgcaagagtattgataagctttgtaaaaagaagaggatataagtcaaacagtaaagcagaagaaacaagcaataaggaaatgggaaaacttttagttgcaacaaaagaaaatgaaattttaatgaaagaaaagaattacagaactattggagagatgtatttaaaagatgaaaaatttaagatacaaatgccagatggcagagtactttttaaagtgcgtaacactacagatgaatataaaaatacacctcttagaaaattattattagatgaaattaaacaaatactagaaaaacaaaaggaactaaattctaatattactgatagctttattgatgaatatattaatatattcacatcacaaagaaactttgatgatggaccaagtcagccaagcatatatgcaggcaatcaaatagaaaaaatgctaggtaaatgcacttttgaaaaggaagaaaacaggtcagcaaaagctacatatacatttgagtatttcaaattattgcaagatataaatcatataaaaatagaagaatatcatttaaaagaaaatggaacaagggaagttattaagagaactttaaccgaagaagaaaggaatataattattaatctagcaaaaacaaaagtaacactcacttatgattccttacgaacagcactaaaattaacaacaaatgaaagatttaatatgattaattataaaagaacggatatatttaatgatgaagaaaacaagaaagttgaaaaagatagaagaattaaagaatttgaaagctaccataaaataagggtagccatggatagaattgaaaagaactacataaacaaattaaattcagatgatttagatacaataggtacggttttaacactttataagaatgacaataagagaatagaaaaactaaaagaaattaatttgccagaagatatagtaaatgaactattaaaactatcgttttcaaaagttggtaacttatcaataaaagcaatgaaaaaaataataccatatttagagcaaggctatacttatgataaggctgtaaacgaagtatatgaagactttagaggtataattaatactaaaaagaagaagaagatagcattaagagatttagaacaagagttgtcaaatcctgttgtaaaaagagcagtgtcacaggctataaaggtattaaatgctattacaacaacttatgggaaaccggatattataaatattgaactagcaagagaattatctaaaaaatttgctgatagacaaaatataaagaaaaaacaagaacaaaacatgcaaaataatgataaagcaagggaagaaatattaaaacttgggaagaataatccaacaggacaagatatagtaaaatataagttatggcaggagcaagatggaatatgtgtttattcaggaaaacatatttccatagaagatttatttacagaagcggtagatgttgaccacataataccatatagtatgtgttttgatgatacatataaaaataaagttttggtattagcatctgaaaacaggcaaaaaggaaatagaataccataccaatatttaaaagaaaagggaagaaatttagaagaatacgaggttagggtaaataatattattaaaaattattataaaaagaaaagattattaagacaaaactttacaagagaagatgcaacagaatggaaggatagaaacattcaagatacacaatatataagtagattaatgtataatttaattaaaaatcatgtacagttttctgacaatgaaaattttgatagaaaagtatttacagtaaatggtcaaataacaagccatgtaagaaaaagactaggaataaacaaaataagggaaaatggtgatgaacatcatgcagtagatgcagcagtaattgcaataatttcacaaggcatgattcaaaaaattacaaaatattatcaatatattgatggaagatatgaaaaaaattcaggtgaatatattgatttggaaacgggagagatattgacaaaagaacaatatgaaaaagaaaatggtattaattttccagaaccttggccaaaatttagaacagagttagatataaggacaacttgccaaacaaaagaaagaatggaagagtgtttagtcgcagagaaaatatattatgaaaattatgatgatgtaaaaccagtttttatatcaagaatgccaagaagaaaagtaacaggacaagctcatcttgacacaatcagaggaatcagaaaaaacgaggaaggaataaaaacattaacaaagactgaattaacaaagctaaaattagataaaaatggagaaattgaaaaatatccagacagtcaaaaacaagatgataaattgttatataaggctttagtggaccaacttaggaagtttggaggaaatggagaagaagctttcaaaagaccattttacaaaccaaaatcagatggaacacctggtccgcttgttaagaaagtaaaattagaggataaaacaacacttgcggtcgagttaaacaatggaaaagctatagcagcaaatggagatatgattagaattgatgtatttaaagttgatggagaaggttattactttgtaccaatttatgtaagtgatacaataaaaagtaaactgcctaataaggcatgtgtagcagctaagcaatattcagaatggaaagatatgaaagatgaaaactttattttttctctatatccaagagacttaatatacattaaaagtaaaaataaaataaaactaacatctatcaataaagaaaataaagaaactaaagaaacaagcgaaatgtttgcatattatataaaatctggaatttcaacggctgcaatatcaataataaatcataatggcgaatatgaacaaaatagcttaggaataaaaacattaaaggaatttaaaaaattcgaagtagatgttttaggaaactaccatgaagtaaagttaccagagaagagacaaagttttaaaaatttgaaaaagaaagggggaagcttaaaataattttttttaagcattacaatggcttttagaaatgtttatattcaaaacgatgtaaaactaaagataaagaatgaacaattagttataatgaaagaagctaatgagtacacaattcctttagaagatattaacagtatatgtatagaatcacaaagaacatctgtaacaacatatatgttaaaaaagtgtatagaacatgatatagttttatatgtatgcgatgaaaaacatttgccaacaggaatattaattggtactaataattattcaagacagctgaaaaatattaaaatgcaattcgaaatgagtaaaccattaaataaaagaatctggcaagatattgtaaagagaaaaattgagaatcaagcaaaatgcttgcatgaattaggaaaggaacatgagagtaaagttttgatggatatgatattaggcgttaattcaggagatacaaataatgtagaggcacgagcagcggcatattattttcgatttttatttgatgaaccgttaaatagaaaaattgattgtatagaaaatgcagcattaaactatggatatgcaataatcagaggaataatagcaagaacattaataatgtatggatttgaaccagcactaggaatatttcatcataatcaattaaataattttaatctagcagatgatattatagaatgcttcagaccattagtagatttatatgttgcaaataatattgatttaacaaaagattttttagaaacacaagacaaacaaatattatataatattgttaattgtttggttttaatagatggtaaaaaatttaatatacaaggggctgttgaatatatgattaaaagcctatcaaccagtatgaataaaaatgaaaaccttattgttctaccagaactaataggaatacaagaatattgttatgcataaatatatgaggataatagtattttttgatttaccagttaaaaccaaacaagaaagaagaaaggcaactcaatttagaaattttttaataaaagatggattctatatgatacagttttcggtatatgcaagagtatgtaatggaaatgatatggtagaaattcataaacaaaggttaagaatgaatgtaccagatgaagggtcaataaggacactagtcattacagaaaaacaatatgataatgttgaaatattactaggaaagaaatcattttatgaaaaaccggtacaatacgaaaatttatgcttattttaaaacaaaaaaataaaaagaaaagctagcaaacccacttgtttactagcttttcttggaatcaattatatcatatcaaaatacaatatggaactataacttatttcttaaaggctctcctattggaattattatatcatatcaaaatacaatatggaactataaccattaaataataaacgtttttatattacaaattatatcatatcaaaatacaatatggaactataacttatccatactacacctcccattttattttattatatcatatcaaaatacaatatggaactataactctggtacttcttctccgttttgctatcttattatatcatatcaaaatacaatatggaactataacggttatatcccaacgaaattcttgttatagattatatcatatcaaaatacaatatggaactataacttgataagtcatcattcctttctttttataattatatcatatcaaaatacaatatggaactataactgcataaatattgtatcattgaaaaaattaattatatcatatcaaaatacaatatggaactataactcagatgaaaactttgtttatttcaaaagtattatatcatatcaaaatacaatatggaactataacttaccgttaattctgaaatggcagatagataattatatcatatcaaaatacaatatggaactataactcaaaattctctactatttcttttgtaaatattatatcatatcaaaatacaatatggaactataacgtgtaggtgttgaaacaattagttcatattattatatcatatcaaaatacaatatggaactataactgtataaccctttctgttatcatatttcctattatatcatatcaaaatacaatatggaactataacatgttgtggaatgatattattgttccattaattatatcatatcaaaatacaatatggaactataactatgcttcttggaatatctgataatgcttgattatatcatatcaaaatacaatatggaactataacgcagagtctccacttgaacctatctttgcaattatatcatatcaaaatataatatggaactataacttttaataaaaaactgtgttataatagtaaattatgtttccaaggacacctaccaaaaacaggtttaaaatacatcaaaaaagctgacagaattctatcagctttattttgaatagttttattttaacatttacacttgatttgtttgtgattttagatgccttatttttagattatgtctttctttttctttcaaggtttcctttatccaatctgtttcacatcattgactaacccacaacacaaatataaaataatttcaaattatatataaaaatacttagtaaatatgatatactataagtattaataaaattttgtcgaggtgtaacaatgaaaaatattgacataacagaaaaaataatatatattggagcagatgataaagatattgatttatttgaaagtcaatatattgttccaaatggaatatcatataattcatatttaataatggatgaaaaaattgcaattatggatacaatagatagaagaaaaactgaagagtggatacataatttagaaaaagcattagatggtagagaacctgattatttaatagtttctcatttagagccagaccatgcatacaatattgaaaacata

SEQ ID NO: 2522 - DNA, 14989 bp, synthetic construct
  source 1..14989: mol_type = other DNA
  misc_feature 1..14989: note = Synthetic
gaagaataacaggtttcaaagagatgaactatttgggaaaattaatggaatattttaaattaatactaagatattttggtagcaattttgaaatagtattagcattatttgcaatagcacttttatcaataatcataaaacgtaaaaaagaaagaggactaatgacactaataatattgcctacaatattatatataatggcaacagcaagattagctgaatttttagtattaagatatgtaatgaacatattgccaatagtagcaataatgataataatggcaattagcgctatttttgaaaatgaaaaatacaataaaatggttgcaattgcaggattaatagtattaacagggtatggatttttaacagaagaacctataagtctaaataaaggatataacaaatatattgaaatagcagaaaaatataaagaagatgacttggtatatgtaggatacacattttttaatcatatatcaagtatagatgaatttatgagatacaataagacattactattaaatgatactgaattagaaactttagtaggagataaagagcttgaagataaaaacgaatttatattaagtgtaaacttctatatgaatcctgaaaaagttgtgcaagaagtattagaaaaaacagaatatacaaaatatgaactaatatttgaaggtgtagaaggaatagaccagaagatatataaaatttatagataaaacaaaaagagttgattttttatcaactcttttttgtttttaatataaatgtaattgaaactgagaaaaaatatctatataattttaataaaggagaaatgaactaaaatacaaaagaaagagggaaatatggaagaaaataatagtaacatatctcaggaagaactagctaaaagcaatgagatagtacaaagactttggaattactatggaaacaaaatagttggacaaaaaagcttaggaatgtcaataatgatagcaatgatagcaaatggacatgtattattagaatcagtaccaggactagcaaaaacaacagctgcaaaagtaatgacagatgctgtagcaggaaagttatcaagaattcaatgtacacctgacttattaccaagtgacataataggaacacaaacatttaattatgctacaaacacattcgaaacaaagttgggtccagtatatgctaactttgtattactagatgagatcaatagatcaagtgctaaaacacaaagtgcaatgctagaagcaatgcaagaacaccaaacaagtattggtggagtaatatatgagatgccagaaatatttatagtaattgcaacacaaaacccaatagagcaagaaggaacatatttactagcagaagcacaattagacagatttttactaaaagaaaagctagattatccaagtattgaagaagagatggaagtattaactagaattgaaaataatgcattttcaaaaaatgaacaaatacttacattgcaagatataaaatatttacaagaactaagcaaaaaagtatatatagatgcatctgttaaaaaatatattgtagatattataaatgcaactagacatccaaaagactatatagataaaaatttagcagaatatatatcaatgggatctagtactagaggatcaatagcattcatggaaggtgcaaaagcactagccctaattagaggaagaaattatgtaatacctgacgatgtaaaatctttaagatacaatgtattaagacatagaatttctttaaattttgcagcattagcagatgaagtagaagtagagacaataatagatgctataataggagcgataaaaacgccatgataaaaagttatataaataaaataaaagctaatataacaatatattcaactcaaaaaacatcaaatatattagatggaacatacaagtcaatatataaaggacgtagtatgaattttgaggatttgcgagaatatgtaataggggataatgtaaaagacattgattggaaagcatcagccagaacaaatactatactaataaaacgatttatagctgagaaaaaacataatatattatttgtaatggatagtggaagaaaaatgctagcagatacaccaaaaaaagaatctaaaaaagaagtagcattaataacggcaggaacagtagcatatttagcaaataaaaatggagactatgttggagctatatacaataaaaataactcgatagagtattttccatttaagtcagacttatataatatagaaagcatattgtcacactatgacaatagtgttgaattagaagacaaagatgaagatacaataaataaatctttagaatatgcatgtaaacatataaaaagaagatgtatcatttttgttattactgatttagatggaatggataaagtaaaagaagatactttgaaaaaaatagcaatgcaacacgatatattatttgtaaacataaaagatgcttatatgagtgaagaaaatatctatgatatagaaaattcagaatatattccaaaattactattaaaagatccaaaaatattagagttagaaaaacaagagagaaaaaaaatacaaacagctgctaataaaaagctaaaaaagtgtagagcaacagtagaaactatagaacaagaaaaagaagtacctcaaaagataatagaattattagaaaggcacaggaatggaaacaaccgttaaattgcaagaactatatgcatactctattttgccaatatcaataattgcaatattagtaattgcaattacaatatacatattaatagaaaaaatcaaaaagaaaaatgaaatagtaaaaatagaagatgtaaaaattgtagagccaaagaatattaaatcaattcaaaataagtatttaaaaaggctagataatttaagaaaaaaattagagcttaatagaataacaacaagagtagcatatcaaggattaagtacgctaattagatattttatatatgaagtaacagatataaaagttcaaaattataccttatcagaaatagaaacattaaacatgccttttttaacagaactaatacaagaatattatgcaccagaatttgctaaacaatctataggagatataaaacaagcaatagaaaaaactagaaaggtagtagaaaaatggaattaaaatatccatggattctaattataggaataccacttctaatctttttgatagtatttaaaatcaaaaaagaaaataaatataaaactggaataaaaatagctaatacgcaatatgcaaaaaaaataccatattatcaaacaaaattagcacaatacaaaatattaacaacagttttgaaagtgttttgtataatatgcatttgcatatcagtattattaatatcaagaccaataaaagtagaaacatcagagactaaacaacatagtagagatatatttatttgtatagatgcctcaacatcagtaaactcagcaacaaaagaattcactaaaagtttaaaggaaatgttaagtgagctaaacggagaaagagtaggaataacaatatttaatacaacaacagtgctattagcaccacttactgatgattatgagtatatatcagaaattttagataatatcaataaagcaatagaagaacaagagaaacaagaaaaaggtcaagattattcattttattggtatcaatatatgttcgaaggaaccataactaaaaatatagaaagaggaagttcacttataggagacgggttaacatcaggaatatatatgttcccagaacttgaagaagatagatctagatcaataatattaattacagataacgtagataatgctgaacctggaggagctgtaatgacactacaagaagcaactaatttagcaaaagaaaaaaatataaatttgttttgtatagcaccaggaccaggagaaattgaaccagatggaatatatataacaaaagaaaaattagcggaaggaagaaaagaattaaaaaaatatacagaagcaataggtgggcattattacgaaaaaacaagtaaaacgaaaatgaatgatatagtttcaggtattaataaaacaacaaaaagtttaataactttaagaacaaatagaagaataataggaaaaccagaaatagcatttgctatattaattatatcaatctcagtactatttatattaaataaaaaggtgaaaatatgataatatctccaattataccaatatggcttatgggaataatttgcgttattctattagctgtttttaaaagtaaagacaaatatacatttataaggcaaataattataatttctttattatttataattaatttaagagttatgtacatgtcaaaaaaatcaaaagttcaaaagttagatctagacacagatattatattagtaatagataaaactgtaagcatgatagcagaagattataatggtaatgatactaggttagaaggcgtaaaagaagtatgcaattacataacagaagaattagacggagcaaaaatttcgataataacatttggaaattatgctcaaaaagaagttcctatgacaaacgatacaaatataataaacgatacaatagatgaaatgtatgtagtagatgcaaattatgcaaacggatcaatactagatttacctaaagagcttttagaagaaacattagaaaaaaattacaataaagataaatcaagaaaaagaatagtattttacatcagtgatggagaaataacaggcgaaaataaaaaaatggaatcttttaaagattgtagtaaatatatagataatggagcagtattaggttttggaacatcaaaaggtggaaaaatgcaaataactgattgggatggttcaaaagaatataaaacatactttgacgaagaaacatttgaagaaaaaataggcatttcaaagattgatgaaggaaacttaaaacaaattgcaaatgatatgaaaatagactatatacatgtagaaaagaaaaaagacataaacaaaaaagtcaaagaaatattgaaagatgcaaacacagaattaaatgatgataaaaaaagtttatatacagatatatactacatttttgtaattccgcttttaggaatgctagtatacgaatatataaattataggagaaaattataatgaaaaaaataataagaattatatatattattcttatactaatactgataaagttaataatttcatttactctaaatgaaatatatatatccaaatacgaaaaaggaatatataaagaaaatctagtaaaaatcttagaaattttaaattatcctgaaagctatattgcacattataaccatggaaattattattatcaaaatgaaaaatatacagaagcaataaatgaatatgataaggcactaaaatcaaagccacctaaaggaaaagaatgtagaatcagaataaacaaagcattatgtatattaaaatcagtagatttagaaaacaagaaagcagaagaaaatatagagatattatataaagcaagagaagtcctatgcgaacaaggatgtgctaatacagataatcctaatggacatagtaaacaagcggaacaattgaaaaaagaaattgacgaattaatagaaaaactaaaagaaaaaaatcaatcagaagatccagaggaacctgatgagccagaaccacaaccacaaccaagccaaagtccggataataaggaatctaactatgaagataaaaagaaagaattagaaaaaagaaaaaaagaagctgaaaaagacagaaaagaaggactaacatcagctggtaatttagatggaaatacaaataactggggatatggcaaaaagaattggtaaacacttgaaaaataaaagaaaataatatataataataaacatattttaaaaactaagaaaaagaggagtacatttataaattactatcaaagagaaagaagtggtctcgctgaaagcttctatagtaaaataaatggaaggtagctttggagttgatatagtgaagttaaaagtaattatatccgtgtcagatacgttaaaatctatgataaggaaaataaaggtggtaccgtaatatacaattgccctttgctatatagcagagggcaatttttattataaaatggaggaagaaatgttacaaataacaacaaaacaagaaggagcagaactcacaagcataaaattaaatggaaaagaaaaactacatgatggaaaagaatattggaacagacaagcgccaatactatttccaatagtaggaaaactaaaagataataaaacaataattgaagaccaaacatacgaaatgggacaacatggatttgcaagagatatgaaatttgaatgcataaaagacaaagaaaatataaaagaatataagctaaaagaaaatgaagaaacattaaaaatgtatccttataaattcgaattatatgtaaaataccaagtaaaagaagatacactaatagtaagctatgaagtagaaaatacagataataagaatatattttttggaataggtggacatccagcctttaaatgtgattattcaaattgcaaatacagtatagaatttgaaaaagaagaagatgaaatcggaatattagaattagaaaatggactaatttcaaaagcaagagtaaaagaagaaatattaacaaataataaaattattttaaatgaaaactcatttgaaaatgatgcaataataatgcaaaatataaaatcaaataaaatatatttaaaagaagatgaaaaaacaatattggaatttgactttacaggatttccatatttagcaatatggtcgaaaaaaggagcaccattcgtctgtatagaaccatggtacaatatagcagaccataaggaaagcagtggaatatttgaagagaaaaagaaaataataggaataaatccaaaagaaaaatttaaatgtaaatataaaataaaattttatgaataggaggaaaaaatggaacataaattaaatgacaaattaaatcccaaagattttgaagagaaaatatatgaaaattgggaaaaaaacggatattttagaccagcagaaaataaaggacaagaaacatattgcataatgatgccaccaccaaatgttaccggaaaattacatatggggcacgcattagatgacacaatacaagatatattaataagatttaaaagaatgcaaggatatagaacactatggttaccaggatcagatcatgcagctatatcaacagaaatgaaagtagttcaaaaattaaaatcaaaaggaatatcaaaacaagatttaggaagagaaaaattcttagaagaagcatgggattggacacacgaatatggaggaataatccaaaaacaacaaaaaaaattaggatgttcatgtgactgggaaagaaatagattcacactagacgaaggaatgtcagatgcagtattagaacaatttataagactatatgaaaaaggtctaatatacaaaggaacaagaatggtaaattggtgcacaagctgtaatacatcaatatcagatgcagaagttgaatacaaagaagaaccatcacatttatggcatataaggtataaaattacaggaagtgatgataaatacattgaagttgcaacaacaagaccagagacaatgctaggggatacagctatagcagtacatccagaagacgagagatacaaagagctagtaggaaaaacttgtattttaccaataatgaataaagaaattcctataatagcagatgaatttgtagaaaaagaatttggaacaggatgtgttaaaattacaccagcacatgatatgaatgattatcaagcaggcttaagacataatttagaaataatagaagtatttgatgaacactttaaaatgggagacttagtaccagaatataaaggaatgaatttactagaagcaagagaaaagattgtagcaaaattacaagaaataggagcactagtaaaaacagaagaatatacgcacaatgttgcaaaatgtgaaagatgtaaaaatacaatcgaaccaaaagtatcagagcaatggtttgtaaatatgaaaggtatggcgaaaagagcagcagatagtgttcgaaacggaaaaacaaagtttgtaccacaaagatatgaaaaacaatattttaactggttagacaatatacaagattggtgcatatcacgtcaattatggtggggacacagaataccagcatattactgccaagaatgtaatcatatcaatgtatcaaaaaaagctccagaaaaatgtgaaaaatgcggaagtactaaactagagcaagatccagatacattagatacatggttttcatcagcattatggccattttcaacattaggttggccagatacaactaaacaagattacaaagacttctatccaacacaaacattagtaacaggttttgatattataactttctggatttcaagaatgatgacacaaggattagaattaacagacatagaaccatttgaagatgtattagtacacggaattgtaagagacaaccaaggtagaaaaatgtcaaaaacattaggtaatggagtagatccactagacgttatagatgaatatggaacagatagtttgagaatgtcattaataataggaacaacaccaggaaatgatatacgttatagcaatgacaaagtagaagcagcaagtaattttgcaaataaattatggaatgcatctaagttcgtattaatgcaattagaagatatagaaaactttaaagaaaacagcatagaagagttagatgtatcaaaaatgatagacgtagataaatggataatttctaagctaaacacattaacaaaagaagtaactgaaaatattgaaaaatatgacttaggagtagcacttcaaaaaatatatgactttattagaaatgatttttgtgattggtatattgaaatagtaaaaccacgtttatgggataaagaaaacgaatcaagatatacagttcagtatattttaaaccactgcttatgcacaagtttaaaactattgcatccattcatgccatttataacagaagaaatatattcaaaattatatcataaagaagaaagcataatgatgtcagaatttccaaaatacagcgagaaattaaattttgcaaaagaagaagaaacaacatctgaaataatgaacataatagtagaaataagaaatgtaagaagcaaaatgaatgtacatccaagcaaaaaatcaaaattaattttcgtaacaaagacagcaaaacaagaaatagaaaaatcaaaagatttcttagaaaaacttggatatgcaaacgaaatagaaattagagaagatgcaaaagacataccagaaaatgcagtagcaataatttctaaaaatatggaagttcatataccatttgaagaacttgtagatatagaagaggaaaagaaaagactagaaagtgaaaagaaaaagctagaagcagaagtacaaagaggagaaaaaatgctttcaaatccaggcttcgtaaacaaagcaccagaagcaaaaatacaagaagaaaaaaataaattagcaaactacaaagaacttctagaaaatgtaattcaaaaattagaaaaaatgaaataaaccttgtcaatggagatgtcctttttttaaaagtaaaatatgaataaaataagataaactataaaaaagtttatcttatttttataacagaaaaaggaaaaatagcaaaaagtggaataatatgatataatatagtatctttataagatagctattgacaaagaaaaattattattataagatataaaagtgctaagggaatggcacattttatatcatatcaaagtagaataggtttctataataagacctaagttttattaagaaacttatgagtcgtaaagctctagctgtccaataatgggcagctatcttcatatctagaagaataatggaggtactaactatgggatatagagtaggattagatataggaataacatctgtaggatggtcagtaatagaagatgatacgaaaggtaatccaataagaattatagatttaggttcaaggatttttgatgcagcagaaaaaccaaaagatggttcaccattagcaaaagaaagaagagatgctagaggattaagacgtagattaaggagaaaaaaacatagagtagaaaggacaaaaagattactagaaagatatgatattatttcaaaaaaagaaatagaagaaatgtatgaaaattcagcacacgcaaagtatttgtttaatgtatacgagctaagagtgttaggactagacaaaaaactaacatctaaagaattagcgcgtgtattaatcagtttagtaaaaaagagaggatataagtcaaacagcaaagctgaagaaactgatggagaaacaggaaaactattgacagcaactagagaaaatgaacaattaatgaaagaaaaaggctatagaagtatagcagaaatgtacttaaaagatgataaatttaaagtaaaagataaagatggcgatatactgttagataaaaatggggaaccactaataaaaataaagaattctacaggagattataaaaatacaacactaagaaaactattagtagaagaaataaaaatgattttgaataaacaaaaagaacttaatgaaaaaataactgatgaatttattaacgaatatttaaatatatttgaaggacaaagaaattttgatgatggtccaggatttccaagccaatatggaggaaatttaattgaaaatatgttaggaaaatgtacttttgaaaaagaagaaaaaagagcaacaaaagcagcatatacatttgaatactttaaattcttacaaacacttaaccatataaaaatagaaaaaaatatattaaaagaagatggtagcagaattaaagaaaaaatatcactaactcaagaagaaagagagaaaattaaagaattagtcttttcaaaggtaacagtcacatactctgatattagaaaaattttaaaactatcagaatatgaaagattcaatatgttcacatataaagatatgataaattataatgatgaaacaaataaagaaatagaaaaagataaaaaaataaaagaatttgaatcatataaaaagataaaaacagccttaaatcgtattgaaaaagagtatatatcaaaattaaatacagaagaattagacgaaattggatatgcattaacaatatataaaaatgatgataaaagaagagaatatttaaaagaaaatacaactaatttatcagaagaggcaatagaagaattattaaaattgagtttttcaaaagttggaaatttgtcaataaaagcaatgaaaaaaataataccagaactagaaaaaggactaacatatgataaagctgtagataatgtatatgaagactttagaggaaaaataaacacagagaaaaaaagaaaactaagattaaaagattttgaagaagaaatatctaatccagtagttaggagaggattatcacaagctataaaagtattaaatgcaataacactaagatataatacaaaatatggaaagccagatgttgtaatagtagagcttgcaagagaactaggtaaaaactttggagatagaagagatatcgaaaaaagacaaaacaataatatgcaattaaatgaaagagttaaatcagaaatcataggattaggaaaaaataatcctacaggacaagatattgtaaaatataaattatggcaagagcaagactgcaagtgtatttattcaggaaaaacaataccagtagaagaattattcacagatttagttgatgtagatcacataataccatatagtcaatgcttcgatgatagttataataataaagtattagtattagccagtgaaaatagacaaaaaggaaatagagtaccatacaaatatattaaagaatcaaacagaaatatagaagaatatgaaataagagtaaatacacttattaaaaacaataaaaagaaacaaaatttaataaagcaagactttactagagaagatgcaaatgaatggaaagaaagaaacttaaatgatactaaatatatatgcaaatatatgtacaatcttataaggaatcatttagaattttcagacaatccaaattttgttagaaaagtgtggactgtaaatggagcaataacgtcacatataagaaaaagattaggaatagaaaaagttagagatggtgacactcatcatgctgttgatgcaacagtaatagcggttacaacacaaaacatgattaataaattaactaaatattatcaatacactgatggaagatatatgaacaataaaggagaatatattgatttatatacaggtgaaatattaaatgctaaagaatatgaacaacaaaatggaatatattttccagagccatggaataaattcaggaaagaattagatatcagaacaaactgtaaaacacgtgaaagaatgattgaatgtcttgaagcagaaaaaatttatacctataaagattatgatgatgttgaaccaatatttgtttcaagaatgccaagaagaaaagtaacaggaacagcacatttagaaacaattagaggaataaaagaacaagatggagaattaaaaacaataacaaaaacagaattaacaaaattaaaattaaaaaatggagaaatagaaggttatccagaaaattgtaaacgtgatgatagattactatatgaagctctaaaaaataaattaatagaatttaacggagatgcagaaaaagcttttagtgaacaattctataaaccaaaagcagatggatctaaaggaccaattgtaaacaaagtaaaaatagaagcagttacaacacttggagttaaactaaacaatgacaaatcatttgcagcaaatggagcttgtgttagattagacgtattttatgttaaaaatgaaggatattattttattccaatatatgttagtgatactgtaaaagaaaaactaccgaataaggcatgtgtagcaggaaaaccatattctgactggaaagagatggatgatcaatactttatcttttccttatatccaaaagatttaatatgtattcaaggaaaaaataaaataaaattaaatccagtaatacaagataaggatgctattgaggttgaagaaatatttgcatattatataaaagcggggatatcaggagcaaacattgcaatacaaacaaatgataataaatatgaacagctaagtttagggattaaaggattgaaaaaactagaaaaatatgaagtagatattttaggtaattatcataaagttaaatttcctgaaaaaagattaccttttaatataaataaaaaatagaagggagggaagctttaatatttatcttaaagctactattgttcttacagaataatagataaatgttttaagctaatagtatggctttcagaaatatatacgtgcaaacagatgcacatataaaagtacaaaatgagcaattactgatacaaaatgaaaatggaaaacatacaataccattagaagatattaatagtatttgtattgaatcactaagaacaagtgtgactacatatacattatacaaaataatagaacatgatattattttatatatatgtgattcaaaacatcttccatcaggaattctcatagggactaataattattctagacaactgaaaaatttacaaatgcaatttaatatttctaaacctttactaaaaagaatatggcaagatatcgtaaatgtaaaagtaattaatcaagcagaatgtttaaaagagttaaaaaatgacaattatgagaaaatattaggaatgacaaaaggaataacatcaggtgattctaaaaatgtagaggcaaaagctgctgcctgctattttaagtcaatatttggaaatgatttcaatagaaataaagaatgcatagaaaacgcagctttaaattatggctattcaatagttagaggcatgatagcaagaacattaataatgtatggatttgagccagctttaggaattttccatcataatcaattaaataattttaatttagcagacgattttatagaatgttttagaccaataatagacttatatgtactaactaatatagatttaagattaaaaaatttaaatccagaagaaaaacaaaaaatatataatgtaatgaactgtttagttttaatagatggtaaaaagtttaatattcaaggtgcaattgaatacatgataaaaagttattcaacaagcattagcaaaaaagaaaatttaatcaaattaccatatttgatcaaattagaagagtataggtatgcataagtttatgagaatactagtttttttcgatttaccagttaaaactaaaacagaaagaagaaaagctactcagtttagaaattttttaattaaagatggatattatatggttcaattttcagtatatgctagagtatgtaacggaaatgatatggtggaattacataagaaaagactaaaagccaatattccagatgatggttcaataagagtattagtaataaccgaaaaacaatatgaaaatgttgaaattttattaggaagaaaatcaaaatatgaaaaaccaattgaatttgaaactctatcgcttttttgaaaaaacaataaaaagcgtaaaaaaattatttaattgcatattttttataaaagaacaaaagctagtaatcattgaaattactagcttttgttagggaatattatatcatatcaaaatataacagggaactataactatacatttatttacatcatcaaaatatggattatatcatatcaaaatataacagggaactataacatatgccttgtgtattgtccggagatataaattatatcatatcaaaatataacagggaactataac

SEQ ID NO: 2523 - DNA, 14820 bp, synthetic construct
  misc_feature 1..14820: note = Synthetic
  source 1..14820: mol_type = other DNA
aaaaatctaaaatatcaataatagacatagacaacatagaagtaaaagaaccagactttgatatatttaaaataacatcaaactcaatgaggatagacaacatagtatcagaaataacaaaactttcaagaaacgaaacagcaaagctcattgaaagcgagaaggtttcaataaattgtaagattgaaacaaagcaatcaaaaatagtaaatataggggatgtattgataatacgaggaaagggaaagttcatagtaggagctgatttaggagagaacagaaagggaaaaagaatagttgagataaagaagtataaataaaataaagccttttacaataataaagcatattattgtaagaggtgttttttaaaaaacgaaaaatttatttacaaacaatcaaaatgagtgtataataccagtattcaatctataaaattttaggaaatcttcctagaattaaaatccaaaaaacatttcaataataggagatgatgtatatgctcattgtattaaagtgcataatatcaatctaatttgtaaaaaataaacacatatattgacatacgctaaaacgtacgctataatataaatacaggaggtgctttgcgatgactaatgtaaatgttacaaattttagaaaagatatatatgaattattagaccaaacaataaaatataatgaaccaataaacatttctacaaaaaatggaaatgctattgtactatcagaggaggattataataacataatggaaactttatatatttcatcaataccaggattaaaagaagatataataaaaggactaaaagagccaattgatgaatgtgtcgatgaaaaagaggtgaaatggtagtgtatagaatcgtgtacagaaagaaagtactgaaagacattcctaaaataaaagcaataaaactagaaagcaaagttcaaaaattaattgaaataattaaacaaaatccatttcaaaacccaccaccttatgaaaaactagtaggagatttagaaggtgcatattcaagaagaataaatgtacagcatagattagtttatcaaatactagaagaagaaaaaacaatcaaaatacttagcctttggacacattatgaaaatatttaaaaataaagccttttacaataataaagcatattattgtaagaggtgtttttttatgaggaaatataatagagatgtgatgagttattgggttagaaagttgagggggataaagatagaagacgtgaggtaaaattttaccaaaagttgacagatggaaaaaagtatgatattataaaatagtaaattgtatatggaacgtacaatttattatatcatatcaaagtagaataggttactataataagacctatgagtcgtaaagctctagctgttcactaatgaacagctatcttcatatatgggaggtaataatgaattataggatagggttggatttaggtattgcatctgtgggatgggctgttttggaagatgattatacgggaaaaccaaaaagaatagttaaattgggagcaagaatatttgattctgcagaaaacccaaaagatggatcttcacttgcattgaatagaagagaggctagagaaactagaaggagattaaggagaagaaaccatagaataaaaagaacaaaaaatcttttggaaaaatataatatcatgacaacaaaagaaatagaaaatatgtatgcaacatataaatttcaatttaatccatatgaattaagagtgaaaggacttgatgaaaaacttactaatagtgaactttcgcgaatattgataagtttcgtaaaaagaagaggttacaaatcaaatagtaagtcagaggaaacaaatgataaagagatgggcaaacttttaacggcaactaaggaaaatgaattattaatgaaagaaaagggatataggactgttggagaaatgtatttaaaagatgaaaaattcaaaatgcaaatgccagatggaagagttcttttaaaagtacgtaataccacagatgattataaaaatactccacttagaaaattactattagatgaaactaagcaaatattaaataaacagaaggaattgaatgtaaatataacttctgatttcattgatgagtatataaatatatttacatcacaaagaaattttgatgatggaccaggtcaaccaagtatttatgcaggaaatcagatagaaaaaatgttaggaaaatgcacttttgaaaaggaagaaaatagggctgcaaaggctacatatacatttgaatattttaaattattacaagatataaatcatataaaaattgaaaagcatattatcaatgaaacaggaaaaaaagaagtgcttaaaagacctttaaccgaagatgagagaaatataatcataaatttagcaaaagctaaagtaactttaacatatgcttcattgcgtacagcattaaatttagaaggtaatgaaagattcaacatgatacattacaaagcaacaaacgtttttagtgatgaaatcaataaaaaagccgaaaaagaaagaaaattcaaggaatttgaaagctaccataaaatgagagtagcaatggataaagctgaaaaaaactatattcttaagttaagtacagatgaattagatgtaataggtacagtgcttacactttacaaaaatgacaataagagaattgaaaaactagcacaacttaatttgcctgagaatataataaatgaaatacttaaattatcattctcaaaggttggtaatttatcaataaaagcaatgaaaaaaataataccatatcttgaaaaaggttacacttatgataaagcagtaaatgaagtgtatgaagactttagaggagtagttaatacagaaaaaaagaaaaaaattgcgttaagagatttagaacaagaattatcaaatccggttgtaaaaaggtcagtatctcaagctataaaggtattgaatgctataacaagaacatatggggaacctgatgttataaatgttgaattggcaagagaactatctaaaaattttgcagatagacaaaatataaagaaaaatcaagaaaataatatgcaaagcaatgagaaagcaaaagaagacattttgaaacttggtaagagcaatccaacaggacaagatatagtaaaatataaattatggaaagaacaagatggaatatgtgtttattcaggcaaacgtatttcaatagaagacttatttacagaagctgttgatgtagatcatattataccatatagcatgtgttttgatgatacatataaaaataaagttttagtactttcatcagaaaatagacagaagggcaatagaataccatatcaatacatgcaagaaaaaggaagagacttagatgaatatgaaataagagtaaataatattattaagaattactcaaaaaaacaaaggttattaaaacaaaaatttacgagagaagatgcaaacgaatggaaagacagaaatatatgtgatacacaatatataagtagattaatgtataatttgattaaaaatcatgttcaattttcgaataatgaaaattttgaaagaaaagtttttacagtaaatgggcaaataactagtcatataagaaagagattaggaataaataaaataagagaaaatggggatgaacatcatgcaattgatgcagcaataattgcgacagtttcacaagggatgattcaaagaattacaaaatattatcaatatattgatgggagatatgagaaaaattcaggtgaatacattgacatagaaactggggaaataataactaaagaacaatatgaagcagagaatggaagcaatttcccagaaccttggccgaagtttaggaaagagctagatataagaactacatgcaaaactaaagcaagaatggaagaatgtctattaacagaaaaaatattttatgatgattatgatgatgtaaaaccaatttttatttcaagaatgccaagaagaaaaataacaggacaagctcacttagacacaattcgaggacttagaaaaagtgatgaaggtctaaaaacactaacgaaaacagaacttacaaaattaaaattagataaaaatggagaaattgagagatacccagagagccaaaaacaagatgataaattattgtataatgcactagtggagcaattgcgaaagtttggcggaaatggaacggaagcatttaaaaaaccattttataaaccaaaatcagatggaacaccaggtccacttgttaaaaaggtaaaactagaagataaaactactcttgctgttgagttaaataatggtaaggctatagctgctaatggagatatgattagaatagatgtatttaaagtagaaggagaaggatactattttgttccaatctatgtaagtgatactattaaaaataaattgccaaacaaggcaagtgttgcatcaaaaacatatgcagaatggaaagaaatgcaagataaagatttcatattttccctatatccacgagatttgttctatgtaaaaagcaaaaacaagataaagctaacatctataaataaacaggataaggagagtttagatacaaatgaattgtttgcatattatgtgaatgcagacatttcaacggctgcaatagcatgtataaatcataacggggaatatgaacgaagaggtttaggaattaaaagactgcaagaattcaaaaaatatgaggtagatgttttaggaaattatcatgaagtaaagctaccagaaaaaagacaagatttcagtaatttaaagaagggaggaagcttgaaataaattgttttaagcgttacaatggcttttagaaatgtttatattcaaaatgatgtaaaacttaagataaaaaatgaacaattagttgtaatgaaagatactaatgaatacactattcctttagaggatattaatagtatatgtattgaatcacaaagaacatctgtaacaacatatatgttaaaaaagtgtatagagcatgatatagttttatatgtatgcgatgaaaaacatttgccaacaggaattttaataggtactaataattactcaagacagcttaaaaatattaaaatgcagtttgagatgagtaaacctttaaacaaaagaatgtggcaggacattgtaaaaaggaaaatcgaaaatcaggcaagatgcttgttagagttaggaaaagaacacgaaagcaaaatcttgatggaaatggtacttggagttaattcaggagataccaataatgttgaagcgagagctgcagcatattattttagatttctatttgatgaaccattgaatagaaaaattgactgtatagaaaatgcggcactaaattatggctatgcaatagtaagaggcataatagccagaacattaataatgtatgggtttgaaccagctttgggaatatttcatcataaccaattaaataattttaatctagctgatgacattatagagtgctttagaccattggtagatttatatgtggcaagtaacatagatttaactaaaaaatatttagaaacacaagataagcaaatattatataatattgttaattgtttggttttaatagatggtaaaaaattcaatgtacaaggagcagtagaatacatgataaaaagtttatcaacaagtatgaataaaaatgaaaaccttatagttctgccagaactaataggaatacaagaatattgttatgcataaatatatgagaataatagtgttttttgatttaccagttaaaaccaaacaagaaagaagaaaggcaactcaatttagaaattttctaataaaagatggattctacatgatacagttttcagtatatgcaagagtttgcaatggaaatgatatggtagaacttcataaacaaagattgagatcaaatgttcctgatgaggggtcaataaggactttagtaattacagaaaaacaatatgataatgttgaaatattactaggaaaaaaatctttttatgaaaaaccagtccaatatgagaatttatgcttattttaaaacaaaaaaataaaaataaaagccagcaaatgcttgaatttgctggcttttattggaatcaattatatcatatcaaaatataatatggaactataactactttaacttctaatataacaaaggaaaaattatatcatatcaaaatataatatggaactataacattgttttattagttttcatttttgctgttattatatcatatcaaaatataatatggaactataacaattctgtttatgctccgcgtacatttcttattatatcatatcaaaatataatatggaactataactgaagatatgtttaattttatttcaaatgaaattatatcatatcaaaatataatatggaactataacgattggacttacaacttctccatttagttccattatatcatatcaaaatataatatggaactataactgttgctgaattgccgtgtacaactgctagaattatatcatatcaaaatataatatggaactataactactatatctgtgcaaccaacattaaaacaattatatcatatcaaaatataatatggaactataactggttttagataattttagaaataatatttattatatcatatcaaaatataatatggaactataacgaacggatttggctgggtgaaaaatattgtattatatcatatcaaaatataatatggaactataactagatttttgattatcttgtgaatctaaatattatatcatatcaaaatataatatggaactataacattataatctttgaaccaattttcaacttcattatatcatatcaaaatataatatggaactataacaggaggtgtaaagaatgtttattttaagaaattatatcatatcaaaatataatatggaactataacatatttgaggtgtttaaaatgataaatttaaattatatcatatcaaaatataatatggaactataacatcaagagttttatattaacaaagaaaatgattatatcatatcaaaatataatatggaactataactttattctaaaccatgatttgtctgctatcattatatcatatcaaaatataatatggaactataacttgcctttccatgatttcttgcatagtaacattatatcatatcaaaatataatatggaactataacagttatggttttattcaagatgtttttgtaattatatcatatcaaaatataatatggaactataacaaaatctcttatcttacaataatcattttcattatatcatatcaaaatataatatggaactataactctgtaatcttctttacttaatttttccattattatatcatatcaaaatataatatgaaactataacaactgtctagcaattcctccagatattgaaattatatcatatcagaatatggaactataatcgtatgcaccataattagaacacttgaattatctaaacaaaaatagcttgaaaaaaggttatgaaaaaagaagtcaagtacaaatattactttgcagtcaacttccataagtagtatagcacatcaaaacaaagatgtcaataaaaccaataaatattcataatattcattaaaagctacttgctttataggaaaatctttgctataatatttttgcacgtatctattattcctataatagagaatggagtaggttaataaaaacctgctcttatttatttttagctcagcaaatgtcaaatatatttaggagcattttaaatatcactgtattctaagctcaatttttaaaatataattccaaaaataatttctaaacttcccccaaaccccttgttaaaccaccaaacttgtgataaaatgctattatgtagcaaaatatagaaatttattggtaataattttcaagtttatgtttataggaggttactgataaagaaatgacagttaagaccaatttggctaagaattataatgatatgacagatgaagtagttattgagcaaattaaagctggggattctcaggctttggattatataatggataagtatgctgagcttgttaatatgaaggcaagcaagttctttattgttggggcagaaaaaggagatattgttcaagagggattaattggcctttataaagcaacaaaggcttttagtaatgacaagcaaaattcctttaaaacatttgctaatatgtgtattgaacgccagataattactgcaataaaaacagcaaataggcaaaaaaacattccacttaattcagcattttcaataaatgcacaaatttgtgatgaaagcgatgaaagtgataaggaaattgttgatattttaaatgctcattgtatagaagatccttcagaagaaattgcaaaaaaggagtattttaaatttattaataaaacaataaatgacaatttaagtgaacatgaaagaaatgtattgaaatactatgaacaaaacagaacttatgaggaaattgcaaacaaactaaattgcaaaacaaaatctgtagatactgcaatgtctaggattagaagaaaagcaaataaaataaaaaaacaagttgatgaaaatgaaaatatataaccagagcaagagttttcaaactctggttattgaaatttttaaaaagttgatataaaatataaaaggtacacgcatttatagctcaggtggatagagcgctcccctcctaagggagaggccgctggttcgaatccagctaagtgcaccatttttgtttttgaacaaaggtgataatatggaacaaaaattcatgaaagaagctctaaaagaagcccaaaaggcttatgataagctagaaatccctgttggagctgtaattgttaaaaacggcaggattatttcaagggcgcataatttaaaagaaacaaagcaaactgcaactgcgcatgcggaaattttggctattcagaaggcaaataaaaagctaaataattggagacttgtggattgtgatatatatgtgaccctagaaccatgtgatatgtgcatgggagcaattctttcctcaagaattaaaaatatttatataggcactttagatcctaagaaaaaggaaaaaatagatataaataaatataaagaagaatatgatacaaatatagaatacggaataatgcaagaaaaatctgaagaaattttaaagaactttttcaaggatttaagaaaaagtggagggataaaatgataataaaccagtggaaaaaaatgaatattggagcatatatttttgctgtagtaacagtacttgtattgattgttgtagcatttattttgtataaatatcaagtagaaggcgaaagtgtaccaccatttaaaatacctaaaatggtagttgtaagtacagctaaaactcaaaatttgaatttggaggaaggaatttatactgcagacatttaccaaacaaatgatataaaaatatctattgaaaaaaatcctaattacaaaaaagaagctattataaaaaaagtaacaattaacaatatacaaatagataaaaagcaaacaccaggaacaatagaaatatatagaccatcaatgggaacaaaattatacgaatacactgaacaatataaaattcaagacagtattgaatactatggggcacaggaaacctatatgaaaggtgagaaactagcaatttcaaatcaaggtggaatcattgaattttcagttattctcaaagatttgaaaaaaacacagtataatgaaaatgaagcaataaaagttgatggaactttattaaggcaaataggaaaagaaaagctaaactataatattgcctttgatttaatcatagaactagaaagcggagtaaagctaaaaacaaagataacattagatttaccaacaggaaatattatagaaaatggaattgaaacattagaacaaactgatttaaaaacgatttttaaaagaatataaaaaattctaaaaaacctcttgccaaatttaaaaacacattatataatattggttatgaagttgacctctgtatggaaagtaattcaataaagagctatgaacctcgtcaggtccggaaggaagcagcgataaatggtaatatttatgtgagttgctttccatagagaggtcaacttgtagtaataggaggattttagtaatggcatatactgctttatatagaaagtttagaccaattagttttaacgaaatggttggtcaagagcatattacaaaaactttgaaaaatcaaattgtagcaaatagagttgggcatgcttatctttttagcggtggtagaggtactggtaaaacatctgctgctaaaattatggctagggctattaactgcttacatcctaaggaagatggagaaccatgcaatgagtgtgaaatttgcaaggctattttagatggttcactaacagatgtagttgaaatggatgctgcatcaaataatagtgttgaagatgtaagagctattcgtgatgaagtaaattttttgccaactgttgcaaaatatagagtatatattatagatgaggttcacatgttatcaacaggagcatttaacgcacttttgaaaacgcttgaagaaccaccagaacatgtaaagtttattttggcaacaacagaaccacaaaagctaccagcaacaatactttcaagatgccaaagatttgattttaaaagaataacagttgataatattataaaaagattaaaaataatttgcaaagaaagtaatatagaaatcacagatgatgcgcttaaaatgatagcaattcttgctgaaggagcgttaagagatggaataagcatacttgaaaggtgtagtcaagacacagaaggtgttattaatgaagatatgattcgcgacttagttggaatgcccaaattaacatatataaaaggattaaccaaaagtataattcaaaaagatccggaaaatgcaatttccatgacagatacaataattagcgaaggaaaagacttggataatttcttatgggaggttattaagtttattaaagacacattaatatataaaacaactaaaaagctagagctatatagcaaggaagatattgaatttataacaaatcttgcaaatgaagttacaaaggaaagattattgaagttaatatatgaattatcagaacttgcaaatagtatgaaaatatcaacacagaaaaatataatttttcaaacagggattattaaagcttgcatggaaatagaggaaacttatattgcgccagtacaagtacattctatgccaaaacaggctggaaaattaatttcaaatgagaaacctgcaaaaacaacggtagaacctgcaaaaccacaacaagtaagaactacagaaactccaaagaatccaggcaagtatgtaccatattggcaaaatgtactggataaagttagacaaagtggtaaaatgactatatatgcaaacttacttggaacaaaaggagttttggtaaatgatttgattgtagggatagaatttccgggaaaagttacagattttgcaaaaaaagtattagaagaacatgaaaataaaatttttcttgaaaagattgtttcaatggaacaaggtgcagatatgcaagttagaatattagataaactagaaaaacaagaacaaacgaaaaaacaaggaatagaggggctagcagaagatttagacctaccattcaatgtaatagatgagtaaagaaaggatgatttgaaatgtcaaaaagaggtggattcccaggcatgggaggatttggtggaatgaacatcaatcaattaatgaaagaagctaaaaaaatgcaagcagatatggaaaagactcaagaagaattacaagcaaaggaatttgaatcaacagcaggtggaggagctgtaagcgttaaagtttcaggctcaaaacaaattttagaattaaaactaaataaagatgttgttgacccagatgatgttgaaatgctacaagatttaatcataacatgtgtaaatgatgcaatgagaaaagtagatagtgcacaatcagcagggtttggtaaatacaatataccaggtttaatgtaggaggacaaagtgtcatactattcaccaacaattgaaagattaattgaaagctttgagaaattaccaagtatagggcataaaacagcaacaagattagctttttatatgttaaatcaaagcaaagaagcaacagatgaatttataaattcaataatagaagcaaaaaagaatttaaaatactgttcaaaatgttttaacattacagatacagacccttgcccaatatgtgcaagtcctaaaagggatcaaagtacaatttgtgtagtagaagatgtaaaagatgtagttgcaatggaaaaaacacatgaatttaaaggagtttaccatgttttgcatggttcaatatctccaatgaatggaattggaccagaggatattaaaataaaagaattactcgaaagattgaaagatacagatgtaaaagaaatcataattgcaacaaatccaagagtagaaggagaagcaacagctatatatttatcaaaactaataaaaccaataggaataaaagtaacaagaattgcacatggaatccctgttgggggagacctagaatatacagatgaagttacattaagtaaagctttagaaggaagaagagaattataatgataaaaactcacctcttataaatatatgagatgagtttttatgttatcccaataatttttcgcaaatgtctttagttgaattttttttcgcaattagccttgctctaattttcatgtcttgcaatttataggtatttccaagaacatcaaataaaatattttgaatatcatcattttcttttatccatattcctgcaccactcttttcaataaaatcagcattttcttcttcttgtccaggaagtgggtcaattataataagtggcaaaccagaagcaagactttcagttgttgtaagccctccgggttttgtaattaccaaatcagaaacactcataagttctggcacttggtttgtgtaagataaaatcttaactgtatttcgtgaatttgtttcttcaactagagcatcaaatctttctttcattttttcatttcttcctgcaatcgcaattacttgtaaattaggaaaagtatctataatagcttttaatctattgaatgttttgtcttttccaaaaccgtactcaccaccgcagaaaaagagaattgtttttttatctggacttaaattatattcctgtaaaatttttggcttatcataatttagtaaaaatctatttgaaagtggaattccagttgcataaattttatttggttcaactcctctttcgattaattgttctttcatcccttcatgtgcgacaaagtaataatcaacaaattcatgagccacaagccattggttatgtggggcataatctgtcataactgttgcaagtgtgcagtttactttgcccttttgctttaaaatggcacacatctggctactaaaaggatgtgttgagataattagtgtagggcaaaattcttgaataagcttatcaagcttaattgccattattctattaatggaattactaatccttgccaaaccaccactttcagaaccgtaatacagttgcttccaaatccatctagcatttttcgaaaaatcaacataagcttttgtagttactttgttaaataatttattgatatattcgatgcaatcaaccatcataatttcagaatcaggataattgctttgtatataatctctaatacttcttgaagcagaaagatgccctccgccataagaaccataaaaaattaaaattctattcataaacttcaccacaaatattataccacaaaattagcaaaaaaaagaataatttaataaaattaggcaaaaataaaactaaacaataaaaaggggaattttatggaaaaaattataatagcaattggaatgttgatagccataattctattaacaatcttcacaattccaaataatgaaaatgcagcatcaggaggacaaacctcagacatacagcttctagcaagagcaataaatggagaagcaagaggtgaaaattacgaaggacaagttgctgttggggctgtaatactaaaccgagtaaaacacccagattttccaaatacgattgcaggtgttatatatgagccaggagcatttacagccgtatcagatggacaaattaaccatccaatttcagaagattcaacagtatataaagctgcaagagatgccatgaatggctgggacccaacaaatggatgtgtatattattttaatccaaatacagcaacaaataaatggatatggtcaaaaaccatagtaaaaacaattggaaagcatcatttttgcaaatagggaggaattatgaaagaaaatattttaaaaacaatgagaaaaaactatatgtatggaatagcaataatattattagttgccttaataataatgggaatactatattataaacaaaaaagtaaatatgctattgcttcagaaaacaactataacctagcactttatgagcttgtagactatataaatgatactgaaaattatttggcaaaatctacaattacaggttcatcagaacaagcatcagaaacattaatgcacatatggagagaagcaaatttagcacaggtgtatttggcacagctaccaatttcaacaaatgagctttccaacactgcaaggtttttaaatcaagtaagcgattacagtcactcctta

SEQ ID NO: 2524 - DNA, 4364 bp, synthetic construct
  misc_feature 1..4364: note = Synthetic
  source 1..4364: mol_type = other DNA
tactacactaacacattattgtcaatgttttaaactaatgtccggtaaactgtacttgtaaggtatgttttctcatgattttgacatattcgtgggttatattgacttcagtgtcaggatgtgttagtgttggtatgccggaatttaagaggttgctatgataagcgttactgcttgtcgcagtaatcgctcgcagctctgacgcccagtcctttggaccgggcgtcatctgcttttacaggccgcttatgcggtctttttttgtctttaaacgacgtttttttgaggtaaatctatcatactaccaatataaagaaatattggaggtatagcactttgaaatacgctgttggccttgatgttggcatcgcttctgtcggctccgctgtcgtcctgctggatgaaaacgataatccctttaaaattgaaatgctgggttcccggatattttccgctgcggagagaggcaaggacggcgcatcgctggccggcctcagaaggaagcaccgcggttccgcgcgcaggacccgccgccgcagccgccgcaaagaccggataagagggtatattgtcaaatccggcctgctttcccaaaacgagctggcgcatctgtatgacggaagactctccgacatataccagctgcgcgtcgacgccctggacaggctcctgacccgccaggagatggctcgggttctgatgcatatatctcagcgcaggggctttaaatcgaacgccctggatgccagcgacaagagcggcaaggatatgaaaaaggccattcaggcgaacgagaaaaaaatgctcgaaggcggttacaggaccgtcggcgagatgctgctcaaggacgagcggtttgccgggagtaagcgaaacaaagaggctaattacctgaatacagtgacccgcaaaatgattgagtcggaagtccgcctgatttttgcccggcagcaggaattcggcaatgaattcgcaacgccggagttcctggacacgtatctcgacattctgcttgctcagcgttcgtttttcgaggggccgggtgagggcagcccgtactgcaagggtgacagcatcatcgccgataaaatcggcaaatgccagttcgagactgatgagcaaagggcgccgagagcttcgtattccttcgagcggtcccgtctcctccagtctctcaataacctgtctctggtcacggaggacgccgaatatgtcccgctgacagaggagcaacgccagaagattatcgatatggctcacgccgacgaccgcgtgcattataccgacatccgcaaaaaactgaaaattccggacgagctgacgtttaaccttgtgcgctacaggggagacaaaacccttgaggagtgcgagaaggaaatcttctgcaagatgccggcctaccgcaaaattcgcgccgttctcggaaaagaaacagaaaaactgctgtccgttgaacagctggacgaaatcgcccgggtattcaccttattccgcaacgagcagaaaatgcgtgacgccctggcggatgccggttttgacgcggcgcttgtcgagaggctcatgggcggcatggacagcttcagcggcttcggtaatttatccatcaaggcgctgagaaatatcaaccctcattttgaggacgggttggtgtacagcgatgcctgcgccgcggcgggctataaccataccgggcataccggcacggagcgcaatatgctgattagcctgaaacacctgtcggaagccatggaatacaccgtttcaagccctgtggccaaacgcgcgatttcccaaacagccaaggttctcaacaacatcatccgcgaaatgggctgcagcccggtgtatatcaatatcgagctggctcgtgaggtcgcaaaatcccggaaggtacgggatgaaaacgacttgaacatgaaaaataatcataaagaaaatgaggagcgtaaaaaagaaatcgccgagtttaaaaaacacggagagccgacaggcaaggatatcgttgcgtacaagctctggaaggagcagggcggcgtatgtccgtattcccagaaatacatcgagcttgaccgcctctttaacgatgagggttatgccgaggtcgaccatatcgtgccgtacagcgtcagctttgacaatacatatatcaacaaggtgctcgtgatgacggccgaaaaccgccagaagggcaatcgcctgcccatggaatacatgacaggcgaaaaacgcgataattttgttgtctgggttaaaaacaacatcaaatcaaaagataaaagctatcggctcttaaagaaaaacctcagccagaaagagcggaatgaacataaaaacagtcatttgcaggatacgagggttgtgacctctttcctgcacgggtatatcagtgattatctggagttcgcgaagtattcaggaaagcgtgtgcggcatgtttttgcgctgaatggccagattacggatatgcttcgcaagcgctggggccttaacaaagtccgtgaggacggcgacctgcatcatgctctcgatgcggcagtcattgcctgtaccacgcagagaatgattgatgacgtcacgcattactatgaatatagagaggacaggtatcggaacagagcggatatagttaaggattttactgccggtgccggcggcgccttcgacagattcccgcagccatggccgtatttttcaaaagagcttgaggcgcggctgtcttccgacccgaggcgtattctgagcggcttggccggggaagggaagctgcctgcgtacgaccggtgggctctagaacgcgttgagcccgtattcgtatccaggatgccgaattacactgtaacgggtcctgcacacgaggagacgctgtacaggaagcgcaaggatggtgttatcgtcaaaaaagtgccgctcaaaaaactcaagcttaaagacggcgagattgaggggtattccgaccccggcagcgaccccaggctttatcaaatgcttaagaacaaactgattgcggctgacggcgatgccaaaaaggcttttgcggaacctgtatacaagccgacaaatgacggttctcagggaaatgtcgtcaagagggttctgattgttcagaatacggagagtcttgtcgacatgcggaatgggaacgcggtagctccgaaaggcgacatgattcgtgttgacgtttactgtgtcgaaaacgaggggtattacatggtgcccgtatatgttgacgatatacacagcggaacgttgccgaataaagccgttgtttccacaaaggattataaggattggccggaaatgaaagacgaggatttcattttctcgttatattctggtgaccttatatatttcgaagacagtaggacgaaggttttcaaaaagaattttaaggaaagctctttgccggatgaattgccactgcaaaaaggattcttatattttaaaagcggcaatagaaataacgggtcctttgtggttattacacatgataattcatacgttgtgcagagttttggctttaaaacgctgcaaaaacttgaaaaatggcgggttgatgttctcggcaggaaatataaggtagagaaagaggcccgtcaggggttcagcggttaatcgacatggcttttcggaatgttattgttgaaaatgatgcggagctttctttaaaagacaatcagctcgatgacggataccatatgcttcaatattcaatatatgtcaggacgtgtgccggcatggattctgttaatatgcataagaagcgtctttatgacaggctgcctgtaaacggctcggtgcggctcctgactattacagaaaaacaatacgcttcgattgaaattcttctcggtccattaatggagcctgatgagtctcatgaaactgaaacattgagtattttttgaggcaaaaacgtcatttttattaaaaaatataataaaataacaggctctcaaatcgtccaacagcttgtgctgcaaggattttttgagagtctgttatatggtaccggaatttatgagggaactatgacttgcgggcggccgtggcctcttctttggtggttatatggtaccggaatttatgagggaactatgacagattatatgaccattgttttcgacggtcagttatatggtaccggaatttatgagggaactatgacttctacgagaatgtgaagtacggcggccgtgttatatggtaccggaatttatgagggaactatgacatgtgcagtacatcaggcgatttttcttcggttatatggtaccggaatttatgagggaactatgacaaatctggcggagtggttttgttttcctcagttatatggtaccggaatttatgagggaactatgaca

SEQ ID NO: 2525 - DNA, 23318 bp, synthetic construct
  source 1..23318: mol_type = other DNA
  misc_feature 1..23318: note = Synthetic
acctacggcttcctgaattacctcgcgcaattcttctttccaagatacgccgccgttcttcattatcttttgctccgtcgccgttctgctgttcttgccgcgtttacggaagtccgtttcggtaaatccgtactgcttgccgatacgattagcctcgtccttcatagcaacataatctttggggctgaattgcaatttcttccccgtgagcggatcgacggcgttcacgattatgtggctatgtacggtctgcgtgtcggtgtgggtagcgattacgcactcatagtcccggaacaatttttccgcaagttcttcggcgtacttatgcgcttgcagtggactgacgttatcttttctcgcgcacgatagtttgaagtgataatacttgcgctctttgtagtccgtaccttttccgtacatagccgccgtttcctcaaactgcttggcgtagtcctcatcctcgaataaattacggacggatacatacgccgccttttcgggcttcgtaatataagtgatcgcgttttttggtcttgctttgcctgcggtacatttgagtaacggcattatccacccccaacggcggtagtgattgctttatacgttttctttaattcttcggcgcaagataaaatgcgccgctgttccgcatcaccgtagtagcaatactttaacgcctgattaagattgtttccttgccgtttcaactcggctaacatctcgctcgcgtgttccaccacgataatcggtttatcggtgattgcccgtattacaaactccgtcatagaacgtccgctcgtcgctatcgctttgtctattaagtttttctcttgttcgcttgccctgaatatgtaagcgaacggtcttgttctgttgcctataatttttccctcctcatcaattttgttcgtcggattatcggggtattaggggcttgcccctaacgaggcgagcgcctgcgctcggtatttggcaatccaaatacgttcctcgctataaccgataaaccaacttcttcccctgatattaaattgtcgtttcgccgtcgttttaaggctatcggctgcgccttttttgatttcatcacctccgtaatttttattttttgtcctgtgcgggcatagaaaaagcccgaccaatgttcttggtcgagccgagattttaccgatctgtacgctcggtgtctataacgccgattagagcttttttatttacgtttgtgtttttccaaaattgtccccgaaaaacaaccgattctgcccgaaaatacgggggtttttagaggttttttcaaaataacgggctaccgttatatacgctaaaaaatagcgattctcacttttcgctacttaattgcaaatttcataccgtacatttcgtatttgccgtttttatcttcaaccactttgggtgtaacgatagtatcgtcgtccacgtcccacataaacttttcatatacggggctgttcatcaaggcggcgtagatatgccaatccgaagcagcgttcttttcataatgccgcaggacgaggataagcacgtttttgttcgtaagccattttgaggcttgctcgtcgcgctcgttcttttcctgttctatcctgtcgtagaggacttctttttcatcatcgtcggcagagcgcagagcgctgtataactgctttatccgagcctttgcggtgtcgcagatttccacgattttatccttgtgcctgtactcggttgcattacctatgactaacgcgctgccgagctgaacggatatgggaataaagaatttcttttgttttctgccttcgcggaaagaaattttatttgccgcctcatagatataatccattgcggttttatgaaagcggtattgccgttccttatcttttatgcggtgtatctctttgaaaaagaccggcgcgggaacactatatttcttttgcagagccgttatttccttgccgacatttacattgtcataggcgcgttttgctttgtctatctcaataccagacaatacggcgagcttacacacgtcctcgtaaacaggaagtatatccttttcgtttgcgccgttgttgaatttatcccaaataatgctgttgagccgttgcgatagatttacgatctctccgattttgttctcgcttgtttcataatcgagcaaggcaacagatgactttgacttgctcacggaagggatattgcatacaggcactttgaataggcttttatatttttctgcggcttccaccaaaagcgcgtcgtccgttacaagcatagcatccgagtcataatcgcaaccattcaggcgctgctgtatattctccccgatggcattgacgcagactatattttcgcccaagtcaaagtagtcccatatatctccgtcaagattattttccacgcagtagagattgcccatagtgatatgcggtgaacgggcgcaaagcaattttgcgccatcggcaaatcgttcacaatagatttgccccgattgcaaaatgctctttatttcttcaccggctatgtattgcaacagttcgggaccgtttccgaaaagagtagcatttgtgccgttaaaaagaatatgaccttttttcaacctgtctttcagacttctgaccacgtcgttacggaagttttcgtaaagcgccgtgtagctgaaatgcggcgattggaacataagagtaaacagcacgtccgctctgtccgcaagaccttcggcacgttcttccgaatcttcgtccttatctctcgcaaaagcgtccgtaaaatggtaacgcataaagtgtatttctttgcggacgatggcgatataatctatgctcggttgaagcaaacgggcaacctgttcttccccaagaggtagtgtattaagcacctgataactgctctgtaccgttttgccgtggaaaaaatgcgtaggtttatcccatttgaccacgccgaaggtgctatttacattgtccgcccacttgcggatattcttttcgttcaggtcgccgacgaattttaagtatttcaggctgttgggcgttgttaccattacgatctgacttatatccgtcgcaagcgtaaagccgcgagttttaaggtcgtcaagcgttatgcctttgtcttttatccattgttgtagctttgtacggaaggcgcacgacttgaaaaacttgttgcgaagaagcaggaagtgcttgtccgaatactcgcccgaaaacaggctttcgtccaaaaggctttctccgtcccatatatcgttggttatctgcgtttccttttctgtggctatgagcttgccgtcctgcatttctaccgatacgactttatctgtaaaagtgcttttgtagtccggcacaaagaggataccgtcaagcggaatatctataacgcccttgatagaggaaagagataaggcgcgataagattcccacgacgcgaggtctgaactttgtttaatgccgcactcgctccatttggtcatatacttgtaaagccgctcatcaatgaaaaggcatttaccttcgcgtgagctgcccgcgctacgcttgtatcttacatagtgaacgctatccaagttaaagccgttagagtaaaagtgatcgcgcagagcctttttgtttattaccttaccgccatcggctttgtatgtataattgaactttacatttactacggcgagggtgtaggaattattgtgtttgtccacaaaggaaaactttttgcggcagatacgagtatatgccttttcaagctctaccgtgtcaagcgaataatccaatgtgtttttgaacaaccaaaaataggcgtccgatttgtattcgggcattttgtatccgacttcgacgccgtattcctgttcgtgcttgtataggtcgcaagcctctattgaaattatccgatagccctttaccataaagctattataacatattattgttgacaatagttgtcataattaaaaagttttttataaatgtaccattatagggacaaggtatgttttccgcttaaaagggttccgctcttaccgctgaacagcaccttctaaaaacggacagacaatttattatgcctgcccgttttgcttttgactattctgctcggcggtgatacttacccttattatagcataaaagtagtttaggagatcttgtcgattaaagagaaaaacgatagtagtcctatatctgaattaaataaaatgtctaaacgtagtgtcgcactttaccataaatttgcaaattctatcggaatttcagatagttcgcttggcgttttatatgcgttagcggaaggcgctccttgttcgcaatacgatttatgtaataaatgggcaattccaaaacaaaccgtaaataccgccttagcctctttgcaaaataaaggatttataactctttccacgattagcggaacaagaaaaaagaaaagtatttctttaaccgccgcaggaaaggaatttgccgcaaagacaatcaatgtattacttgatacggagcttgccgcccttgcctctttaacgcccgaagaaagagagctttatatcagcttaaataagaaatataacgaacatttaacagagaaactccaaaatattattatgggaacaagttaaattatgtcaaaatttctaaaaatgaaagagcttatagccgagatgaacttgcccgattatcgctataagcaattattggacgctgtcttccgacaacacacaatacgctttgaagatatgaaaccgctcccaaaagaactgcggggaaaacttatcgagcaatttggggaaacggtaataggaattaaagctattcatcacgaaaaatcaacgcaaactgacaaggtactgtttgaactgcccgacggcaaccgcgttgaaacggtaggcttgttttacaaagagggttggaattcattttgtatatcctcgcagagcggttgtgcatttggttgtaaattctgtgctacgggcacgctgggtttacatagaaatatgacgtcagatgagatatgcgaccaagttctttactttatgcagcaggggtttacgataaacagcatttcctttatgggtatgggcgagccgtttgcaaacccgaatttgtttgaagctctgcgcgacttgacggatactgaattattcggcttatctcaaagacgaataaccatctctactatcggcatagttccaagtattaaaagattgacaaaagaatttccgcagattaatttagcatattcactacacgcgccgactaatcagttgagggaaacgcttatgccgattacaaaaacgtactctcttgatttggtacttgacacgttagataaccatatacgacaaacaaatcgaaaagtatttttagcatatataatgctgaaaggtataaatgacagcgaaaaacacgccgagcaacttatagaactattattccggcacaaaaaatatcttgcactatatcatttagacttaattccgtataatcagacaacggttgctcaaaaactaacgccaccaagcaacaagtgcatacaagctttttgcaaagttttgcacggtgcgggaataagcgtaaatataaggacgcaattcggttctgatataaatgccgcttgcggtcagttggctggaacatacaacaataaatcagaaaaaggagaaacaaaaatgttacaagaacaagaaaaatcattacagtggttattgtgtcctgtgtgtaaaaacaaaacacgggtaaaaataagagatgataccgtacttgaaaaatttccgctgttttgtccaaaatgtaaaaacgaaacgcttatcaatgttaaacaatttaatataaccgtcatcaaagagccaaacgcaaagacgtagagccgataattcacaaagttcaaattgtgtttatcggcttttttatttataatgcattgcttgatattgatattttttagagttcgcatttgaggatacaaaacgggcggatttattcatttaacggacatactatttctacaatttttctacaaaatgcgtttgagtttgcgaaaaagcagacgatattagaaattacataatatagtaacgcaaaaacagcgatctcattatgaaatcgctgtttttgttgactcgcctttgggtgtacccatataaaatttagttttttgtaaattccctatggaatacaccctttgcgcgtcctttgtttgtccttttaatctgcggcatcagtatcgaacggcggagtgtcgctgccgtcagccgaaagcaaaacttccgtcttgcattttttcacggcgtattgcaggaattccctgaatttgtccataaatgcctcttcgccgaaaatgttgagtttgaaaaagaccgcctggcttccgcccgacgtcacggcggatattctgaccttgtcgccgcccgtaaacagagtgacggcgaggctgacgcggttgccgcccgtgtagctgtatctttcgaatacggtcacgcagcagcgggcattcccgtccgtcatatcgcatctactttcctccgtcacggaaatgccgccgtagttcggaaactcgcggcgcagacagtccagaagcaagtcgaagtcgcagtttgccgttgctttgatgagcgacatactaaatcctcctgtccgttttgcttttcgcgaggtagagcagagccagcattcctttgccgcaatggctgcctatgataggcccgacctccgtgactgccaccttttgaccggggaagcgttcgcgcaccttatcagcgagcagcgccgcgtcgtccgcgcagtcgccgtgtgcgactatcaccacgtcgttgacataaccctcggtttcccgtgccattttggcaagtaaagtgcgcattgcgagttttctgcccattacgttgccgatgtgcaccagcgcgccgttttcgtcgaccataagtatggggttgagttttatcgcctgtccgactattgccgcgccgcggctcagccgtcctccgcggtagaggtgatagaggttttttacggtgaatgcgtgcccgatgtggtcgcgcagttcggtgacgtaagcggcgttttcgtccagcgtcgcgccttcgcgcctgcgtttcaacgcatagtaggtgagcagtccttcgcccgagcacgcgcatttgccgtctatgacgacgacgcgcctttcggggaatttttctttcgcgatttcggcggcgcggaggtacccgtcgaagcatcccgacatcgccgcggggaaggatatgtgcaggatgtcttttccctgtttcagtatgtcggcaaagaactcgtatgcgtcagcgacgggcaccatcgacgtggtggtgtttttgccctgttccagcgcggagtaaaaatcgcggaggggaagaaacggacgggttttgccgtcgtattccacgccgtccagcacatagctcatcggcagaatacgaaaatcttcctccgcaagttcgggaggaaaatccgccgtcatatccgttgtgacgaagtactcgttcatagcctaaacatagcacaggggataacctttgtcaaattgcgcccccgaagaaaagttttttcagaggcttttaacgtgcgctttttttcggcttcgttcggcgcgtctgcggtttttcttgacattgcgcaattaagttgataatataattgagcgttgtcgcggaagctcctttgccgcgtcatcgcagccgcttccgacgggaagccgtcagaacacattcctgatttagggatgtacaaaacaagtgaacaacaattaacggggtgtagcgcagtttgggttgcgaaaagacaaggcaacgcatcggcactccgtgggtgacgggtggcagacctctttttcggggcgcgtcacgcaaaaccttcggtgagcgcgagacgcgctaccaaacataaagacacattcctgatacagtaatgtgtaaaacaagtgaataacaattagcggggtgtagcgcagtttggtagcgcgtacggttcgggaccgtaaggtcgcgagttcaaatctcgccactccgaccacgagaaagccgcctatgtaggcggcttttctgtgggattgcgagccgcaggtgagcaattccatttacccgccgcccgtatgggcggctttcgtaaagtcgagtggctcgatagactctgtgtcgttacgctacgcaagagctccgctaacacgctgcgcggccgtactatacaaggcgcgcggcagctacaaatctcgccactccgaaataaaaccgaggacgggaaagaggtgtcagaaaacgagtattccgaggtgttcgaggagtattttcagtcctatcgcaaagaggagcacgccgcctgcgatttcggctttgccgcggaatttttcgcctgcttttgtgcccaccagcactccgagcagagaaatgacgaaggttgtgcatccgatgagtgcgatggcagtccatatgttgacggaaaggaatgcgaacgatacgccgacggcgagcgcgtcaatgctggtcgcaacggacatcacgaggagagttttcacaccgaggcgtagggcttgggctcttcggggcacgagcgtgacggcgggcggatacttttcgatgagaggagatttctctgctgcgggcgagcgctcggcacggcgttccttttcgctttctatcccgtcggctatcattttgattccgaggaaggcgagcaggacaaaggcaatccaatggtcgaagtcggtgatgtactgcgcaaacgacgacgccaccgcccagccgatgaggggcataagcgcctgaaacagcccgaaaaagaacgcgatgaccagcgcgtatttccatacgaattttttcatttccacgcccttgcacatcgcaacggcgcacgcgtcggcagacaggctgaggcctgtcagaaaaacttcccaaagttgcacttttctctccttaccgctcctcacgacggagcgcagcggcatcggcggccgcaaaagaaaaactcacacacgaaaacgcgtgtgagtcttgccgtttactataagccacgtcggatgacgagtatgttgacttataacggagtgccgccgactactccctcacttgcgctaattctagcacgggtggcggcgtatgtcaacgggaaggggtttgctcgacgccaagcagataatcggtggtgacgtcgtaaaacgccgcgatacgcaccaccgtatcgagaggcggctcgcgctggtctttctcgtagtgcagataggtgacgctgtgaatgccgagctcgtccgccacctgtttttgagtcagcccgacggcgcggcgcagttcaagcaatctttccccgaaacctttcatagtgattgacatcttaccaatttggtagtattatgtgtaaaaaactaccaattcggtagttcgggaggggattatgagtattgtggccgcccgctgtccgcaatgcggagcagcattacaggtggaagaaaaaagtgatgcgggaatatgcagcttttgcggcactccttttataacggaaaaagcaattagcaattatattgtaaacaaaaataatatatacaatatccagaacgcgaattttaccatacaagcgccgaaagaagagagcaaagtaatggtctacggactgtcacagtccgtcatcggcggcacattgagagtctattggaacaatgagttggtcggcaagctgcaaaagggcggattactagagatacccgtaaaaaaggacggagtacttgccgttgcatgcggcatcaatcctctcaaaggtaaggtaacaattcacgccgggcgtacgaccaaagtgcagatagtatacaatcaggtcacaggcggatttattcccaaaatcgtagacatagtgacgtaaaagtcttcacagaccgcaatataaagttaaatttagtcttgacaaaacgataagattattttactctaattatagacctcaaaattttataccataccaaaactcatgaggttactaaaataagggatttttcccgtaaagctctgtcccggcaaatgccgggacatcttttttccgaaaagtcggtgtttgtaacatccgacaaaaaaacaagagagggaattatgtattacagaatcggattggacatcggaatcacttcggtaggctggtgcgccgtcgaaacggacgcgtcgggcgagcccaaaagcattctcgacctcggagcgagaatattcgatgctgccgagcagccgaagacgggcgcatctcttgccgaacccagacggcttgcaaggggattgcgcaggcggctgcgccgcagagcgctgcggcttgcgcttgcgaaagagttgtttgccgaactcggggtcgcccccgaagccgcgccgcgcgacgtaaacgaattgcgggtggcggggttggataaccttttggaagagcgcgagttcgcggcggtcctattgctgcttctaaaacggagagggttcaaaagcaacagcaaagcgcagaattcaaaagaagacggcgaattgctttccgcgaccaagcgcaatgccgagcttatggctgaaagaggttaccgcacggtcggtgaaatgctcgcggcggagtattccgaaaagagaacgcgggcggacggcagcacttataccgtgtacaatgtgcgcaacaaaggcggcagctatgcgcacacggttcgtcgtgcggatatcagacaggagatagaagcgctgtttgccgcgcaagcgggcttcggttcggcgcttgcgtccgacgaggtaaaagacagagtgttggaaattttcgatatgcagagaaatttcgacgacggtcccgggaaaggcagcaaatattccgccacttacgctgtcggcaagtgcgaatttctggaagacgaagagcgcgctccccgcgcgtcatattccaatgaacggtttgtcgcgttgcagaaaataaaccatttgaggataatttcgggaggcaaatcccgcgaactcacggcggaggaaagagaaaaactgattgctcttgccgaaaaaaacaaaaaaacgacttatgccgccgtaaggaaaacgctcggactcggcgacggtgagcggttcaatgctttgacgtattcgactaaaaaagaaaacggcgatgaaatcaaggagagcgagaaggcgacgttcgtgactttcgagcgcagccgtgccatatccgattgtcttgacgaagagcataggacggcggatattattgatgcggcggcgtatgtcctgtcgcacgtaaagagcgattccagacggttaaaaatgtttgccgacgtgcctgaaaccgccgtgctgtccgatgcggagaaggaagggctgcttgccgtgaactgtgacaaattcggacatttgtccgtgaaagcaatccgtgccattattccttatctcgaagagggacaaaggtatgacgaagcgtgcaggagtgcgggatttcatcacagcaaaaaacaaaacgacggcgaacgcagtctgttgctgaaaggcagcgctgttgcggaagaaacggagaacatcacttctcccgtggtcagacgcgcggtggcgcagacgctgaaagtgctgaatgcaatcatcggccgatacggcagtccggttgcgataaatatcgagcttgcccgcgaaatgagcaagtcgcgtgccgaacgcgacaaggcgacgcgcgagaacgaaaagcggcggaaagacaacgatacgctgcgcgaaaccataaaagaaatgggggtcgtgccgacatatacgcgtcttttgatgatgaaactttacgaggaacagaaagggcaatgcccttatacgggagaaaccatcgcaatcaacagattgttcgaggacaattacgtccaaatagaccatatcatcccgtacagcaggtgtttcaacgacagcttcaacaataaggtgctggtcaaaacgcgggcaaatcaggacaagggcaatcgcactccgttcgaatggcttttcacgacccctgaatggaacgactttttcgaccgtgtgaacgggatgtatgcggggaatttcaagaaaaagcagatgcttttgaaagagtctttcgacgaggaagaatggaaatcccgcgctctgaacgatacacgctatatatgccgctatatgcgcggactgcttgcggaccggctgttgttcgaagaggcgggaatgggcacgcagcgcgtttttgcggtcaacggcggtatcaccgccgaactgcgtcgtcagtggggcataggcaaagtgcgcgaagacggggacatccatcacgcggtcgacgccgcaatcatcgcgtgtgtcactcccggtgcggtgcggaaactcagcgcgggttacaagaagaaacacgaagaaaagcggtataaagaagagggttacggtgcggaggtgaccgaaccgtacgcgggttttgccgacgaacttgccgcaagatgtatggaggacgaagggttgcttcgcgacagactgcgcgcactcggcttcgacgaaaatacggtgttgaaagcaaaacccgtgtttgtcagccgtatgcccaaacgtaaggggagggggcccattcataaggaaacgattcagagcgcgaaatatgtcgaagacggcatatccgtgaaaaaggtcgccctcactgagctcaaactcgaacgcgacaaaaacggtgagtggtacatcaaggattacttccgtcccgaagacgacagaaagacatacgaactgttgctggacaaactgattgcggcggacggaaatgcgaaggttgcatttgccgagaaggttttcaaacccgcggcggaagggaaaattcccaacgaaataaaaaaggtaaaattatattatcccgtcaattccggcgtgatgcttgaagacataaaaggctttgcggacaacgggtctatggtacgcgtggacatgttttccaaaaacgggaagtactactgtgtgccggtctacaccgctgatatttacgcgggcaggctttcggacagagcggttacgcgtgacaaacgtcaatccgaatgggatgtgatggacgacacatacaagttcgaattcgcactttatcctaacgatttgatatggataaagagcaaaaagggcatttgtatgtcaaaacagcgcgacaacaataacagtcgtatgcccgcgacgcttaatatgagagaaggatgcgtttatttcagagggctaaatattaatgatgggggtgctaatattatcacacataacaactgttatggtatgaaacttggtttgaaaaccataggggaaatcaaaaaatgcgtcgtcgacgtgctggggaacatttcttttgtgcaggaagaaaaacgcccgccggcaaaaataaaacaaaagtgaggtgagcaaatggggtatgcgaacattttcgtcgcttccccctgcaatattgctgtaaaaaacagacaacttgtcatacagggggaagagtccagacggcttgcgctggaagacgtcaattgcctgctgattgaaacgcatcggtgcagtatttcgtcatatgcgttgcaggcgcttgccgaggcgggagccgcggtgtttgtgtgcgacggtacacatatgccgtgcggagtcctgatgccgtacaagtgccacttccgtcagctcgtttcactccgcttgcagcttgacgctcccaagcctttgcagaagaggctgtggcagagtatagtcgaacggaaaatttcaaaccaggcgcggtgttgtgctttggcgacgggcagctcggcagggcttgaagcaatggcgaaaaacgttttgagcggcgacagcggcaataaggaggccgttgccgccgctttgcatttcaggacgcttttcggcggcgggttttcacggcaggatgagaacaacggaataaacgcattgctcaactatgcttatgcaatcgtccgcggacttatcgcacggactttggttgtttacggtttcgagtgcagcataggtctgcatcacagcaactctttcaatgcgttcaacctggcagacgaccttatcgagccatttcggcccgtggcggatttgtttgtgcattcggcggttaaggaatacggagccgaactgacgcctcagatgaaacagtcgctgtttgctttgacggcggcggacgtagaggtcaacggacaggtgcagtcgctgtcctatgccgtggagctcgaggtgcagagcctcgcccgctgtctgaaagagcagaccgtttcgcttgcgctcccgtccttgctgcccgtcgcggtgcatagatatgagtaagtttatgcgtgttatggtgtttttcgacctgcccgtttccaccaaggaggagaggaggcttgcgacgaagttcagacaatttctgcttgacgacggctatcatatgctgcaattctccgtttacgccaggttgtgccacagcgtggaaaacgcagaatcgcattttatgcgtcttgcccgcgaggcgccgaaagaagggtcgatacgctgtatgattgtcaccgaaaagcaatatgcgggtatgcggctcatagcagggaagaaatctcccgacgaaagacccgccgagtatatacagctctcttttttataaaaacagtctgaaagcaatttgcgctaaccgattataactgtttttagaggaaatacttgtcggaaatatgcccgaaaacaaagtaaagacaggacttttgccctgcctttgccattccctattataccataccaaaactcattagggaactaaaactcggcgaaacgacattgtttgacccctgcaattataccataccaaaactcattagggaactaaaactggtgttacttctcctgatagtcgtcttcaattataccataccaaaactcattagggaactaaaaccgtatgctaggcgcttcgcaaggcttgaccattataccataccaaaactcattagggaactaaaaccgaccgtcttccagatgttgagcgtatgccattataccataccaaaactcattagggaactaaaacggtgctgttgtggggtggtttagaggggcaattataccataccaaaactcattagggaactaaaacagcaactgctgtattatcgttcgctgttcgattataccataccaaaactcattagggaactaaaacgcgtagtggtgtttgtcaatgtgcttttcgattataccataccaaaactcattagggaactaaaaccgtcctctctcaccgtcaagaacagtatacattataccataccaaaactcattagggaactaaaacaggcagatattgcactttaagggtgccgccattataccataccaaaactcattagggaactaaaactttcgtgagcttgatttcagcggacacgacattataccataccaaaactcattagggaactaaaactcctgaacgaaaggtaatttgctacaccgcattataccataccaaaactcattagggaactaaaactatgtttttcgtcaacaccgagggcttcggattataccataccaaaactcattagggaactaaaacctatggcacggggcgaaaaaccgcgagagcattataccataccaaaactcattagggaactaaaacccgtcaccttgtcgcgcttatgacgtgcctattataccataccaaaactcattagggaactaaaacgcagataatgttatgaataacgtaattgccattataccataccaaaactcattagggaactaaaacttcaggtggcaaatgccccttgcaatctgcattataccataccaaaactcattagggaactaaaactatttgtccttgcgctttgggtgccgttgtattataccataccaaaactcaccgaggagttaaaaaactcagacggggcggggattgtaaacggcggcgaagttctgtataatcgaagaggaggcaattatgacgctgatagggaacagggcgggagcgcttgttgtgaggacggtcgggttcgtgctcggcgtgttcggcattgcggtgatgctgacagtatccgatgcagggacgatgctgtcctattacactatgcagaccaacatcttcacggtcggagctttcggtattctggcggtgatgaccgcggttcagataaaacgcagcggtgtgcgcggagaagtggcgacattcggagcgtcggctcatctggcgttgacattttacatcacgataacgttcgtcgtttactgggcaatgctgtcgtggcagaatttcgatatgggaggaggcgactctgcgcgcgtggcattgaccaatgcggcgaattataccgtgcacggagtagtgcctgtccttgcggtgctggactggatactttttatgccgcacggaaggctgcgcgccgtgcacgctgccgaatggcttgtctatcccgcgctctatgccgttttcatttttatccgcgcggaagcggctccgccgttttacgggacgacgcggtatccgtatcctttcatagatgtcgatgttctgggcggctgggtggcgttgattgtgattgcaatggcggttgcgttttacgctctcggacgattgtttgtttttcttgacggaaagcttgccgtgaaaactgcggcgctgatttgtgcggcggcggaaagcgaatatgtgcgtgaggaaaaagccgaatgaggtatacggacaattacgtttcaccgatggggaatatcgtgcttgcgggcgacgggaccgctttgacgggattgtggtttgagggacagaagtggttcggggcagggctgaccgacggcgccgagcgcgcggagctgcccgttttcgggcagacgaagaagtggctcgacatctatttcggcggcggagagcccgcgttcacgcctgccgtcgcattgcggggcagcgagttccaaattgcggtatggaatgttctgagtgcgattccgtacggaaaaaccgtcacttacggcgaaatcgcgagaaatctgactgccgtcacgggcaggaaaacttccgcacgcgcggtggggagcgcggtggggcgcaatcccgtgagcatcatcgttccgtgtcaccgtgtgcttggcgccgacggctctttgacgggatatgcgggcggcgtggaaagaaaaagagaactgcttcggctggaaggcgtgctgctttgaagcgtatatcggcagaaaattcaaaggcgcggacgcgccttttttctttatccgcgttgtcacggcgaagcgtgccgcagagtgaaagtatctgtggacgcacactatatgtaaaggcgaaattcggtttgccgacgtataacgtcgaagttgccaaaagcgagatgtcgacaaaatttgtgaaaaaatttacataaaaccgttgacaaaatttcggaagaggatatactatgcgattgaaccgcggatgtgttgtgccgaagccccgtaaaagggcgggcggcttcgcggagcaccgaaggaggcgtatgccgatgaaaaagaatatgtacagtctgatgcttgccgaagacgtgatacgggcagtcgacgcaatggcggcggagcaggggacgaacaggtccaaccttgtcaaccagatacttgccgaatacgtttcgctgaccactcccgaaaagcacgtcgggcatatcttcgacgtcataggcgcgctgatgggcgggcgcggggattatatgctgtattccgagccgaacagtctgactatgtccatcaagagcgtgctcaaataccactatcgtcccaccatccgctacgaagtggagatggaacgcacgccgacgcgcacaatcgggcagctgaaaattattttccgcaccacgtctgcggaactgttggtcgagctgacgcggtttttcaagatatggatgcagctggaaaacatctatgtccgccgtctgttcggggacaatccgccggagtaccgtatggagagcggcaaattccgccgcactttcactctgccgggcaaggcggtgtacacggaggaacagacgggcgacgcgataggcaattacgtcgcgacgttcgacgaaatgctcaaaggctatctgtcgggcgaataccgcacgacgcaggagatggagaacaggtatctcgaatatctcaacagcggcgtcgcactcatataaaggaggtgaggatatgaacgcacagaaattcactaaaaaggcgctggaagctctcggctcggcgcagagtattgcaatagaaaaccagaatatgcaggttatgccggagcacctgctttacgccctcgtggaccaggacggcgggcttatccccggactgctgaaaaagacggggacggacacggacaaactgctcgcgatgctcgattcagcgataggaaagatgcccgcggtgagcggaagcggcagagaacccgacaagatttacatctctcccgtgacggacaagatactttccggcgctgagaggcttgcgtcctcgcagggggacgaatacgtttccgtggagcacgttatgctctccctgttcgaccacgccacggaggagataaagaacatattccgcgcgttgggcgtcaccaaatccgcctttctcgcggagctgaaaaaggtgaagacggacagggtcacgagcgacgagcccgaaaacacctacgatgccctgaacaaatacggtttcgacctcgtggaacgcgcgaaacagcagaaactcgaccccgtcatcggacgcgacaacgagataaggaacgtcgtcaggatactttcccgcaagacgaagaacaatcccgtgctgataggcgaacccggcgtgggcaagaccgcagtcgtggaggggcttgcgcagaggattgtgcgcggcgacgtgcccgaaggcctgaaagacaagaccattttcgccctggatatgggtgcgctgattgcgggcgcgaaattccgcggcgagttcgaggaaaggctgaaagccgtgctgaacgagatacgcaagagcgaaggaaaggttatccttttcatagacgaactgcacaccatagtcggcgcgggcaagtcggacggcgcaatggacgcgggcaatctgctcaaaccgatgctcgcgcgcggcgaattgcactgcatcggcgcgaccacgctggacgagtaccgcaagtatatcgaaaaggacgccgcgctggaacgccgtttccagcccgttatggtggacgaaccgacggtcgaggacacgatatccattctccgcggactcaaagagcgttacgaagtgtatcacggagtgcagattcacgacggtgcgctgattgccgcggcgacgctttcgcaccgctacatttcggacaggtttctgcccgacaaggcgattgacctcgtggacgaggcgtgcgccacaatccgcaccgagatagactcgatgcccaccgagatggacgacatcgcgcgcaggataatgcagctcgaaatcgaggaaatggcgctcaccaaagagacggacacgctttccaaagagcggctggaagacatcaggaaagagcttgccgagctcaacgacaagttcaacgagatgaagctgcaatgggagcgcgagaaagagagcatacacgccgtgtccgacaccaaggcggaaatcgaaaaggtgaacggagagattgaagcggcgcagcgcgtcggcgattacgcccgtgcggcgcagctcaaatacagccgtctgcccgagcttacgaaaaagctcgaagaggcgggcagcgagagcgcaaagaagcacaccttgctgcgcgataccgtcacggaagaggagatagcgcgcgtggtgtcgcgctggacgggcataccgcttgccaaacttatggaaggcgaacgcgagaagatactccacctcgacgacattctccacaagagggtcatagggcaggacgaagccgtgaccaaggtcacggaagcgattatccgttcccgcgcgggcatagcggaccccaaccgcccgataggttccttcctcttcctcggccccacgggcgtgggcaagacggagcttgccaaggcgcttgcggaaagtctgttcgacgacgagcacaatctggtcagaatcgatatgacggagtatatggagaaattctccgtgtcgcgtcttataggcgcgcctcccggatacgtcggctatgacgaaggcggtcagctcacggaagcggtgcgcagaaaaccctattccgtcgtgctgttcgacgagattgaaaaggcgcatcccgacgtgttcaacattctgctgcaagtgcttgacgacggcaggataacggactcgcagggcaggacggtggacttcaagaacaccataataatccttacgtccaacctcggttcgtcctatctgctcgacggcataaacgaggacggcgagatatccgagcacgcgaaggagcaggtgtccgcgctgctcaaacagagtttccgtcccgagttcctcaaccgtctggacgaaatcgtgtactacaagcctctgacccgcgcggacgtgagcaagataatcgacctgctcgtcgacggacttgccgggcggcttgcggaaagacagatagggctggaaatcactcccgccgcgaaagaactcattgcggaaaacggctacgaccccgtctacggcgcgcgtcccctcaaacgctatctgcaaagcaaaatcgaaacgatgattgcgcgcacgatgattgccgaggacctcgaaagcggcaacgtaatcgaagtcggcgtcgaaaacgaggatttcgtagtgcgcgtcaagaagcgctaagcgcactttatgtaacaaaaacggagggcacaaccctccgttttgttataatcggcggttttccgcgattgtccgaaagcgcgtgcggcggacgccgtcaccatttgttgtgcaccttttcggcaaagcacagcttctgtttgaggatgatttccgtgccgtcgtcgaggacgcatttgcccgaaacgtagccgaaaacctgatggggtatcatacacatcactttgaggtcgaaaggttcgtagcggtcgatgaggggcttgaaagtgcagtccactctgccgtcgtccgacacgattttccatttcgccataaagtcggggctgcctttgtcgtcgccggggatgataaacttcgagcggcctattttgtgggctttcccgccgtaaaagagcatatcttcgctcgccgccgaggtgtcgccgaagccgtagcccaggttccagccgaaagtcgtgccgtcttcgaggcgggtctgcaaacttccccaataccaagtgttgtcaaacgtccagacgccgcgcccccagtccagagtggcgagggaagtttcgggatagaacttcttcacacggtcgcccacggtgaatgtgccctccgctttcatacagttgattttttggttgtaatagaaatagccctgtttcccgaacggggtggcgatgaccatactttcttcggggaagtcggagagggtgacgtcgaattccacgtcgttgcctttcttgtccgcattgtgaaaaacgcccgtgaggtgccgtgttttgccgtcacaggtgaaagtcatatgcgtcttgccgttggtccagcttacgtcgccgctctcggacgagcggggcatatgcagtttccccatagggaagaggaaaatcgaactgttggtaaactgcgacggggtgacgaaatccatcaccgatattgacagcgcccccacataacccatatccgccacagtcaggcaaagcgcgtgctcgtcgcagccgatgtaatagtagtcccactctttgatgcgcgcacgggaagcggtgatgttctcgcggttgtagtcccagagcagttttttggcgtatccggggttggcgatgttgccctgttcgtcaaggagcggctggcgcgtcgtgatttctttttgcataatatcctccgataagcggtaaaaacattttagtcccccttgtcggcgggtgtcaatattgtttgcaaaaacgattgcaaaaagcaaaatgatgcgttataatcattttcgcgttggagcttggtgtagtggtagcacatgggcctctgactcccatggtgtaggttcgattcctatagctcctgccaatgcagaacacttccgcggaagcggaagtgtttttcttttgcccgccgcttgccgacgggcaaaagcggcgggcaaaaggaaaacgcagccacgtatacgtggtgttctgcattgaatccccgaaaaggagccgcaaggaagctccgcctgcggagcattactataaagctcctgccgacgaaacatccgacgcgaacgacagcgcatccgcttgccgacgggcaaaagcggcgggcgaaaggaaaacgcagccacgtttgcgtggtgttctgcatcggggatttatgcgccgatacggaattccgaaaatactgcgtcatcagtttaattaaaaagacagccgcgcggctgtcttttgcgttgtggtcgggatgtcggtttacaccataaagggggagaggacggcgaggaggtcgtcgcagtcgtcggaggcgatttccagcacgatgggttcgtcgaggtcgaggctgaaaatgccgaggatggacttcgcgtccacgacgtatttgccgctcttcaaggtcaggtcaaagtcgtagcgcgcggtgatgttgacaaactttttgaccgcttcggcggtgtccagcttgatttttacggatttcatggtgttctccttaaaaaattttctgattgcactcattatagcccaaacgcgataccgttgtaaagggaatgagatatcgtaaaatcagggtataagctcaaaatccgctcttttttgcgcgtcgcggcacggaaaaaggtgtgcgttgattatggcgcggggacgtggtataataatcaaaaacgccgaaggagcggttatggaatacagaggagagggaatagaagcgctggtggcggcgctggacgacctgcaaaacgcaagcctgattatgacggacaagaaaatcaaatccgtcctcaaatgtctggcgtattacgacgagttccgcaccgtgctcgcctattgcaaccaagggttcgattacgccgcggaaaaacgccgtgcgctgcaaaaggcgggggactaccgcgtgctgcgcctgcccaagacgccgaagacgctggtcgcgctggtgacggggctgcttgtggagttcgacgacggcacggaagatttcctcactttctgcggagagtatttccctgccgcgagccgccaggacagtctggaagagtgctatcaggggatgttcgagcccttcaagctcgcgctggtcagccttgtggtggacggcgtgaaagaggaagtcccgatggtggaacgcacggtggagtttgccgccgacggcttgcaggaacagacggagtatctccttgtcgcgt

SEQ ID NO: 2526 - DNA, 16965 bp, synthetic construct
  misc_feature 1..16965: note = Synthetic
  source 1..16965: mol_type = other DNA
cataaccgaaatttctattgcaatccttggaagccgaggcgaagataaagcgatgaatctatgtatgaacgagttacactaaaccaaagataaatatggaacttgtggcaaaactcggggcagctttccgctggctgaattaccgcgtccactcggcccctgatactggagattgggagcttcaggtctactacgcattaagacgacggcctataagttctgtcgccaggcgcttgtgataacgtgaggttttgcaggtactgttggcttgggcccggccggtagagacgcgcaggcgctgggcatgcttgaaatgctagtccttacgggtgccatcgagcccgccgctgccaaggtgaagttcgctggtgtcacactggcgggccaggggtacgttggggccggctatctcgtggtgacctgtcggggctgttgcgccacgccgtgcgggtaaactgatttcgagtcaggcgattcctggcccgcacgaggaagtggagagaattctccccggcaggaatagggcttagttctagcttggatggcgcttggatcggcgtctcgcggcctgaggccggccgttccggagccggatcacgtgagccgcgggggcgacgaaatgctacatgatctggacctgatctccgttcaagaggtccggactaaaatcgacacagcctacgaggcttggcaaagctacaggagcttcagccaggagcgggtggactttatcgtcgaggcggtcgccgccgcctgccgtgccaactcccgccgcctggccgaaatggccgtcgaggaaaccggctacggcaacgtcgaagacaagctggctaagaacctgctttgctccgatctgctgccgcgctcgattcggggcctgaagacggttggcgtgttgcgcgaactcgcggagcagcggatcacggaaatcgccgagccggtcggggtggtggcggcaatcctgcccacgacgaacccgacttccaccgtgttttacaaggcgatcatcgctctcaaatctggaaatgcgattgtcctcagcccgcatccgcgcgccaaagcctgttcctgcgccgcggctgccgtcgtggcagaggcggcggttcgcgccggggcgccggacggcctgatccagtgcatcgataattcgtcgatcgaaggcacgaatgcgctgatgcggcatcccaagaccggcgtcatcctctccaccggcggcgcaggcatcgtcaaagccgcttactcctcgggcaagcccgccttcggcgtaggccccggcaacgtgccggtatatctggacaacagctacgacgtcgcccgggctgtggcgtccgtaattcaaggcaagagtttcgatttcggcaccgtctgttcttccgaacagacgctcgttgccgaccgctcccagcgcgacgccgtgctggccgcgatgcgagccggaggagcgatcatcctcaacgacagccagaagagcgccgtcgagaaggcgctgttccgggggagtacaaccgtccgtgcggagtgcgtcggccagtccccgcaacgcatcgccgggttggccgggtttcaagtgcctgcgaccgcgaagatcctcgctgcggaaatcggtggagtcggcaaagaccaccctctgtcggcggagaagctgtcgcctgtgttggcgctgctgttcgtggacggcttcgaagcggggctggacgcgtgtgagagaatcctgcgtttcgggggactcgggcacacctccgccatctacagcaacgacgagtcgcgggtccgtcacttcggcctgcggatgccctcgttccgcgtgctcgtgaataccccatccccgcaaggctcggtcggcatcaccacggccatccagccggcgatgacgctcggttgcggagcgatggcaggcaacataacctcggacaacgtcggcccgctgcacttgatcaatatcaagcgcatcgcctgggcgattcgtacctccgaggaggctttcgccgggggcgctcagccgtcacaggaatcctccatctcgcgggatgcggtggcggcggcggttgagcattccatcgcagacccggccggaagtggcgtccgcgttcccgctgaatcctccatccgtgatacggtcgcaagtgtggtcgatcgttttatggatgggaaaggcgcgcccgtttctgcaacttgcgggtgctcccattcaggcgcaaaggcgggaggatcatccgccgcgacaagtgcccagccagtgacgccgccggcgtcgatcgttgattttgtttgtgaaaatgatgtcctcgccgcggtggcgaagggcggaaagatactcatcggacccaaaaccatcgtcacgcccagcgcgagggatctcgccgcgcgctacgatgttctggttccggctcagcgctagaccgctggagacaagcccatgaaatccaatctcgacacgttagcggaagaaatccagcaatacctggtcgccgagcacttcatcgtctttcgaggcatgagccgtgccgaggacgacaccccgatgatcttctgggacgtggaccgtcagcccgattacaaggcgttcctcgactgcgcattgcaactcggtttacggttggttcatttccacacccgcgaattctccccgcagcatcgcgaggaggcgctcgaccagttggaggaatgcgaactcggccgcgaggaaaagcgcgggctggaacgccgcatcaacgaactcacgatctacgaggggttgacctgcgccatcgaaatctccttcgatttcgagaaccgggtctacctctttgagctccgcaccgagtggtacgacgagtggaacgatgtgctggacgaactggaggatgccggtccgggcgatgaaggacaggagccctttgggggctactactccaacaactgagaaccaatggcgagtcaagcacgctggaatctcagggaggtccccgaagacgccgcaaagaacctggcccgcagttgcaacctcagcctgccggccgcccgtgtcctgtgggggcgcgggattcatgacgaagcttcagcccgccagttcctgaagcccgaactgcgctatctccacgatcccttcctgatgcgtggcatggatcgcgcggtggaccggttgcgccgcgcgctcaacgcgcacgagcccgtgatgctgtacggcgactacgacgtcgacggcatctcgagcgtcgtgctgatcctgaccatgcttcggctgatgggccacgacgcgcgcttccacgtgcccgatcgcttgaaggacggttacgggatgcagtgcgcggtcatcgaccaggccgcccgggacggtattcgcctgatcgtcagcctcgacaccggcatccgcgcgttggagccgattgcccgcgcccgcgaactcggcatcgacgtcatcgttaccgaccaccatctgcccgaagacggcctgcccgacgcctacgcgatcctgaacccgaatcaatccggctgcccttatccgaacaaagggctatgcggcgcgggggtcgctctgaagctgattcaggctctgatggaacgcgagaaatggcctccgcaccgcatcgccagtttctcggattcgtttctcgtgatggctgctatcgccacggtcgccgacgttgtcccgctcatcggcgagaaccgcatcatcgtcaagcgcggcttggagcgtatcactcgcaccactaatgaagggctcaaagccctgctcaatgcgggtggtgtcgagccgggctcctcgatttccacgtccgacataggattccgcatcgccccccggatcaacgcggcgggccgcatggacaacgcgagcgacgtggtggaactcttcatgacgcaggacggggatcgggcccgcgccatcgccacgcgcctggacggtctgaacatcgagcgtcaaaaggccggcgaagacgtggtgcgcgacatactggacgcactgcgcggccagattccgggagacgatcaggcgggccttgtgttctacgacccgtcctggcaccgcggtgtcgtcggtatcgtggccagccgcgtcgtggagatgtaccaccggcccgcactggttctgggacgcgacgataagaccggctacgtgcaaggctccggccgctccatcccgtccttccacctgctcgacgccctggaatccatcggcgacgtgttcgtgcgcttcggcggtcaccggcaggccgtcggcatcacgctggaggagtcgcgcgtgccggaattgcgcgaacgcttcaacgcggccgcgcagaagctgctttcgaaggacgacatgcaggcccaggtcagcatcgacgccgagttgcagctgaaggaactcaacgacgcctccgccgccgagatactgcagcttgctcccttcggcctcgacaatcccgcgcctctctttctggtccgtggcgtcgaactgcgccaaccgccggaactcttcggccgcgagggcgagcacgtgcgcttccggctgtactccggagactgctgccagttcgccaaagcgtggcgtttcgcctcgcgcacggcggagttggcgcccggctcactggtcgatgtggccctgacggtggacgccgatagctatggcttgaagcgcggatacgcgggttggggcgtaacggtgcgcgacatccgcccggcgctgtagttggttctccactggatttcccatggccaacggacgctcgacgcacgcgtctgctcgcgggacacgcacgttatcttcaatcgcccacccggctggatctcaatggctgtagagtatggagacagcttccggataggccctccgcaaagctcaccggccgcctgtttgcctggacattccacccatgaacgccttcgaagtcttcctctacgaaatcgcctctattccagagcgcgtgaacgggctgaagggcgtcgcgatgctcgtgattctcgcggcgctcacagtcgcgatccccgcgcgcttcggcccttccatgctcaacccgctgctgctgctggtgctcagcgccgtcgctccgctgctggcgggcaacttcctcgcacggagtttcgccacgcagaaggcggcagcgcgcatcatcaactgcggcgacccggcgcaagcgatagctctgggtaaagtgatggctgcgaccctgtggggtgtgctgctctgggtggtcttcctctcagtgccacttgttgcgttgaacgcgggccgcacgcacctgctgctgccgccagtttcggcgctgttgtctctcgccttgctggccgcttcgctgtcctggtttgccacgtcggtgggctccatcttcgccgccggagcgccgggtccggccatggctcagaccctggtgcgtggcatcatcctgatgcccgtgcttgcggccgccgggatctccggcatactgcccgccggatttcgcttgacgctcctgcgaaccgtggcgtgggaccatctcccggtcacgctggctgggttttccgccgttctgatcctgggaggcttccccgctctacggaaaacggcgcagaagatcgaagaactgcgccatccgctgtcgatcctcggcgcgtagtcgcaacgctccgcgccatttccggttcactatccccaggctcaggccggcaggtcccagtcctgctcccacaacacgcgctgcttcttctcgaaggccagtgccgccaggcggcaggtcattgcggagtagtagccgtgctcctcgtgcgcgatggttcgcttgcggtcgcgaatcctgtccagccagtcgcgcaggatcacgtcggccgcggcgcccgttccgccggcacgcgccgccggctccttgctgaacttcgcgttcggcgtgtaagtgtagccggtatccaccacgtagcgttcagcccacagcacgccgcccgtgccgcgcagctccacccccgccgaagtacgcacgccgggagcactcaggcactcggccgtgaaggtgaccgtcgcttcctcggcatagtcgaagatgcacgtgaccacgtcaggcgtgtcccgcccgtctttgtagaagtaagttccgccgcccgcgctcgccgccaaggggtggcgtagacccatccaatggtgcgccgagtccatcacgtggatgccgatgcccatgatcatgccgccgtcgtagtacagccacttgtacgggctgaagtagatatcgggattccagtcgaccttcggcccagggccggtccagcgctcccaatcgaggccgtcgggcttgcgctcgaagccgggcggaggcgtctgcacgtagcccgcgttcgaaagataccaggtgcgcgcgaacccgcccttgcccattacgcccgaatcgatgtagcgctgcttggcctcgacaaactgcggcagtccgcgcccctgcataccgacttgaacgatgcgcttgccggctcgcgcggcctttaccagcgcgatgccttcttcaggccggtgcaccatcggcttttcgacgtagacgtccttgcccgcctgcatggctgcgatcgcgaccgtggcgtgccagtggtccggcgtcgagacgatcaccgcgtccaggtccttgcgttcgaccagttggcgatagtccaggtattgctcggcgcccgcgcccgcgatctgcgctgcctgcgcgcgccgtgcatcgtagacatcgcagactgccgggaatgcgatctcgtccggggcaatcctctgcaacgacttcatcagatactggccgcggccgcccgtgccgacgacgccgatgcggatgcggttgttagcgcccacgctgcgtgccgccgagagagctgacataggcagtggcagggcagcccccacgaaaacccggcgagtttgactggtcatcagtatgttcctacccgatggtgagtttctggacgatgcccactctatgcctgccatcccggcattgcaaccggccatcgccgttcgatccccgcgctcgccgggagtcgcctcagtccaggttcaatcgcttcagcagttggtcatagcgtggtttgccacgcgtcgcctgaacgggcagaccggctccacgccagaccactggctcggccctaacggcacccgtcctcccactgccgccggggcggaaccgcatacccccggctcacgccttcgtgatgcggtggatcgacttctggtgctcccacacctcgcgtttgatccgcatgccgaagcccggcagttcaggcgcttggacgcacccgtccttcggcatcagcgggttctccagcatcgccggccaatccgattcatagaagcgctggcagctttcctggatccagaaattcggcatggccgtggacaggtgcgtcgtggcatagaacagcagcggcccgcccgccgtgtgcggcgcgaagggcagttcatgcgcttcggccagtgtggcgatcttgcgtgcctccgtgagaccgccgcaccagcaaacgtcgaacatcacgaacttcgcggcgcgcgactccagcatcgactcgaaattgaacttgcctgcgatgcgctcgctgatggtcagcggcaagcgagtcgagcgggccagttccgcatattgcgcgtaattgcccggcatcagcaggtcttccagccacagcggcttgtacggctccagggcctcggcaatcttcatcgccgaggtgacgttccacatcgagtgaaactccatcaggatgtcgatcgacatgccgaagcgttcccgcaggatgcgcaccgggcgcagcgctgcgtcgatctgttcggtcgtgatgaactgccgttgattcgccaccgccgcaccgtcgaacggccagatcttgatcgttcggattttggggccgtcgatcaactcctgcatgatcttctcgggctctgtgttgaagtcgtacttgtgtggaaagcacgtgttgtacaggcgcacattcggattcgacttgccgccgatcagccggtacaccggtgtctccagcgcgttgcccagcagatcccacagcgccagatcgaccgcactcaggcagcgcatctccgtgccgcctgcgatctgataatcgatcgcgtgatacaggtcgttccagatccgctcgatattgcgcgggtccttccccagcagcagcggcgcgaggtgcgagtggatcatctcggcctcggcggcgttgcgcgggtaggtctcgcccagacccgtaacgccagcgtcggtgtggatcttcagccaggtccagtgcggccaaaaggacgcgtcgtcgcgcgagttccaatgtacggtctcaagagcggtgatcttcatgggttttgccgtcgcagcagccagccggaaaggcgtcaacggagcgaagagcaaaggcagggaggacacgaacgcccggcgtgactgcattgcagcattctacgccaacgcgctctcccgccatcgcgcagcgcccgctgcgtcgccgcattgacgccgttcgttgtaagtcctagagtgaactcgggagtgagatgaaactgagccgcctgaaccttgtgacagccgtcgtcgcgttgttggcatcgggagtctggttcgccctcgggcagaatctgacggccgtcatctggctggcttgcagtgtcgtttggctctccgccgcgatcgtccggttccgctctgccagcgtcgagccgcacccggtcagccgtgtggtccgccgcctatcgcgcctgctgctgtggagttgattcccccgcgcggtttcgccatcctcccggcaaccggactttagacccgagtcgcttcgcccgatccaacctgggaggtacgagcaacagagtcctccacgcgctccgcgccggacgcgaacgcacttccagagcgtgcaatcgccgtgcggtccgttgcaatccaccccccgcggggaggcaacgccccgcccgtcgttcttcacgctacgcccgacgtttcaatccacgcccccgcacggggggcgacgctagattggctttcgcgatcgccccatcccccgctattggtccttcgtggaaacagccatgagaacagacggcgctcggcgtgaggcgtagaatgcaggaatgcgattccagaagtcgatccggatcgcgccaggctttcgtatcaacttgagcaagtcgggcgtcggcgtgagcgtaggaccgaagggtctgaaagtgggtgtggatgcgaaaggccggcgctactccagcgtcggcatccccggcacgggcatctcccagcgcaactatgcaaagcccggcgaggacggccacacgcccgaggagtaccagcgcgcgctcggcgtcggcgtgctcatcggcatcgccatcttcgtcgtgctgatggtcgtcgcgatggcgtcgcggcactaaaggtttgccgtgatgagcggtctgaatgaaaaacctgccgcgccagacggggccacccgaatcgagctgccccaatacaggtacgtccccccggaagagttcgccgccttgaccggtgcaaatgaggggtttacgcccgctcacccgcgagcgtggatgatgttttggcaagaggatatctgcgaggaggaccagttccacacggagttcccacgactctcgctgtcggaggcgcggcgattgtggctcgcgatggaggtgtcgttcttcgcccgctacgatgatttcctgcgcgtttggccggaatggtgcagcagcgggatttggtcagtgccgttccctggctcgcggcgggcgggtggcatggtcgattacaaatacctgcctcttcccgaggaattggtggcgcgcttcaaggcgtggcaagccgtgtacgacgagcatgagccctgggcgccggagaaggtcgactggaagagcttcaatgcaaccgccgatgaactcgctcgcgaactcaaacgctgtgtcggaccgcgcgtctacgtcgagcgcgtggaactactcgaagtgttgatggacgggacaacgttctcctggcggaatcaactgggccttcccgagcgggaaagctcggtgaactgaaactcggctcgatggaaataaaaaacgcccgggattcgggcgtttttttgctaaggacgctcaatgagcggcgccttgcgccggacaaaagaccggcttactttgaaacggccgggcaatcgcctctttgataaactgttgccagcttattcaaatcaggaggctatgtcaatggccgatctgtctttaccgcaagcccacaaggggctgatcctcgggatcgatctcggttccagttcacttggcaccgcactcgtaaaccccgagggcgaagagattccattccttggggtgcgcatctttccagcgggagtggtgggcgacatagaagagggccgggaggagtcacgctctgcccaacgtcgagatgcgcgattggcacgccgccagacgcaaaggcgtcagcggcggttgtacaaggtcttccgcattctccagcgtatgggactgctgcccctcgggccgcgcgtcgaagtgctgtacgaactgcagcgcgaactggaacgccgctatccggagacaaccgtcgtgccctatttcctgcgcgcgcgctctctcgatcaggcgctcacggaacatgagcttgggcgcgctctgtatcacttggcccagcgccggggctttctgtccaaccgcgccggtggcaagaaggacgacgccgaggaacgcagcaaagtgaaaggctcgatcaaaggcctgcgcgccgccatcgaagccgcaggcaagcgcacgctgggcgaatacatggcttcgctcgatccccgcgtcacttcgattcggaacaagccggaattctcggatcactacacgcaccgatcgatgtatctggatgagttcaatctaatctgggacgcgcagcagcccttccattcgggcatcctcagcgcgcagttccgggcgaaactgcaccatgccatgttccaccagaggccccttaaagatcaatcgaatctggtcgggcaatgcgaactcgaacctgaggaaaaacgtgcgccattgcggttgctggatgctcagcgcttccgggtgctgggcttcgtgaacaacctgcgcgttggtctcgatgatgggaatacccgaaccctgagtgccaatgaacgagctctgctgctggacctttgcgagaaatccgagaagctgagtattccggccgcccggcgtgcgttgggcttcgcgagaacctcgaagttcaccatcgaggaaggcggcgagaagaacgtccccgtgaatctggtggccgggcggttgcgcgctgtcctgggcgattggtgggaccacctgacgactgaggccaaagccgatctcggggaggacgtcggcgtcggcaagcgctgcaagaccgacgaagagctagagctgtgcgcccgcgaaaaatggtgcctcgcgccagagatcgcggaggagctcagcaaagtgcgtctgcctgatgcctatggacgttattcgctcaaagccttgcgcgaacttctgccagccctcgaaaaggggctgaacgtggaagaggcgatccggtctcatccccaatacctcgaatcgcgtaaagtggccgagcccttgcccttgctgccacccgtcaaagacgttctcggagagatccgcaatcccgccgtgctgcgctcgcttaccgagatgcgcaagacggtcaatgcgatcgtgcgccgctatggcaagcccgaattcatacaggttgaactggcacgcgatctgaagaggtcgaagaaggaacggcaactggagactggccgcaaccgggaccgcgagaaactgcggcagcttgcggtggaggagcttcagaggcacgattccgtgcgctactccaacccgcgcggcaccgatatcgagaagtacttgctggcgatggagtccaactggcattgcccctacaccgatcgcaagtacggcttcgtcgatgtgttcggcgagcatcccagcgtggatgtcgagcacatcatcccgcgttcgcgctcgctcgatgattcgtacctcaacaaggtgctcgcctaccgctccgccaacatggaaaaaggcaaccgaacgccgcacgagtggctgcatgagagtgatgtcgaacgttacgaccgtatgattgcgctagtaaacggcttcgattcccgcttcgaagtgggccggaagctgcgccgcttcagcatggaactgtcggagcccgattcgctgctcgccgagttcacccagcgtcaactgcaagagacccgctacgcctcgaagctcgcctgccgctacctcggcgtgctgtatggcggcgaggtggacgcggaaggcaaccgtcgcgtgttcgcctgcgcgggacaggtgaccgccaagctgcgcaaggcctgggatctgaatcagattctcaatccggtgggcaagccggagaagtcccgcgacgatcaccgccaccatgccgtggacgcgctcaccatcgcgctgacctcttcgaaaatggtgcgggatctcgccaacgcggcgggcgaagccgatcggctcttccgccgcaagataatcctgcccgtgccgtgggtggacttcgcggaagccgctcgcatgagtatcgaggcgatccaggtctcgcaccgtccggcgcggaagctcgccgggccgctgcataaagacactctgtatagccgaccacgcaaatacgccgtagaaattgacaaaaagggcacgccggtggagaaggagtacgtccatcttcgggtccctgtggttaagctaggtacgcgagcagccgctgaagtcattgtcgatgttcgagtgcgcgaagcggtgatggccaaggccgaggagttgggcggcggaggtaataagtttcagaacaattggccagtgctgcacacaaggcacggtggcagcgtgccgatcaagcgcgtgcgagtgcgcgaggttaagagcgttgtcccgattggcaagcaggggcgggagagattcgtctcctcgggatcgaaccatcacgccgctatagttgcggagatggatacgaaagacagcgtcaaacggtatgttttctcgacggtgacaatgctcgaagcattcgagaggaaacgtcagggtctacccgtagtccagcgggaacatggcccgggcatgcatttcctctgcaccttgagtgatggggacatggtggaaggcaaacgcccaggtgacgcggttccgcgcatttggaaagtacacaccgtagataagaacggaaggatcttcctcagcgcggcagtagacgctcgcaagaaggatgaaataaagaaggcgcacgaccattgggagccgaccgtgaactctatgttcggggcgggcggtgcgcgcaaagtactagtcacccacttgggcgagctcatctccgccaatgactgaccgggtgctcgacatctccgagcaaccggcgcgactcagtatccgcaacggcctgctgatagtcgagtctggcggcgtggaatgcgcggcgattccgtgcgaagaactggccgctgtcgtgattggccatcgtcaggtctcgctcactcaggccgtgctcagcgaactcgccaaggcgggcgcgctgctagtcacgtgcgacgagaagtttcagccggcttcaatggttctgcccctcgacgcacaccacgcgcaggccgagcgtttccgccggcaggccgacatgggggaagcgaagaagaagcgtctttggcagtcggtagtccgggcgaaggtccgctcacaggcggtagcactggagcgcgcaacaggctcggacgagggcttgcgggcactcatcgggcgcgttcgttccggcgatcccgacaatgtggaggcgcgcgcagcccggcgctactggtcgcgcctgttcgaagacggcacgttcaggcggcgcgacgaagaagacacccgcaaccacctgctgaactacggctatgccgtgctccgttcgatcacggcccgctcgatttgcggcgccggcctgcatccgagcttcagcttgttccactccaacgctgccaatccattcggactggcggacgacctgatggaaccgttccgcccattggtggacttgattgtccacgctgaaaagaaacctgaactcacggcggagacgaagcacaaactgattgcggggctgctgtcccgatacgtagtcgaggatgaggagcggacgttgcccgacattttggtgcggctcgcccagagcctcgccgctgtggtgatgggcgagcgcgagaaactgtggctaccggaactgaaggcggtcccggagcaacccgacgagtgaaatcccatggctctctccaggtatcggattatgtggctcttcgtcatgttcgacctgccggtgatgacgaaggaccagcgtcgcgaatatgcgcaattccggaagaaactccagtcgaaggggtttacaatgctgcagtactcggtctatgccaagcacctgccgaccgaagatgccgctgagcctctcaaggcgaatgtcaaagcggctctaccaccgaaaggccaggtgcgcgtcctggccgttaccgatcatcagttcggaaaaatggaagtgttttttgggaaaaatcggcgtcccgtggaagacccgccactccaaatctcgcttttttgaaccgggcctacgtgaaaatgccccgcaattccaaggggttacggggcactggagtttatcaaagaggcgattcccaaccagccaaagcgcacactggacacgtcataaaatcgccttcgagtttatcaaagaggcgattcccaaccagccaaagcccggaaggattggtgtgttagtgcgtactgagtttatcaaagaggcgattcccaaccagccaaagcctacgccgcatcgtggtggacgatctcatggagtttatcaaagaggcgattcccaaccagccaaagctctgttcgagcgctgcaacgacacgtacttgagtttatcaaagaggcgattcccaaccagccaaagcctggtcgctggagagtcgccaaactcaaggagtttatcaaagaggcgattcccaaccagccaaagcagtggccatctgcgctcgtctgctctgtcagagtttatcaaagaggcgattcccaaccagccaaagccagcagtgtatgaggtatttcaacgtctgcgagtttatcaaagaggcgattcccaaccagccaaagcctagtcgcggcgctgttcgcgctgatccgtgagtttatcaaagaggcgattcccaaccagccaaagcaacaacaagtgccatagcacatacttcgatgagtttatcaaagaggcgattcccaaccagccaaagcgtgctctgcgaccttacggagcgctctggagagtttatcaaagaggcgattcccaaccagccaaagctcccaatcttcggatgaagcgcactcagaggagtttatcaaagaggcgattcccaaccagccaaagccgagtcgttccctcgccttacgcaatcacgagtttatcaaagaggcgattcccaaccagccaaagcgtagagttcatcggggagacgcacggtgaagagtttatcaaagaggcgattcccaaccagccaaagcccaagacacacaacctgatgctggcgcgcagagtttatcaaagaggcgattcccaaccagccaaagctctgcctgtggctttgtctccgcgtacgcgagtttatcaaagaggcgattcccaaccagccaaagcccagtcacagccatggcataggtgtgctgtgagtttatcaaagaggcgattcccaaccagccaaagccgagcgggtcatttattacaactgtgatacgagtttatcaaagaggcgattcccaaccagccaaagcagggactgagccggggagactcccgtgacggagtttatcaaagaggcgattcccaaccagccaaagcctatttgcaggagttgattcaacaagaccgagtttatcaaagaggcgattcccaaccagccaaagcgccggacccaccaataactgcaagatcggcgagtttatcaaagaggcgattcccaaccagccaaagcaatcggagaagccgataaaccaggccttgggagtttatcaaagaggcgattcccaaccagccaaagcgccggggcgatgggcttgctgggtggcgggagtttatcaaagaggcgattcccaaccagccaaagcatatacacagcacagtgcgttccgcagctcgagtttatcaaagaggcgattcccaaccagccaaagcaggacaatactgcgatggccaccattgagagagtttatcaaagaggcgattcccaaccagccaaagcccgatgccaatgtaaagcgcgctcgagatgagtttatcaaagaggcgattcccaaccagccaaagcttgaggggatccacggtttcaaactttggagagtttatcaaagaggcgattcccaaccagccaaagccggccaagaaaccgggcaacggcattgagcgagtttatcaaagaggcgattcccaaccagccaaagccctcgctgtgatcggcaaggctgcccgaaggagtttatcaaagaggcgattcccaaccagccaaagcctcgattagttgcgggacgaacttcatgtcgagtttatcaaagaggcgattcccaaccagccaaagcacgctccggcgcttcccaccgcaaaaataggagtttatcaaagaggcgattcccaaccagccaaagcgcaaacgctgcctacaagacaggggtactggagtttatcaaagaggcgattcccaaccagccaaagcgtcgcaatcgtggaggcgcggtactcgcgcgagtttatcaaagaggcgattcccaaccagccaaagcatatacaatgcgggtaatggttggtggcgtgagtttatcaaagaggcgattcccaaccagccaaagcgtagttgatcgcgtacaccaacctatcgatgagtttatcggctcctgtcccaaaagtgtaattagcgctcgacgggcaacggcagctgagcgcagcagtgatagatcgctgcgatgaagttctcggcgctgcggaagccgaatgagcgatgactgat

SEQ ID NO: 2527 - DNA, 15278 bp, synthetic construct
  source 1..15278: mol_type = other DNA
  misc_feature 1..15278: note = Synthetic
tcgagttgctgaagcgcctgctgaggcagatgggcgtcgaagaggagcgctttcgcctggagtggatatccgcggccgagggcgagcgagtcaaaatcgtgatcgacgacatggtggagaagctgcgcgcgctgggtccccgagtccccgccaggcggcaggaggtcgcatgaaacccaaggtggcgttctactggtgcgcatcctgcggcggatgcgaggaagccgtggtggatctcgacgaggagatcctcaatgtggtgaacgcggtggacatcgtgttctggccggtggccctggatttcaagagacgcgatgtggaggccatgccggacggttccatcctggccagcttcatcaacggcgccatccgcaacagcgaacagcgggagatggcggaaacgctgcgggcgaagtcccaggtggtggtggcgttcggaagctgcgcgcaactgggaggcattccggggctggccaacctgttcgacgcgaaagagatactccaggaggtctatggcgatggggtgaggccgcaaatggtccaccgggaaaacggccactcgctttcgctccccgagttcttcgacacggtcttggccctcgaccgcgtgatcggcgtggattattacctgccaggctgcccgccgacgccgaaaatcatagccggcgccttgcacgcgctcctcggcgcggacttgccgccgaaaggcgcggtattggcgccggaccacgccctgtgcgagcagtgcccgcgcaaggacacgcgcccggagaagttggtcctcaaggagttcaagcggccgcaccagatgatcgcggaccagcagacctgcctgctggcgcagggcctggcttgcctgggaccggggacgcgcgccggttgcgaggcgttgtgcccccaggggaacatgccttgcaccggctgcttcggccccaccagccgggttcgggacttcggcgccaaggcgctctccgcaatcgcctcggtgatcgatggcaatacggaggcggaaatcgcacgggccttggacgccgtgccggacccggccgggactttttaccggtatagcctgccgtcctctttgctgggccggcgccggatggggtgagcatcatggacagcgttcgcaggattacgatcgaacccatcacccgtctcgaaggacacgggaaaatcgaggtcttcctggacccgcaaggagtggtggagcgcgcctatttccaggtgccggagctgaggggcttcgagaaattcgcgcaaggaaggccggccgaggacatgccccagatcacgtcgcggatttgcggcgtctgcccaacggctcatcacatggcgtccaccaaggcgctcgatgcgctctgggacgtgacgccgccgcccgcggccctcaagatccgcgaattggtctactccaccttctttgtcgaggaccatgcgctgcacttctatttcctcgggggccccgatttcatcgtcgggccacaggcgccggccgccgaacggaacgtgctgggcgtcatcgccagagtgggcgtcgaggtcgggcggaaagtgatcgtcatgcggcgcaggctgcgggagctgatggcgctggccgcgggcaaggccgctcatccggtgttcggcctgcccggcggcgtcgccaagccgctcaccgcggacgatgccgcccggttccgcgaagtggcggacgaagccgtggacttcgcctgcttcacgctcgaggtcttcgagaagctcgtgctcggaaactccgcctatgtggacctcatccgctccgacgcttttacccaccgcacatactatctggggttggtggacgagaacaaccacgtcaacttctacgacggttcgatccgggtggtggcgccggacgggcacgagtggagcaggttccggcccgccgaataccgggactacatcgccgagcgcgccgagccctggagctacatgaaattctgttacctcaaggagcttggctggaagggcttttccgaaggagaagacgccggcgtgtattgcgtggcgccgctggcccggctgaacgtggccgacggaatggccacgccgcaggcccacgaagcctatttgagctaccacggcaggctgggcggcaggccggtccaccacacgctcgccaatcactgggccagggtcgtggagatgctctacgcggccgagcgcatgcgggaactggcgaacgatcctgaactgacggaccccaatgtacgcacgttgccgacggcggtcccgcgtgaaggcgtcggcgtggtggaggctccgcgaggaacgctgttccaccactaccgtaccgatgagcggggaattatcaccggcgccaacctgattgtcgccacccagaacaacgcggcccgcatcgccatgagcgtggagaaggcggcgaaaatgctgatcacgggcggggacgtcccggaaggactcctgaacatggtggagatggccttccgcgcatacgatccctgcctgggctgcgccacgcacgcgctccccggcagtatgccgatcctggttcaggtgcgcgatgcgcggggggcgccggtggccatgctgaggcgcgacgccgatggaaccatccacagggagtagccgcagccggcgagggcgcgcccagtggggcggacctcccggtctgccttctttccgcgacgcaagttcaagaaacgctagcaactcaactgaatcccggcgcgccgtattctcaatgatcggcagcggttttcgaccgcgctgccgggcgacaaaaaggcagggtcgaaaaaccagcgcgggtgtcggtgcgcgtttgtggagcgagcctccggcttgccatgccgccattcctggcggcatcctctcggccggcggatgcccgcaagaaagcgggcatggcaggccggaggcccactccacggcggcgaaccagggggcggctcaccatcactgtttttcatgaaattccgcgggccgcaggccctatccaacagaccgggaggtccgccccactgggcgccggcacgccggccctggtccgtttgctcgccctgggaaacgagatcctggccgacgacgccttcggtttccgggtcgccgacgaggcggaacggcggttcccgggccaactcgaaatcgtgcgctcctccagcgcgggattcgatctgttggacagtctggtaggcgcgtcgcgcctgttgatcgtcgatacgattgtcacggggagtgcgaatcccggcgcgatccgtgttttccgcgcggatgagatacgtccggcgccgggcggctcgccccatttcctggggcttttcgaggtgctcgcggccggccggcaactgggtctgcccgtgccggatgaagccaccgtaatcgcggtcgaagcggccgactgcactaccgtcggcggccgaatgcatccggacgtggaagcggcgattccccaggtggcggaactcgtcgggaagttcttggagtccgctctgacatgaccgcgccggccgcacccgcctggccaggcaaatctcattcccccagcttcccccgcagcacgatgatcgacgccttgggtagctgatagagcgtttccgggccgctcgccgccaccgtcgatttggacggcgggccgtccgggtccgcgtgaccggggacgccgccacgcccgccccgtccgccagcgcccgtcgcaggcgctccgcccgccggaaccggatcggcgcgccactggtattcattcgggccgaagaccacccggtccaccgtcccggaaaagaatcggctgctcccggcaaccggatcggcgaacgcgaccctcacggaatggccgttgtcgtggtccttgttcaccagcatgacggaccactgcccgtcgggccgctcgacgcagtaagccgtcaccagcgtgttcccgtccttgtcctttacatcgctcgatactctgaagagtttgtggatcgcatccaccggctgcacccattccttggtgattacttgggtcgccaggtactgagggggataagtcgtgacgtggttatcctggtcaatcgccaggaacccgcctcccccgcccctgcccgccgtcgcgatgtagtggaagtagtaagtgccgctggcgccggcggtcatcatggaacccacataatcggccagccacagggccgtcttaccttccgtggctccgccgtcgcctaagtcgttgccctcggtcatgaagaacgggatgttcggcggcagaccgttgtctttccacgcctgaaccacgcggttgacgttggccggctcgtcgtacagggtattccaggcccggcaggccggatttccctggcacgggtagtgctcgaacgagaagaacgcgaaatcccgcaagtggccgtggctcttgaggtagtccacgaaccggcccaggaacgacgcccttccgttggcgtccgcccaggaatcgacgtccgccggcgtcccctcgaatgccggcccgcccagcggcgcgttcggcgtgagcttgtggatggccttggcgaactgtacgtacagcgcggcgtagtcctccggaagcacgcgctgcccgtccgcctcctctcccatctcgatccacgagatcggatacttccgtttgttgagatacgcgatctcgttggccgcatcctccggtgtgttgtagagaatcgcgaccggaatcatagccggaagaccgcgcgttactccgcaattgaagaagaaatcgaatccgatctggtcccctcttccgtagtccaggccggaggcggcatgccacggatccaccgaggaaggccaggtgacggtctgctgcctgttcggcaggtgcttgactaagtcggtaaactggccgccggccgccacggtcccgacatacagctcatttatggcgtatcccatgcagttgcgcttgtcctgcgcgccgtgcgtgtcgcacgtgttggacgattccagcatccaaatacgcagataccgcgcggggatcttccaactggccagcgtcagcgtgggcgtcccgcccttgccgtccgcgacggtccccatggggaaagtctgccaggcgcccttgttgatcccgtcgtagaaaggttccttctcgccggtccagaactgcacgtagtagcgcgtggcgtaggggtcggcccaggcgatcttgatggcgttgacgtccaccttggcgcccatgtcgatcatgacccattgcgggtgcagcgagtcgtcctctcccgtgtaggctttggtcagataggggttgctcttccagtacgatttcaggtctccatcggtcaggcgggaccagccgttgccgtcgcccagggtggcgccgcgatgcggaagcgggtacgcccaggagtgcgggatcttctcgccggttggctccgcgctgcccgtgaagtagccctcctgcctggctgcatcgctccacgcgccgcgcgggttccagtgccacgcctcgatcatcaactccgtgttctggcggtagctcacggtctgccatcccgctcccaacagctccttgaggaccgggccggtcagcagccgctcggtattcttctcgttcgcctccttggtggctccgccgcgcaaccggtcaatcgccccgcccagcgcccggaagggactgaacgaattcaccgcgtgcgacggcgccgcatccaccacgatattctgcgcgcacgccgcgcacgccagccaaaggaatacgcctgcgcgccatttcatgcgtgtatccaccttgccgcccagctaccgtggagtcggccgctacgccgccgctcggtcacttcccgccccccgccgccgaatccagggcatcgcgcactttatgcgccagttcggcgggcgtaaaaggcttttggaggaacgcggttcccttctcgacgccctccttcaagacgacatcctgcgtgtggccggacatgaacatgactttcatgccgggccgcagcttgagggcgctttcggcaagttcgcgtccgcccagttccggcatcaccacgtcggtcacgagcaggtcgatcgggcccgggtggacttcgcacaacgccagaccttcgcgtccgttgcgggcctcgagaacctggtacccgctcgcctccagaatcgtccgggcgagcctgcgtaccatgtcttcgtcctccaccatgagaacggtttcgcatcccgtcggcgccttcgcaaggccccgccccgctcccttgtccaccgcctcggccaccgccggcaggaagattctgaaggtcgtcccgcgccccagttcggactggcaacgaatcgcgccgccgctctgctcgacgactcccaaaacgatggccagccccagaccggttcccttgccggtctctttggtggtgaagaacggctcgaagatgtgggcctgcatttccgcgtccatgccgatcccggtgtcgcgcacggccagcatcgcgtagcggccgggcgcgaggtcttgcccggcggcatcgtccccggtcacggccaggttggccgtttcaatggatagcgtgccgccggccggcatggcatccctggcgttcagggaaaggttcatgatggcgcggccaatctcgccggggtcggccctcaccagccagaggccggacgcgcaatcgacggccacctcgatccgcccgccgaccaggcggcgcagcattctctcgaagtccccgacgatgacattcaggtccagcaccttgggttgcagcacctgccgccggctgaaggccagcaactgctgcgtgagtgaagccgccctctcgccggcggtcttgatttcaacaacctgctcgagagcgggctggttgccggccagctcgtcctgaagaaggccgctgtagccgatgatggccgtcagcaggttgttgaagtcgtgcgcgatgccgccggcgagcctgccgacggcctccattttctgcgactggcgcagacgctcctcgcttctgcggagggcgttctgggcgaacttgtgctcggtaacgtcgtccaccgccagcaggatcatgccgagatgatggatgcggcagcccccaagcacgagcgccctatgcccgacggttggaaaatcccactcgactccgaagcccaggaacgagctgccgccctgcagaagaccgtccagcgcgtcccgcagacccggaaggtcccaactcccgcgcgatagcgaatagacgacttggccctcggtttccagcggcaacgtgcgaaacgtttcgtaaaaggcctggttcgccatcctgatccgcaactgcgtatcgagcaccagcaagggctgctgcacggtttcgacgatggacattgcgaagtcgcgcgcctgcgcgagcgccgcgttcttggcctccagctcgtcgttgatcgtgatcaattcctcgttggtggattgcagctcttccttggcggtctccagttcctcggtgaggctttgcagttcctcgttggccgaaagcgcctcctcggtggtgttctggtcttcctccctggatgcctggtgctcttcgatggccgagagaaaccgctgcttcgcatcgtcaagctgctgtttcagcctggcgatctggcggtcccgcggatcgccttcgggaggcgcatccggcggttcggccgggcgtccggcggggcccgtcgccggttcgaaaaggaccagggccaaccgcccttgactggcgtccagcggggccgcctccacgttcagctcgccggccctgccgtcgtgctcgtacggtacgcgctcccgccgcgccggctcgccgctccgccgcgcctggtggatcagcttctcgacctccaggaagagtcccgtatccgggatcagcttcatgagattgaagctcaccttcccaaccggaagcgtgaggtaggggctggccttgcctcgaatctcgagcacctccaggtcgtcgtccaccaccactccagccaggctgtacttcgtcaggagtatgcgatctacctcttttcgcgcgtccgcgccgtcccacaatcgcgaagatggagccgtggcggggccgccgccggccgccgcgttccggcgcgcgtcgcgggggcccgcgtgaaacacgcgcggcttcctggcggtttcccgcctggcatagatccgttgcttgcggtccaccagcgaaaacagttcgccggacgccgccccctccgccgcgcccagcataagaaacccggttggcttgagcgcgtaatggaacaccgggacgatgtccttctgcacccctcccaggtagatcagcacgttgcggcaactgatcaagtccagcttcgaaaacgggggatcttcgatcagattatgcctggtgaacacgcacatctcgcgcaggttcttgttgacctggtagccgccttcgatctttgtgaaatagcggttcaggcgctcatggctgaggtccgcggcgatgttctcggggtacttgccggtgcgcgccttttcgatcgccggcaggctgatatcggaggcgaagatctgcaccggatatgccgcgcccgtttcgctcaggtactcctgcaacgatatggcgatcgagaaagcctcttctcccgtggcgcaacccgccacccagacgcggatcgccgcgttcgcgggccggccctcgaggatgcgcggaaacacgactttcttcaagctctcgaacgattccggatcgcggaaaaagctggtcacgccgatgagcaaatcccgctcgagagccgccatctcttcgggatcgttctccagccgccggctgtactccgcaaggccgtcgatgttgcgcaaggccaggcgccgcaggatgcggcgcttgatcatcttctcccggtaaagcgaaaagtcgatgccggtggccccgtgcagaagggccaggatggcgccgaaccgctcttcctccccggccggcgctggctcctcttccgcgcgcgcggcatccgcaatataagggtgccggccaattctcgccagttccgcggcaatgcgttcgggcggcagaacgaaatccacgcagccggtgtccgccgcggcctgcggcatggtggcgaacttcgccgtggcgtgatcctgcgcaaatgtcacgccgcccgcggctttgatggcttccacgccggccgagccgtccgaccccgtaccggagaggatcacgccgatggccttgcttccgcactcctcggccagcgaccgcagaaaccggtcgatgggcatgtgcgatcccgccggttgcgtgcggagagccagttgcagcgccccgcgcgcgatggtcagatccgcttccgccggtatgacatacacatggttggcttccaccggcatgccgtcggccgcctcgctgaccggcatggccgtagcgcgccccaggatttcggccagcatgctatggtgcgttggatcgagatgctgaacgaatacgatggccaggccggtgccggcgggcagatcggccagtaggagcttaaaaacctccaacccgcccgccgaggcccctatgccaactaccggaatggcctgtctctcgtccataaaccccgccttcaactcgccggcaaaaggccggttagatgacagcgtaacaccgaatcgttgtcggcactaccgtgtggcgcggacgtcttgtatgcccctgcgcgcccttgccggcgcccggcgatggccccgccgcgccctatcgcccccccaccagcaccatcctgatgtccatcacgttggtgcccgtcgggccggtgaacgccaggtcgcccagcgcctcgaagcagtggtaggaatcgttctcgtccagataccggcgggcatccggcttgcggcgcacggtatcgccatcggcgaacgcggagcgaaccgcgacgcccgtgccgagatgaaccggagctttgcacgatgtcggaaacccgaccggatcctcagggcaaaaaaaacgccccgaaaaggggcgttttgctgagggcgctcatggagcgtagcctcgcgtcggacaaaagaccgacttactttgaagaagccgggcaatcgccgctttgatagactcgtatagaatatagcttcatagtaggcgacatgtcaacctcccgttcgccgcagggcctcccctcgggcttggtcctcggcattgacctcgggtctggttcactcggaacagccctcgtaaatccagcagcggagagaattgagtttcttggcgttcgcatttttccggcgggcgttgagggtgatctcgaaaccggaagagaggagccccgctccgcgaaacggcgccaagcccgcttggcccgccgccagacacagcgccggcagcgccgtctctacaaggtgtttcatctgcttcaacgcatggctctgctgccaacggggcggcgtgtcgatgtgctctgccagttgcagcgcgacctcgaacgccgctatccggaaacaacggtgcttccctggttcttgcgtgctcgcgccctcgatcatccactggagccgtgcgaactcggccgcgccctgtaccacctcgcccaacggcggggcttcctctccaaccgcgttggcggcaagcaggatgaggaagagcgcagcatagtcaaaggcgccatcaaagggctgagagcggcgattcaggattccggcaagcgaacgctagcagagtacatggtatcgcttgatcctcatctcactccgttgcgcaacaagcccgagttttcaaatcactacacgcaccgctcgatgttccaggatgagttcgcgctgatctgggacgaacagcgcccgcaccatcccaaaatcctgacggaacattggcgcgcccggctctttcacgctctgttccaccaacgccctctcaaggaccagtcctacctcgtcggcccttgcgagctcgaaccggatgagaagcgcgcgcccttacgactgctcgccggccaacggtttcgcattctcgggtttgtcaacaacctacgcttgcgtctggaggatggcgccgaacgcaagctttcgccgaatgagcgcgcggttttgctggatctctgcgagaaatcggaaacactctccttcgcggcggcgaagcgcgcgctcggtttgagcaagactctgaaattcacggtcgaagaaggcggcgaaaagaacgtgccggtcaatctgaccgcaacgcgcctccgggccgcgcttgggagcgcctgggatgaattctcgcccgtgcagcgggaagatctgatcgaagatgtcggtgacggccgccgctgccccactgacgaggacctcgagacctgtgcgcgcgagaaatgggggctgccggccgaactggccgaagcgctcacccgggttcgcttgcccgatgcctatgggcggtactcgctgaaagccctgcgggagcttctgcctgctttggagggcggactgacggtggaagaagctatccgccagcacagcaggtacgccgccacccgcaagcccgccgatcccttgccccttcttccgaaggtaagtgatgtcttgggcgagatccgcaaccccgcggttctgcgctctttgaccgaactccggaaaaccgtcaacgccatcatccgccgccatggcaaacctgactacatcacgatagaactggcgcgcgacctcaagaaatcgaagaaagaacgccagagggaaacttcgcgcaaccgcgagcgcgaaaaactccgccagctcgccgttgaggatcttcgaaagcacgaccctgtccgcttcgccaacccgcgcggctacgacatggaaaaatgcatgcttgccatggaggcgaagtggcgctgcccgtataccggaaaccagtacggcttcaccgatgtcttcggcgagcacccggtcgtggacatcgagcacatcattccacggtcgcgctccctggacgattcgtacttgaacaaaacgctcgcctaccggtcctgcaatgccgaaaagggaaaccgcacgccgcgggaatggctcttcgattcggatggccagcgctacgaccagatgattcaggtcgtcaagagcttcgactcgcgctttgaggtcgggaagaagctcaggcgctttgcaatggagctttccgatcccgactcgctattgcgcgagttcaccgaacggcagctacaggagacccggtacgcctctaagttggcctgccgctatcttggctgcctttacggcggcgtaatcgacaacctcgggcgacagcgggtattcgcctgcgccggccaggttaccgccaagctccgccgggcctgggacttggatcgcattctctccggcaagccggaaaagtcccgcgacgaccaccggcaccacgctgtcgacgcgttgactgtcgcggtttcctcgcccggaatcatcagggatctcgcaacggcctccggtgaagctgatcgactgttccggcggaaggtcattctacctgttccgtgggccggcttcggggaacaaacgcgatcagcggtggagggcattcaggtctcgcaccggcccatgcgcaagctgtccggtccactccacgaggaaacgctgtacagccggccgcgtgcccgcgatgtgggaaccggcggcgggccgaacgccaaggagtgcgtccattaccgcgtaccggtgacaaccctgagttccgctagagactttcaaaacattgtcgattcccgggtgcgggccgccgtcgaggagaaggcggccaacctcgggggcggcggtaacaagtttcttaacgactggcctgtgctgaacacccgtaagggaggcgtggtccccatcaagcgcgtgcgcatccgcaaggttcagagcgtcgttccgatcgggcaaggtccggcacggcgctttgttatccccggctcgaatcaccacgccgagatcgtggcgcggttggataccgccaaccgggacgcccggtacatctgccacacagtaactcttcttgaggccttggagcgcaaacgccagcatgtccccgtcgtccagcgggatcacggccccggctgccgcttcgtgtgtacgctcagtgagggggacctcctggaggcccgcaggccggaagatccccagacccgcatctggaaagtgcgctctgtccggcagagcggccagttggacctgactccctccctggacgcccgcatgaaaaaggatctcgaagaagacgggctcgtttggagcccggccgtcggttcggtgtttctgaaccgcgcggcgcgcaaggtggctgtcacgcacctcggtgaagtggtcccggcaaatgattgaccgcgtgctcgatatttccgaggaacccgcgcgcctgagcatccgtaacggccttctggtcgtcgagtcgggcgcctgcgagcgcgcggcgattccttgctcggaacttgccgcggtggtcattggccacagacaggtgacgctgactcaatcggttctcagcgaactggctcgatgcggggcactcctgatcacctgcgacgagaagcgcgcccctgcatcgatggtcctcccgcttgatgcccaccacgcgcaagcggagcggttccgccggcaggctgcgattccgctgccaaagaagaagcgactatggcaatccatcgttcaagccaagattcgcgcacaggcgtcagctctggagttggctatcggaagcgatgagggtcttcgcgcccttgcggcgaaggtccgctccggcgacccggataatgtggaagcccgcgccgcgcggcgctactggctacgcctgttcgggaacgccgagttccaccgccgtgacgccgaggactcccgcaaccatcttctcaactacggctacgcgattcttcgctcaatcaccgcgcgcgcgatttgcggggccggcctgcaccccagtttcgcgctttaccattccaacgttcacaatcccttcggccttgccgacgacctcatggagccctttcgccccctggtggatcgggcggcttgcgcgttggttggagccgtactgaaccccgcgacgaagcacgagatcatcgaggttctgctctcgcggtattccgttgagggcgaggaacggtcgctgcccgacattctgcaccgcgtagctcacagcctggcggcggtagcgatgggggagggcgacgcgctttggctccccgaactcgcgccgccatgctgcggcgagggaggctaacagcgatggcgctttccaggtaccgcgtcatgtggcttttcgtcatgttcgatcttccggtcctgaacaaggaccagcgccgcgactacagccagttccaccggaagctccaaagcaagggctttaccatgttgcagctctcggtctacgccaagcacctcccgagcgaggacgcggcggagccattaagagcccatgtccacgcggcgctgcctccgatggggcaagtccgcgtgatggccgtcaccgatcaccagttcagcaaaatggaggtctattttgggaaaaagcgaaggcgagtcgaggacccgcccttgcagatatcgcttttttgagaaggagccgcaaaagaagccccgcaaacccataggcttgcggggcactagagtctaccaaagccgcgatccccggccatccaaagcacttggacgtgctgacgctgtactcgtacgagtctaccaaagccgcgatccccggccatccaaagcccggggagcttggtgtatggcttcctgctggagtctaccaaagccgcgatccccggccatccaaagcctggcggctcgggtgaccgccacgcaaacgagtctaccaaagccgcgatccccggccatccaaagcgcccgctagtgagcgcagacccgctgctagagtctaccaaagccgcgatccccggccatccaaagcctaacggtactgcactatcccatgggatcagagtctaccaaagccgcgatccccggccatccaaagcgcctgcgcggagttggacgcggcctacgcgagtctaccaaagccgcgatccccggccatccaaagcgcccgcgcgaagtggaacgccgcccgctagagtctaccaaagccgcgatccccggccatccaaagccctgtgccgtatgcccagccgttcccggctgagtctaccaaagccgcgatccccggccatccaaagcctcccgctccccttggagacgttcaatgtgagtctaccaaagccgcgatccccggccatccaaagctagatggccgccgcattcccgctgatctgagtctaccaaagccgcgatccccggccatccaaagcagcgcgcagccagcgattccgcatccgtggcagttgggtgcgggcaagcagcggtatcgaaagggattccgaggttttgggcgagctgggcaacttcggatgggcattgggtgggcttggcggggtcccaaggg

SEQ ID NO: 2528 - DNA, 23468 bp, synthetic construct
  source 1..23468: mol_type = other DNA
  misc_feature 1..23468: note = Synthetic
ctccaacaccttcatccagctgccattcatgcttgaaggtatgctcgcagccctgaccggggccatcttggcggtaggcgtactactgctgggcgtgcactacctgattaacgactggctggctaagtccctgtcgatcaccatggccttcattggcacccgcgaggtgcttaccgtagcgccgttcttgatgcttggggccattgtgctagccggaatttcttccatggtttcactctcgcgttacaccaaggtctaaatcatgaaaaagctttcgctttctaaagcaggctcattggtgatggccgccgccgccaccttgagcctgagcctggggctagcgggtcacggcctgcccgtggctcacgccgacgagcgtgacgacgcccaatcccagctaaacagcgccaaccagaaagaagcgcagctgcgctcctcgctagaaggcgtggacgccaagctaggccaggcctacctggatgctcaaaacgccaacactcagctggctgcggctaaaactgagctggctaaagcccagcagatccaagcccaggccctgcaaacccagcagcaggtaaatacccagctggctagcgcccaggcccagcaggagcagctaaacaagcaggccactaactcctccaaggaagccagcgcctccaaggcggcagtggcctcactggtggtctccacctatcagggcgacaactcgctaaccacgctttcttacgtgttgcagtctgactcggtttcgcagatgactgagcgctctaacgtcacccaggtggcctccagcgtgcaggagtcgattttggctgatgctgaggcccagcgggctaaggacgccaaccgcaaggcccgccaggacgccgtcgccaaacgcatcagcaacctgaaggtgcaggcagacaaggccgcccaggaagccaccgacgctgccaaccaggctgccgccaaacgtaacgaggtttctgctagggcttcagccgcctcagccgccgcctccaacctggaaacccagaaagccggcttgcaggcccagctagaccaggtttccaaagaccaggccgccgcccaagccaagatcgctaagatcgacgcggccaacgcgcaggctgtagctagcggcagcatgagtaacgcttcctccagctcagctaagtctgactcgctgggcagcggctatattggccaccccatcaccgcgccctggacagtgactagtccctttggttaccgcgtccacccggttaccggcaccgcccaaggccacgccggtacagactttgccgctgactgtaaccagccccaatacgcgccggcggctggggtagctacctactggtattcggtttcctgcggtatcggcttggatatcaacctgggttacattgacggccactcctacaacatcaccctgtgccacatgtctgggcgcgctgtgggtgatggggccagcgtcagccgtggccaggtggttggttacaccggcgccaccggttacgccaccggctgccacgtgcactttgaggtcactcgcgacggcgtcaacattgaccccatgagcctgcccggtttctaagccgcagctcgcgctggcgggctttggcaggttatgtggcgcgcacgtgcttgccctgcccagcgctggcgagcaggactgcgagtgtgcgcctgggctcgccgcgcactggcgagctttggcaggccgctgaattaattcgcgcaacagccggatgtatcgggtaaactgatgcgtccggctgttttatacacaacgattggaggcgcttatggctaagcaggataaagcaccgaagctgacggccgcccagaaggctaaggctgcctcggatgcccacaagaccattgcccgcaacaagaaggccctacacgactacgccgtcgaggaaaaactcgaagctggcctggccctaaccggcacggaagttaaggcgctgcggatgggacgcgcgtcgctggttgacgcctgggttgagcttgaccgccacggccaagcttggctgcagggcgcgcacatccctgaatactcgcagggctcgtggaacaaccactctccacgccgcaagcggcgtttgctgatgcaccgtcgcgaaattgaccgttgggcgtttaaaacccaggccaagggctataccgtggtgccgttggagctgtatttcatcaacgggcgagccaaggttgaggtagctttagcgcgcggtaagcaggaatgggataagcgtcaggctttgcgcgaggcccaggacaagcgcgaggctgctcgggcggtagccgcagctcgacgtcgccagggctgagggctgctgggactggcgcttttcgggaggctgtgctaaaatgcaattcctgccataggcagataactacataggggatgatcggtttcgacgacggtagtggattcagtagaagcgggtcgaggatgagcagtcatctcgttaacgctctgtttcaaaccaataggtgccaataacaaccgcaccgacttcgccctggccgcctgagccagtcgccaagtccgtcagcccgggtttgctttcgccccggtcactggcgtcatttagagagccactgctttaattccttgtcgatgggaattaagggacttttagtcgactgagcctgttccaagcgtcctagtttgcgtgagacgctgaggccgagaaactctttagcaaactgcacccggagaagtcctgttgcattgctgtcggaccggggttcgattccccgcatctccaccactaaagcgcccctgcggtattttggaccgtaggggcgtcgtgtttatccataacaatcaagttgcttggacttgccttcccatgcagagcggctaggggtggcgttagcggccatagtagtgaaatgggttaccatgactatttaagtgtctgagattgagcatcttggttgtatatctgctcagctttactcacgcattcaaggaggacggctgcagcgccccagaggatgaccacccaagctgcgtatagcgacaccattcccacgttgtatccggggctatgcatccaggttgcgagacagagaaccatcagtcctacgagaccaattaagattccggcaataactgccaagatagctaagaggtttactggcaatgtcaggatacgaatcagtagttgtgaacgtgccacatgtgcaatattcagagcggtcagccaccccatcaccccaagtgaggcctggtacggaagcttggcggtcgtcgagtatgttgtgacggtcatccatagctgcgtccatgtgaatgagctcccgtcagcaatatttcttccggctgcgtctgacactcccatagcatgagccagtgtaaagcctgagtaaacgagtgctaccagcagtgactgtagcagtgcaaacatgacaatacgcacgggacgtcgacgtgcaattatagcagcactctcccctactatccgcaggccgactcccagatgttgccctgtcttcacccactcggcgatctgtaaagcgagcatgagtggcgcgaaaaacagaaagggaacgcccagccaatgcaacgtgttgaacagtacatctgtcggggatggtatgccgctcatggctgtattctctcaaatttgacaacagactgagtgcttttaatgaaccttactgcatctggttctgctctgcgcagcacctgtttcgtcagcgggtcacagaatatttttgcgccaagtcagtttagatactcggacttgccttcccatgcagagcggctaggggcggcgtccaccaatgttcaaaaattttaataattccccagctcagcggtgtcgtggcgctctatcgtgagcgtcttaacggagatggctgctgaagtgtgcatagggcacccaagataagggatcaactgcgtaccgagaatccatacgaagtttatcgacggcgtcagtcatggcctgtgccactgccggagcaaaggtcttatctacaggttctgcggtgatgtctgcatatagggtcgttacgaaaggcacaaccgagtcgtctcgtaccggtaaggtggcggccacgacctccttaaatccggcctgctgcgccgccccagctacgtgcagggcctcattaggggtcgtgaagtcacctgacgccgagtcacaggttaggagaaccgctaactggcccttgtctgcacgactcgctgccagatcacggagagtgaaccgaccgtcgaataggtcgattccagcctcgaatgaatcattccgatctagccagccgtgcgcacttacgtggagcagagtgcattctgatagtgcagcgcggaaggcagaaatcgtggcgttatcatcaaagaggtggtttatgtgtgcctgtggcagtgcattatcgataacctgccgctcatcctccagagatatgagctgttcagagggatctaccgatacgtgaagtacagtatccaggggcccgttctctgcttcaggatgcgagtcaaccagtaggattgtcggcaggtatgacgaaatcacccgctcgtgcatgttgggccattttgatgggtcgtttttacgctgattaatctgcggtttcctacgagggtgaataccggcggcgtgtacaggtagaagagcgaactctccaagcggtgaccaccatacgtgcgggcgcccttctgcggtagtgatccgctccaaaataggggcagttacattttcccagagccaccctaggcaatcgaagatcgcatctgactcagagccataggtacattcgttatcggtaattttggcctgaagcttttccacctgctctcgcaactgtccctttgatgctttcgggagatggatcagcaatggttcagcatccccctttagaattagcgctaatgacttttcctctcctggagcaagcaggacaatcggaccgtcagcgccgaggccctggtacgcataaggatcaggcactgtttgtccgagctctgcttcaccctcatgggcccgaagtcgtagctgctcatctggacgcatgttagaccgtcgtctgtcactctctacattactaatgaaaccggagagtgacgcccactgttcgtctcccttcttttctgccagtgaccgggcttggaggccctggcgccacaggactgatcggacgtgatcagcccaggcaaaagcttcgagacgtcgctgattagctgcatgcgcaacggcatgctccagcacttcctgcatgtcagtcaacagcttgcgacgttccctgagggttagtccgatccatgctacctgtgtggtcaaggaaacggctcgcttgaatgctttgaatgcctcttcgtaatcccctatcgcttccgcgtcacgggcccagcgggcggactgcccgaatttttctgccggggtgatcccttcaagcagagcagcttgtcgctgtgcctcaagcgtcttctgggattgagatacgccgggtaccaggtgttcgagccagcgcagagactgagctaggttagacagagctggcaggagacgagcatcgctagacctcgcagcagcaactgcctcctgagctgttgtgaccgcactttttgcatcctcgagtgctaagttatggtgctcgccttcttgaaacatcagtgaccgctgccggtacgcgtcagataggttcgagattcgataggcccgatctgggtgggacgtcggcaacaggtctatggagcgccccatgtgcagcagggcttgatccatgtcatccattgatcctgtgtcctgtgcacgcgcagccaaggcaattccgatgtttgtctcatacccagaggcttcagttggtcggttctttgatgccaccagcgcctcgttgaaccacttgattgctttggttagatccgctgtcttatggtcacgctcataccgctcggacagtgcattggccaagttgttcacatagccggcgtaggttagttcatcgatcgctgaggctgctgcagcttgttgggcaaggtcgatagcttcgtcgagatcttgtgagttctcggtatctcggtaccggtcacgtagcgctagtgccaggtcgtttctacgctcggatacgcgactagctacaggttcaggtaggggcagtgcctggcggtatagctcaatagcatgatctagctggctcctattggcacgctcttcgaagtcgtctgacaggagcacagcgaggttagtcaggcgtgcggctcgctctggatgctgtttcggcgtcagagctagggcttcttcagtatgtttgagtgcctcatccaaatcatttagggagccggtttcacgatagcggtcacgctgggcgttacccacggcagtgagtgccgccgcgcgatacaagtcaggatccgagaacagttccagcgctttgttgccttgggtgagggcttcgtcgagcagcgcagggttaggattcagctcattggcatccctacaggcagacaccaggtttaccattgctacaccctgatcttgtgatccctcgggtgcgatattgatagcttcccggtacatgctgagagcctcatcgatcaggcctagatccgagtcgctcttgacagtttctaagatggctgaagccgtgttagtgaggatgaggggacgatctgagtcgtcgtcgggaattcgtttcagtgccttacgacccaggcagaccgcttccttaacatggtctgggtttccgctctcgcgtgagagacgtcggagtagcgcgacaaggttggctgtgtagccgggatgatcacagtggtcgattccaagaaggtctaggccatcccgcatgtgctcgatagcctcttcgagaagaccctcgtcgggtgtaatgtcgtgtaggccttccagggctgccgcgagattgaaatgagcgatggctgcatcttcagaggtcgttgcctctgctacggctcggcgcctcgagtccacaacacgttgaagttcttcctgtgactccccggcatggcttagggacagcgcgaggtttgcctcgattcctcgtttggcatcttcgttcagctgaccagatgcaagggctgactcccagagagatatagcccgttggcgtactggctcaggtacatcagcggccgtgcccgccattagtcctgtggcgagattagcctggcagttggcgataagttctaagtctgttccgtctttttctgccctttcaagggcagtctcaagcaactctacaaatagggtgaggtcctccggattatcctttttagcgaaccgatcccatatcataagagccgcgtcatgtaggtgggcagcaaatgagcgcccttgccgttctacgactgacataccacgcctgattgcctcattcaggtcgttgggatcgcctttgtctaggaatcgctggtgtagcgcatctgctacgtaccattggagatctatccaatccggatcatcgttgggtagactgtccactgctcttattatctcatccaacgagggttcctcgtcttttgatggcatctcatccatgcagttagtataatcagcacctttcttgacatagttgtttcgcaaggaggaaaaatggacttgtttaagttttttcatagcaattctgaggaacttccgtactgtccgtccgcttcagaagaaattgacaaacaagcggctaccctctttaacggccctaacgcgagtgtcatttgttgcgacactattgatgttccctccgttactatcaatgggccgtgtccgcgttgtaaacacgttttcagtcagacacagcagcttgacctcgcacctcttgtaaaacgtggctcaggcaataaacaaaaggagatcgttcgagaggtacatgttctctgtgaatgtggggttacccatccgggtgttcctcgtggggagaacggatgtggggcgagcttcaggctcactatccccaactaagagatttgagatagtggttctgatgcaacccgaagattcacctaaagagcgtaggcgtccctccaatgatgatctgcggttaagacaggagctgcaacgaaaagagcctgatcaggttagggcagaagctcgtgtttggcgtaacggctacacatttcttctcacaggaactggtgctgtcttgacgttggctgcgcctcgcttagggagtgcctcttggccgtggcgtctggctttgtctctctctttcggtgtggggattttgttgcttgctgtggcgttgtggcttgttctcaatgtagaaggcggtgaacataaattttcacgtatatccagcatggattctattctgaacaaatacggctcaatgcacgcgttcctcctggacgaagccgcccaagtacgcaaacgtattcgtcgttccaagatatgggccaagttaggtgcgttggctgtgttcattggccttatgttgaccttatggataccctcataatggcttagctgctgcggttagcgatgtcgaaagataatgacaggtaggggagggagcggtaaatgactttgtcaggtaaagcgcaagctaaactgcttaaagcgcgccgtttaatgatcatcgggcttatcgcttcggtgttcggtaattatgttgtcaatgctggcttcagtgcttttgcggcatctgggactatcgcggtttctgctcttgttgttttaaaaacgatcgagcaaataattgttttcactttcccgttttacgcgcgcatcattggcaaaatcagcccagacaaggcactaatcactgtagacctgtgtgaagcggcaatgagcgccatcgctctagccgtcacgttcctgcagccccagttggcgattggctgcctttttgcctacgtgcttatcgacgcgctgatcgctccggtcagtgacctcgccgatgagttttacggggctgctatcgctaatgtggatgaaaaagccgccttagctttcaacgccacgctctattcttggctcgcatttattggctttgtgattggtggtccgcttggctctttcttcgcctcggtttccattgaggccttattgctgacaaacctggttttgtcgctgtgcggggcgggtttgcgactatttgcgcggaccacgttcgcggctgggccaatccttgacgttgacgatgaagaatacgcggtgactggtagccgcttgccggtaaaagagtttttcaaggatctttttgcctccgggccggcgtctccgctgttatcgctgatgatacgaatcgctagtgcgatgactggtgagctgttcttgctttgggtggcaggggtgtctgctgaacgggcctctcacctgggtgcttttacagggatggggcttgtgctggcggtctttggtgtgggtgccatgcttgggccgacggcggggcgctggctgcggcgtattggttcggctaaaacggtgcttctggcttctgcgctggtgtcaggcgctattttgctgctgtttggcgtatatgaattgactgtgggtagctcgtttattttggccttgggtttcgtgcttgccataaccattcttaaccgggcacggatggttgttcttgagacgtttcgccaggcagagtttaagggcacgcgttttgtgcggatcatgagctggtcgtactcgtttggggcgcttggaacgattcttggcttgcagattggttactggctgcacctgtctacgcagccggttgcttgcctgtttattggcgggattttgtgggtctgcataggtgtcatagtcaacctcaaggtaacggcccccgtggaggcatagcaaagttttgtagtagcgatccgtgaggtagtggccaggacgggcactgaattagctatgcagagtctggcttttggctgatctagtggttgcaagcgggctctaaatggtactattcaagagctctattctcaataagaggtcgactcgttagcggcctttggaatgctccaccgggactttttggattcagcttcaaaaggtcccggtaattttttgcctcccattacccctgtgacgtgccataatgagttatggccgttacgcttcccaaagatgatgttcgctataaggtcggtattgatgttggccttaactctattggcttttgtgctgttgaagtcgatgatgacgatcagcctatcaggttactcaactcgctagtatttcgccatgatgctggagttgacccatctgctcaaaaaagttcactgacccgcaagaagatttcaggagtggctcgccgtaatcggcgggcgaatcgtgaaacaaaaaaacgcctagtggcacttgaccgcttactgtcagaagagcttggctggcccctgcctaatcttgaaggttatccagatccgcacgagccttggcatgcacgtgctcagcttcttgatgggtttgttgctaatgatgccaagcgtaaagaaatgctgtctattgctatgcgacatattgcacgtcatcgaggttggcgcaacccttatatgaagcctgcctcgcttgctagtttgccgtatccttctgagtttcttactaaattaaatgaagatacttctcgtgcgatcgggcgagaatttgctgcagaagctacccaaggtcagctagtagatgcatttatttcggggtctttgagcttagctacaacccctgatatacaggtgttagaggagtctgaaaaggatagcggcgagaatgatctacgcgatatagtcttaggtagagtgcgtggtgataaaggtgttatcgagggcaagcttcaccaaagcgataatgctgaagagattcgccgtatttgtgctactcagaaaatttcacaagaccaaattaaacggttaattgaagctgtcttcaaggcaaaaaatccgcgcgaagtaggtgcagcctacaaactagtaggccacgatgaacttcccggacaggaaaaatacattcgcgcagagagagctcacccagctttccaaaagtttaatattgtagccacccttgctaacctacgtattaatgaagcaggtagtaaacgcaggctgagtcccaaagagctgcaaacgctgacaaattacctgagtaatgtcggtcctaaagatgaagttacctggtttgatgtagctgaaaaactgaagattgatcgctttgatctgcagggaactgctcatgctgcatatgacggtcaagcggctttaaactaccctccaagggatttaacttccgtagctattaagaagggtaaagttaaagctcttaagaactggtggaaacaggcttcagaagaccaacgtgggcaactgattgattacctgtctaattcaggtggatcagatacacctcaaacggatgacgaacttgatgatttaactaagctgatacaaaactttaatgaaaaagatttggaagaattagagaagatctccttaccagctgggcgtgcagcatactcggttaacagcttaactaagctcactcagctgatgctaaatgagggcattgatcttcacgaggcgcgcaagagactatttaacatagatgataactggaaacctactcctgaacctattaattcgcctgtaggaaatcctgctgtaaaccgtgtattgaaacaagtagcacgctggattgatatgaccacagaacgctggggtattccagtatctgtgaatattgaacatgtgcgtggaggactaagttccgataaggttgctaaaaagattattagggaaaaccaggctcgcagagagaagaatgatgaagctgctgaagagatcgctaagcgattaggggaatctgggtgtgcacgcaggagtcacactataaaatattttgcgctgcaacgccaaaaatgccagtgtctatactgcggtacttcaataagttttaaaaccgcagagatggaccatattgttcctcgaacaaatggcgggtcaaacaataaacgttcaaacctggctgcagtatgcaaaacatgcaataaaagtaagagaaacattccttttgccgtctgggtgtcatctagtgaggctgggcctaaggtctcctgggaggaagttaaagggcgtgtagattcaatgattctcgaaaaagctaatttgccagaagattatgaagatgattctctcatcgaattttattcgaagaacgaaagtaaaaaattcagaaaagaggttatcgctcgcctggaatctaaaaaaccggaggaggaatttgatggacgctcgctagaatctgtggcttggatggccgttgagctgcgcgggcgtatcgtgggatattacgaaagccttttgaaagatactggtcaaaaggttcctcaagtaggggtttatcgtggtgatataatcgctgaggctaggagagcttcggagtttgaggatcgagtggagctgctcggcaggaaaggtaagactcgcctagatcgtaggcatcatgctatggatgcactggttattgcattgatgaaccagtccgtatctcagacattgtcttggcgcaggcagctgcgtgactcacaacgaatctctgagaagccagaaacttggaaaagattccacgggtctgaccgtgatggcaatcgtcattgggaggcttgggctaaagcaatgcgaattgccgtagagctattcaataatgctttagaaaaagacgaagtgcatttcagtgaaaacaaacgccttggtattagtttagctaaagcgcatgatgacactatcaagtcactatgtagttacgcgttaggcggagccttctctgttgaactaatcgatagggctgagacaccggcactatggacagcgcttaccaagcaacctgattttgatgttaaaaatgggctacctgcagatccaactcgacacattactgtaaacggtaaacattttggtcccaccgataaagtaaacttctttactagcgacgcccctgcaattaaggtgcgtggcggcttcgctggtattggtgacactattcatcacgcacgtatttatcgaatcgatggtaagaaaactacctatgctatggtccgcgtgttccaaacagatttgcgccgtatgaagcgcagggatttgttcaccgagcctcttaagccatcaaccatctcaatgcggactgcttctaaaactattcgcaaagctcttacagatggaagtgcaacgcaaatcggctggttagttgaaggtgatgagattcgtatcgaaacggatcgttatccttcaggtcaaattggcggcttacttaaagaatatccggaagcttcttcttggcgagtttgcggatttcctaatccatcaaaggttagagtcaaacctaacttaatatctaaggaaggtcttgataaaaaatattctgaacccaacatattagaagctgtcaagaaaatagtagattatcctggctggatagtggaaattaatgctttgttgggaaaaggaatggttactgttatacgccgtaatactcttggtgaggaacggtgggtatcgcgggctcatcttccagtctcagtgaatttgagctaaccatggatggtgcatggcgagttcttgatttgagtggttttgaaggaacacttgaatcagatcgtggcggtatcagtgttcacccagaatctggtgaagcagtgcatgtgccagttgctgacttggcaattgtcctagttggtatgggtaccaagctaagcgcatcagttatgcatcggctatgtacagcggatgtagcgctactgttctgtgattggcggggtatccctgaaggtggtgcttatagctggtctgaacatggacgagtggccgcaaggcatcgagctcaggctgctatgactttgccacgtaaaaagaacgcatgggcacgtctagtgcgcgctaaaattaccggtcaagcggcagtgctagagaatcttaaaattcctggtagcggccagctattggctttggcggataaagtgcgttctggcgatccagcaaatgtggaagcccaggcagctaggttgtattggtctaaagctttagagaccaggcgtatccctggatcaggtgaacgcatagggtcaaactcttgcttagactacggctattcagtactgcgcgggcatgttatgcgagctgtgcttgctgctggcttggctcctgcactaggtattttccatcatgataggggaaatgcttttgctcttgcagatgatctgattgagccgtttcggcccgcaatagacgaagtagtttttcggctccctaagacagctagcccaactgatagggaagtgaaaaagatattggttgcagctgctgcacagaaatttagtgctgatggccatggcatcccagctgtagcagaggctcttgctcaagcttttggtcgctacgcggaaggcgttgaagatcgattacaagttacagcttggacgggtccaactttggttgatttcggcggtgaaaacgatggcggatgacgcaatgtggtgtctagtaatgtttgatcttcctgtggagacaaagaaacaacgtcgtgaagcagctaggtttcgccatgatttactgggttggggattaataatggtccagttcagtgtctatgcgaaatactggcctaccggtgggcaggatcatgcagtgcttcgcgccatcaaaacgcatcttccagagggtgggcaggtgcgtgtgattggcgtgagtgacaaacagtgggctagcgggctccattttcgtaacgcaaagcctcaaaagagcgattctgcacctgaacagttgatgattttctagtcaaaaactcctagaaaacccagtgattgcaaggaaagcctctccctcttaagtgtaccagggggagaggtgctctattcccaaccgccgatagggggtttggggggctatcgtaagtgtaccagggggagaggtgctctattcccaacaatcacgctaccaccagcgtggtagtagtaagtgtaccagagggagaggtgctctattcccaactccaccaccggatatgaccgattaacgttaagtgtaccagggggagaggtgctctattcccaaccctcgaagcccttgcctcaccaatgccgtaagtgtaccagggggagaggtgctctattcccaacgggcatgtgcccttatcgaagcgcttgataagtgtaccagggggagaggggctctattcccagctagtcgaacagccaagcccggctgctgctgagtatattcgggggagaggtgactgattcccgatcatcttctagatttgaagagtttaaatttaatgccacgcactgtttggatatttgatatagaaaaaatggtagataatgcaggaatcggcaaggaagtcatcccgctaaagcagcacgctctctttgtggcgctggattattttcagttgtctagttatcggctttgggtgtgctggcggcctacctggacctaaccacctggcccccgctgcgccgtcgtcgacgctaaaaccaggggccctaaaagcggatagccgcaaaaccatcagagtctgccgggtccagggctgcactgcactaccaacataaagtgagcgcaaccctaaacctactgatcttgcagaaaaccgccagaaaaccgccccttttaggggccatgtaaagcattacctaaattagggttaacaatctttagtcgtacaaaagcggtgctaaccttttgcgtatttgtatgccctaactaaagctgcacaccgttgggatttcaaggaaaagtggcaatgattgaattttgcttgcatcgggctgagcattaatttaacaagcgctgcttcctgcggcgccccggcgcataaggaatcaaaatggaaactgcacacgtaaccgactgctcggtcagctcctgctcttacaaccaggacggctgccacgccctggccgtgaacgtcaaggctgccggctgctccaccttcatctccctcaacgagcgcggcggtctggaccgcgtcgtcacctccgtgggtgcttgtcagagcgcggattgcgcccacaacagccacctggagtgcaccgccgcttccgtgcgcatgggtgagcgcgacggccaggccacctgcctgacctactctgccgcctgatagctcgcgcttgggttagtgctcagggcttagcgttcagggcgcttggcgcactggagtgttatggcgcttagggcactggggtgcttggcccgctagacgcgctggagcacttagtccgctagggcacttggcccgcaaatactgacatttcatcccttccctataaaaccccatgaattttttatagggaagggatgattttgtgtgtaaatatgtgtgtaaataggagggtgctgcacaccgttactattgacaccccggcgggggagttcaccatgctcggtgacgactcgcgcctgtacggggctggttttactggggatttgggtcgggttatggcttccattcgggctcttcccgacgacgtgggccgggaagtccgccctggcaccaaccagctacttgagcgggcgctagacgctgtcaaacagtactttgaaggtaattttgagccggtagctaccttcccaatttggcagcaaggtaccccgtttcgccaccaggtttggtctactttgcgccaaactaaagccggacagcgtctaagttacagtcagttagctgacgcggctggttttccaggtgctactagagctgccgcaaccacctgcgcagttaatagtgttgggctgtttattccttgtcacagggtgattcgcgctgatggctcaatcggtaaattcggctggaatcagcaggtgaaagttgacctgctagagcatgaagcgcgcctggctgggcggccctagcggcgcaggcttggggtctagtggcgttgggattagaagtgagaccagcggaaatgttgggcctttgcggcggcgtcattttgctgcgagccggtgagtcgaaggcggccctagcggcgcgggcttgcggaggcgtcgagcaaggcgagagtggcggcgtcgagagctgcagattttgcagattcaggggcgccggtgcgggggtaggggtgcccggaattcaggggcacccagcgtgggctagggctacagatctaggtgcaggcattgcattgcagaatcaggtgtggggtctgatgctgcaggcctagttacagtgggtggtgctgcaaattcataggcaggccgggcatggttaccggggcatgcttgccaggacatggttttgggtgggcccgaaaggctggcgcgcacaaatactgacatttcatcccttccctataaaaccccatgaattttttatagggaagggatgattttgcctgtatttgtctgattttgtctgacttttacttggagtctaggacgccaaggagaggctgatagtgggtaaccacggcctcgcagtaggcatcggcgtcgccagctactgccgcctcatacatgaaacggtgagcctgggcggttacatgaatatcctccggcgtgggcacacccaaagacggtgaagtaatcatgtgcacctcccaaaaagcatcggttagttgctggaacaggtggttattaagtggcgccagcaaagcattgtggaaagtgcggtcttgctgggggaaaagctggcccgcctgagacagctgctccatttccaacaaaatctgttccataagcgctgaaggtttatcctgccaggcatcaataaccggctgcgctaaagccaaatccaaagcctggcgcacctgcacaatatcctttaaagcacgccaatcatcgcccgggtttagcaggcccctaaaagccagtagttccaccatggggcgcatagaaacagaacccacaaacattccgcgcccatggcgcacttcaacaatgtccaaagctgacaaagtacgcaccgcctctcgcacagatgagcgcgaaacatttaagtcgctgcacatttgcgtctcagtggggagcggatcgccacgctgcaagttgtggctaatgatgtgatgcttaatagcttcaatggctacgcgcgcctgacccaggctggcactaccgcgtgaaacgccgcctgacgtgctagaaagatctataggtgtttgcccaaaaggtgtggagttattagacacgtgcccctccgcgaatggttcgtcattgaattgtgtcctttaaccgtacactcaaaacgcaacttcatggtacagttcatttcaccaacgtcagacataagacgtcaggcatccaggaggatcttcaatgtcgaatcccattcgctcaaccagccgccgtgacttcctcaaggtcaccggtaccctaagcctcgccgccggtattgctgcttccctagcagcttgtggtggtggcaccactaagaagaagaaggccggtggcgccacaggtgacaccagtaaggctaacaaagatggtgccattattgcaggtatctcttatgagctaggcaccaacggttacgacccggccaccaccagctcggccctaaccattgctgccaactggcacaccctagagggcctaaccgagctagacccggctgaccgcaccgtctacaacgccctagctaaggaaacccccaagaaggtagatgacaccacctgggaggtcaccctgcgtgacggcgccaagttctccgacggcgctgctgtaaccgttgaagacgttatcttctcctacactcgcgtactcgaccccgagcttaagagcctgtaccgttcgatgatcggcttcatcgacaaggtagagaagaaggatgacaagaccatcaccttcaagctaaagcaggctttctccctagttcccgagcgcctaagcatcgtcaagattgttcccaaggccgccgtcgagaaggacgccaagaccttcgacctcaaccccatcggttctggcccttacaagatgaccgacaacggttccgccagccagaaggttgtattcgagcgcaacgaaaactacaacggcccgcgcccggccctggccaagaccatgacctggcagatcctgcccgacccggctacccgcaccaacgccctgacctcggccaccgtacaggccatcgactctgtgcccgcagctgacctggccaacctcaaggcccccaacaaggtctccaccgtgcagggctttggtctgctgttcgccatgttcaaccagaacggcaagttcaaggacgtcaaggcccgccaggccatcatgtacgccatggactacaacaagatctgcgacaacggcatggccaagctggccaccccggccacctgcttcgtgcacaaggcccacgccgactacaagcaggccaaggtggtctacaagtacgacgccgccaaagccaagagcctgctggccgaagctggcgtaaccgagatcaaggtgctggcctccaaccacgactggttctcctccgtgcgcgccatcctcaaggaaaactttgaggccctgggtgtaaagatcagctacgacgagaagaagtcttccgacgtctacagcaccatcgatggcgaccccaacgcttatgacgtgctgatcgcccccggtgacccctcggtcttcggtaacgatgctgacctgctcatgcgctggtggtactccaccgacgtgtggaccgacaagcgtatgcactggaagggcgctgacagctacaccaaggttcaggaaaagctcgacgccgcgctcaagctcaccggcaacgaccagaagaaggcttggggcgagatcttcgacctgctcagcgagcaggtgccgctgtacccgatcttccaccgcaagactcctaccgcttacaacggcgagaccctggttaacttccgtccgatcgcgatcaccggtctgtccttcgagaacgtaggttccaccaagtaaaagctttactagctaagttagccacgctggcttagctagtaagttttagcggccagggtagcttaagtaggcatcacctcttaaagtgcaccctggccgcgcccgctaagggagttgtggccctgtggggtggtttgcttgggttcctgtgtggtgggctggcggcccggctgggtggtttgtgtggtttcgcgtggtgcagctggcggtccggctgggacgttgctggttgggggagtggggcgacggcgtcgtcggccccgcatgtaaagctggcttaaaagctggctggccccaaaccggctaggccgcaaaccagcagaagctagcccaaaccggctagactaaagccaacccaaactgactagcccaaaaccggcaggcccgaagccaactcaacctggcaggccacaagccagcaggcccgaagctggatctgctccagcaaatctcttagtagtctttgccactgtaggcaaacaatcaatagcacttgctattagacatcagatgtccgacaatagacacaacggcggaccacaaacctgccgggcgcacacgtgtcatagaagacgtgaacgcaaaagcaaaggagcaaactcgtgtctaacctgatccgcctaattggccggcgcctaatcgcgctgccattcatggtggttggtgtgaccctgttggtgttcttggtaatgtcgctttctcccgcagacccggccgttctggccctgggagaatcagccagcccagaagcactagcgcagtatcgcaccgctcatcacctagatgacccactatttcaacgattctgggattacctagttaacctctgccagggagacctaggccagtcattcaccggtaatgacattaccgaactagttaaaagcgctttccccatcaccttgcagctaaccttcatcggtatgttcctggcggtaatcatcgccctggtgctgggtatcatcgccgccctttaccgtgaccgctggcccgaccaggtcatccgtgtcatctctattgcctccctggccaccccctccttctggctggcactgctcatgatccagtggtggtcggacgtgcccggaggcaccggcaccttcccctcagtaatcactgagtggatcccattcggagacgaaggctacctacgccaaattaccctgcccgctatcgccgtcgccctacctaactccgggtcactaacccgtgtagtgcgtaccgccatggttgaagaactcgataaagactacgtacgcaccgccattggcgccggcatccccaaaaacattgtggtagcccgcaacgtgctacgtaacgccctaatcaccccgctcaccgtgctgggcctgcgcatcggctacgccatgggtggagccgtggttatcgaaatgatcttcaacatccagggtatgggccagttgatcttccagggcatcacccgtaacgacgtaaacatcgttcagggtgtgtccatcaccgtggccgccgccttcatcatcatcaacatcatcgttgacatgctttacgtactggtcaacccgcgcattaggagcgtgtgagtgatgcgccaccaaaagaaactagacaaggtaactgcccctgcggcgcgcttccaaggatggaaagccatgccgctgggaagcaaaatcgcagtagtggttctggtagcgctcgcgcttatggccatattcgcccccgaacttgctcccttcaaacccggccaaagcggcctggccaccgtagaggaagtagtaaccctcgacgacggcaccgaaaccaacatcaccagccaggctgccccgcctggaggcgacttcatcttcggaaccgacggctcaggtcgtgacgtgctctcccgcatcatctacggtgcgcgagtatcactggtagtaggtatctccgctaccgccctggccctggctgcggctgtagtgcttggcgctatcgccgccaccggccgcaaatggatcgccgaagccttgatgcgcaccctggacgtagtcatgtccttccccgggattgcgctggcggctgtgctggtgctggcgcttagcgccacgctacctacgctgccagtggtggtggtctccattgcggttttgtatgtgccacagttaacccgtgtggtgcgagccaacatcatctcccagttcggagaagactatgtggctgcctccaaggtaatgggtgcctcggtgccctggatcttgttcaagcacgtagctcgcaactgcatcgccccgatcatggttttcgccaccgttttggtggcagacgcgatcgtatttgaggcctcactaagcttcgtgggcgccggcatcaaagccaccaacacacctacttggggcaacatgctctctgaaggtaaggccctgctgctcagcggtcactggtgggtgactttcttccccggtctgttcatcttgatcaccaccttgtgcctgaacgttttgtctgagggcctaactgacgctatggcctctccgcgtatccgttcgcgcgccgacgtcgaagctgacgaagccgccctggaagaagccgctggtgaaggccacggcaaggatggcgagctggtgaccgaaaagagcattttcgagtcctcctaccccgagattcgtcgtcctgaggtgcaagagcacgtatctctaagcgagcgcctaaaccagctgcgcgtctctgagctcaagcgccgcgaccgcctggtttaccccaccccgaagcaggcaccggtgctggaggttaaaaacttgtctattgccttcccggcccagcatggtgacgtcaacattgttgacaacgtgtccttctcggtgcgcccaggtgaaaccatgggtctggtgggtgaatccggttgcggtaagtccatctcctccatggcggttatgggcctgctcccgcccagcgcccgcatcagcggtgaaatcctgttcaagggcaagaacatcttggagatgaccccgcagcagcacaatgacctgcgtggccacgaaatgagcatgatctaccaggacgcgctcagctcgcttaacccctccatgctgatcaaggcccagatgaagcagctaactcgacgcgggggcacccgcagcgctgaggaactgctggaactggtgggtctagacccagtgcgtaccctgcaaagctacccgcacgagctctccggcggtcagcgtcagcgcgtactgatcgctatggccctgacccgtgacccctcgctggtgatcgctgacgagcccaccaccgccctggacgtaaccgtgcaaaagcaggtggttgacctgctcaacaagctgcgtgaagagctcggcttcgcgatggtcttcgtctctcacgacctggcgctggtggccaagctggcccaccgcatcacggttatgtacgccggccaggtggttgagcaggctgaaaccatggagctgctaaccaaccccacccacgaatacacccgtggcctgctcggtgcggtgctctccattgaggctggctccaaccgtctgcaccaggtgcgcggcaccgtgccctcgccgcgtgagtttgtcgacggcgaccgtttcgccccgcgctctagccaccccgaggttgggctacacacccgccctgtactcaagccggttgatggcaaccccaaccacgtgtttgctatcacccctgagcttgaggc

SEQ ID NO: 2529 - DNA, 23453 bp, synthetic construct
  misc_feature 1..23453: note = Synthetic
  source 1..23453: mol_type = other DNA
cggcagacctatggctgtttgtgaccacggcggcgcgctacggcgacgctaccccctggtacaccctggagctggccaacacccgcaacaccaagatcgcggtggtgcttaaccgcatcagcggcccggtgcttaacgagatccgcacagacctgatggagcgcctggcccagatggggctagaccaggcccccttcttcgtggttggcgacgtcggcccccacgaaggcttactgcccgtggagcaggtggctgagctgcgtaattggttgcagctactggccggcaagcaccgcgctgaggggctgctgcgccgcaccgggcgagccgtatgggcctcgctacgtgagcagctaacccgcctggccgacgccgtcgacgagcaatcccaagccgcccacaacctggacactaactgcgcccagctgctgggctcggtaatccacgaatttaacgaggacgtcgagcgcggcaccgccgcccagggggccgtatccacctcctggctggccctagctagctccggcgcaccgctgagcaccctagcccagggacaaaccctcaaaaacggtttctttgggctcaaacgcaagcgccgccagcaggccctagacacgctttcgcaagagtgccgcctggccctaaacgaccgcctagaagccaccatcctggaaggcatcgccaaggttaaattcgcttggggacaggccacgctggaaggtgccggggtagacccgcgcaccagctccgccacagaggttatttctaagtggtacgagggcatcgctgagcccacccaggtgccgcgtgggctaaccgcgtctgccttgaaagacttcctggtggtggccgttaccggggtggtgcgagctcgtgaagctgccacgcgacttgaggtgcaagacgcattagaattggctagcgcccagctgcggactcaggtagaacagacactgaccgcgctttcgcctgatggaagcgctgtagctgtggctcctaccgcgcagttggcggcgtctttacgcctgcgtgccagtgagctgaaacccttcggattgtttggagcgaattgatgatcgacgctgccagccttgataggcggcttgaggaaatgcgctgcgccctggacgcggcccccaacgaggtaagcgcctccttggtaattcctgcccgtcaaggaatggataatgtggctaaacgtctagctttgggcgtagaccacaccgtggcagcgtttttcgggggcaccggttcaggtaaatcctccctgttcaacgccctaaccaagcttgattttgccgacgtgggtgcccgccgccccaccacctcacgtgccgccgcctgcacttggggcgacgacgccaccgccctgctggactttttgggggtagacccgcaccgccgtattaggcgcgagtccattctcgacggcgacgacgaaaactaccttgacggcctggtgctgctggatgtgcccgactatgactcggtaaccaccgcccacgccctgcaggtagaccgcctagtgcccctagctgacctgctggtttgggttgtggacccgcaaaaatatgccgacgccgccctgcacgagggctacctgcgcggcctgggtgcccgccaggaagacatggtggtgctgatcaaccagatcgacaccctacctgcgggcggcacccaagccctgattgacgatgtgcgcgcgctgctgctggcagacgggctggataaggtgcgtgtgattgccgtatccgctaagcgcggggacaacctagaccaggtgcgtgagctattccgccaggtttctgagcgcgaatctaacgctgcccgcactgcttcagctgagctggactctattgctacgcgattgtcggtgagcgtggccgagcgggatgccaccttggatgagccggccaccgccgacttccaggagcaaatgtcgcgtagcgccggcgtgggcgtagtggctgactcgattgctacgggtctacgtaaaattttcccgccctccttggcccgccccgaagctccctcacgagtgagcgtggccgcccaggcatccacttggctgcaccgcaacactgactacctgcctcaggcttgggttaactcggtgcaagatgcggtctctgaccctgaaggcctggtcaccggggtgactgacctggtggcgttggtgcccctgccgcgcccgcgcaagctgctgattgaactgggctggtggctaggctggattgcggtactggccggatttggctggatgttctttaagaatgggggcgtgcccagctacgcgctggtggccgtgggtgtgctctcggctgtggccagttattggctgcgcctgcgccgcgctaaccgggaagccgctgcgtatcgcgatgctgccaggggacgcgttgaccagctggttaaccgcgacatggttaaacccatgcaggcagtatttgcccgccacaaccgcctgcgcgcggctttggcagtggagaaaacccaagcgtagtggggtaaacctgagccatttaaacctgagccagttttaacttcggcggcggccagcattgttgttggccgccgccgctttttctgcgctggttctgggcggtttctggtgggcccgtttgggcggaactgctttgggtaggcaccgcgcgggggcaggcgaggccgcttttgtgcacaggtggggaactttttggccccacggggcttatacacaccggccaagcgggccgcttgctttttggccgatcctagttgcgtcactaaacgatgtgcgcaaaggagaggtaaatgaaccgcgccattgaagtcactgtccagggcaccgtggctaccgccccagtgctaaccaggcaggaaggcaaaaagccctactgccggttccgtgtagccgcctcatatgggcaaatggtgtctggtaactgggttaactacgacactttatggtttaccgccaaggcgtggggagacctagctgagcacttagctcagtcatttaagcgaggcgacccggtgatcttgtgtggcaggctgggggaggaccactggatgcgctctggtcagcgagttagctccatggttttacacctgcactgcgctggccatgatctaactcgcggcgaagcccactacaccagggtggtaatcatccacgacaaggctggtgcctcgggtgaggcgcagctagctgcgcagcgcgctgggggagcgcaggccatgggcggctcgcaggctatgagtggtcctgagaccatgagcgcgccagagcctgctagcgcgccggaagcaatgagcgcgccagaagtcgtcagcgggccggatatccccgtggctggcagtgcgcctgagaccatgagtgggtccgatatccctggggttgccagcgcccctgagagcatgagctcccctgaactggtggttcccagcctggaggcacaagatcagtggagcaccgactacaccctggtctaaaggcctgacccaaaactggccaagttctgcgctaaaggttagaaacacagctttgaccagtccaaatgtggcttggtcagaatatggctaagccagatctaggccaagatcagccgggtgggataccttaaaaacctcaagcagagagcgggtgattatttccgccagcttagctgcatcagtagttttaaaagtcagggcattaggctgggcatcccagcccagcaaagccagctgcataacgtgagctgggcccagcagcagctgttctaggccatctacacgcggagctaaagccgtatagctaagtgcgccctgagtttggtcaaccaaaaccgcaatccccggcttatcgctagaaatcttggctttgcggcgcagcagcttattagctaggccaggcgcggttagctgcgtatctggctcaagcaagggctggcccacgtaaaacactaggcgagcgccggcgtcgacgtcgttacttaaaaaactaaccaaagagggggtaaaccgagcccaagaacccaaatcaatagagtcaactgccttctcactcataagctaatcctaatttagttctgagtgtgactagtctggggtgtgtcactaataggtaacgcgcccttatgcgcgtacggtgagggagtatgcatacttaggagggctcccctatgatccgtttcgaccaagtctctaaggtctacaaacgcggcgccaggccggcgctaaacgaggttgatattgagatcgaacggggggaatttgtattcctagtgggcgcctcaggttcaggtaaatcaactttcctgcgtctagtgctgcgtgaagaacgtcccacctccggctcaatccacgtacttggccgcgacctatcccaggtttccacctggaaggtaccccagctgcgccgcgaaatcggcaccgtgttccaggactttagactcctggaaaacaaaaccgtgctcgaaaacgtggctatcgccccgcaggtgatcggcaagccgcgctactacattcgctcagccgtgcccgaagccctagaactagtgggcctaaaaggtaaggaaaagcgtctaccgcacgagctttccggtggtgaacagcagcgtgtggcaatcgcccgcgccatggttaaccgccccaagctactgctagccgatgagcccaccggtaaccttgacccctccacctcggtaggaatcatgcgtctactagaccggattaaccgccaaggaaccaccgtggttatggccacccacgacgacgaaatcgtagaccagatgcgcaagcgcgtaatcgaacttgaagagggacacgtggtgcgtgaccaggcacgcggtgtctacggctccaaccgctgaggtagttttaatgcgtatcaggtttattttctcccaggttttccagggtctaagccgcaacatggctatgaccgtgtccgtcatcttggtttctttcgtatcgctactgtttgtgggctcatcctcactgctacagatgcagatcagtgccatgaaaggggcctggtatgacaaggttgaggtgtccatctttatgtgcccctcatcctcctcgcaggcgcgctgccccaacggtgaagccacccaggcacagatcgcctcagtagattccttcctacgttcagactcactcaagccctacgtaaagagtttccagatggaaaccaaagcgcaggccttcaaaaacttcaaagccgcctacggcaactcgcccattggccgcaacgccactgaagacatgatgccggtttccttccgcgtcaaactggttgacgccaagcaataccaggtggtggctgagcagttccaaggccgggccggggttgaacgcgtggtagaccagcgggccaccctcgaaccactgtttaaggtgatggatagggcctcatggtttgctgccggcctagccattgtgatggcggtggcagcgttcttactgatcatcaccacgattaaactttcggccatgtcgcgcagcaaagaaacctccatcatgcgcctggtgggtgcctccaacaccttcatccagctgccattcatgcttgaaggtatgctcgcggccctgaccggcgccatcttggcggtaggcgtgctactgctgggtgtgcactacctgattaacgactggctggctaagtccctgtcgatcaccatggccttcattggcacccgcgaggtgctcactgtagcgccgttcttgatgcttggggcgattgtgctggccggaatttcttccatggtttcactctcgcgttacaccaaggtttaaaacatgaaaaagctttcgctttctaaagcaggctcactggtgatggctgccgccgccaccttgagcctaagcctggggctagtgggtcacggcctgccggtggctcacgccgacgagcgcgacgacgcccaatcccagctaaacagcgccaaccagaaagaagcacagctgcgctcctcgctagaaggcgtggacgccaagctgggccaggcctacctggatgcccaaaacgccaacacccagctggctgcggctaaaactgagctggctaaagcccagcagatccaagcccaggccctgcaaacccagcagcaggtaaacacccagctggctagcgcccaggcccagcaggagcagctaaacaagcaggccactaactcctccaaggaagccaatgcttccaaggcggcagtggcctcactggtggtctccacctaccagggcgataactcgctaaccacgctttcttacgtgctgcagtccgattcggtttcgcagatgactgagcgctccaacgtcacccaggtggcctccagcgtgcaggagtcgattttggctgatgccgaagcccagcgcgctaaggacgctaaccgcaaagcccgccaggacgccgtcgccaagcgcatcagcaacctgaaggtgcaggcagacaaggccgcccaggaagccaccgacgccgccaaccaggctgccgccaagcgcaacgaggtctccgctaaagcctcagccgcctcagccgccgcctccaacctggaaacccagaaagccggcttgcaggcccagctagaccaggtttctaaagaccaggccgccgcccaggccaagatcgctaagatcgacgccgccaacgcgcaggctgtggccagcggcagtatgtctaacgtgtcttccagttcggccagatctgactcgcttggtagcggctatattggtcacccaattcctgcgccctggacagtgactagtccctttggttaccgcgtccacccggttaccggcgccgcccaaggccacgccggtacagactttgctgctgactgtaaccagccccaatacgcgccggcagcgggggtagccacctattggtattcggtttcctgcggtatcggcttggatatcaacctcggttacattgacggccactcctacaacatcaccctatgccacatgtctgggcgcgccgtgggtgatggggccagcgtcagccgtggccaggtggttggttacaccggcgccaccggttacgccaccggctgccacgtgcactttgaggtcactcgcgacggcgtcaacattgaccccatgagcctgcctggtttctaagccgcagctcgcgctggcgagcaggactgcgagtgtgcgcctgggctcgccgcgcgctggcaagctttggcgggacgctgaattaattcgcgcaacagccggatgtatcgggtaaactgatgcgtccggctgttttatacacaacgattggaggcgcttatggctaagcaggataaagcaccgaagctgacggccgcccagaaggctaaggctgcctcggatgcccacaagaccattgcccgcaacaagaaggccctacacgactacgccgtcgaggaaaaactcgaagctggcctggccctaaccggcacggaagttaaggcgctgcggatggggcgcgcgtcgctggttgacgcttgggttgagcttgaccgccacggccaagcttggctgcagggtgcgcacatccctgaatactcgcagggctcgtggaacaaccactctccacgccgcaagcggcgtttgctgatgcaccgtcgcgagattgaccgttgggcgtttaaaacccaggccaagggctataccgtggtgccgttggagctgtatttcatcaacgggcgagccaaggttgaggtagctttagcacgcggtaagcaggaatgggataagcgtcaggctttgcgtgaggcccaggacaagcgtgaggctgctcgggcggtagccgcagctcgacgtcgccagggctgagaggctcagttcgcaccccagggctgagggcagctgggggagtgggcagcgatgctagcggcgttagctgagaggctacgcgggcggcgctggctgaaaggtgacgcgggcggcgtcgtcggcactagcaaaccccgctgggactggcgcttttcgggaggctgtgctaaaatgcaattcctgccgtaggcagataactacataggggatgatcggtttcgacgacggtagtggattcagtagaagcgggtcgaggatgagcagtcatctcgttaacgctctgtttcaaaccaataggtgccaataacaaccgcaccgacttcgccctggccgcctgagccagtcgccaagtccgtcagcccgggtttgctttcgccccggtcactggcgtcatttagagagccactgctttaattccttgtcgatgggaattaagggacttttagtcgactgagcctgttccaagcgtcctagtttgcgtgagacgctgaggccgagaaactctttagcaaactgcacccggagaagtcctgttgcattactgtcggaccggggttcgattccccgcatctccaccattagggcgctcattttgatataaagtgagcgtcctttttgtttctaagttgtgggatgcggctgttgctaactgctgactgctgactgctgacgccggtttttgttggagggagcggtaaatgactctgtcaggtaaggcgcaagctaaactgcttaaagcgcgccgtttaatgatcatcgggcttatcgcttcggtgttcggtaactatgttgtcaatgctggcttcagtgcctttgcggcatctgggactatcgcggtttctgctcttgttgctttaaaaacgatcgagcaaatcattgttttcactttcccgttttatgcgcgcatcgttggcaaaatcagcccggacaaggcactaatcactgtagacctgtgtgaagcggcaatgagtgccatcgctctagccgttacgttcctgcagccccagctggcgattggctgcctttttgcctacgtgcttatcgacgcgctgatcgctccggtcagcgatctcgccgatgagttctacggggccgctatcgctaatgtggacgaaaaagcagccttagcttttaacgccacgctctattcttggctcgcatttattggctttgtgattggtgggccgcttggctctttcttcgcctcggtttccattgaggctttattgctgacaaacctggttttgtcgctgtgcggggcgggtttgcggctatttgcgcggaccacgtttgcagctgagccaatccttgacgttgacgatgacgaatacgcagtgactggtagccgcttgccggtaaaagagtttttcaaggatctttttgcctcggggccggcgtctccgctgttatcgctgatgatacgaatcgctagtgcgatgactggtgagttgttcttgctttgggtggcaggggtgtctgctgaacgggcctctcacctgggtgcttttacagggatggggcttgtgttggcggtctttggtgtgggcgccatgcttgggccgacggcggggcgctggctgcgacgtgttggttcggctaaaacggtgcttctggcttccgcgctggtgtcgggcgctattttgctgctgtttggcttatttgagttaactgtgggtagctcgtttattttggccttggggttcgtgcttgccataaccattcttaaccgggcacggatggttgttcttgagacgtttcgccaagcggagtttaagggcacgcgttttgtgcggatcatgagctggtcgtactcgtttggggcgcttgggacgattcttggcttgcagattggttactggctgcacctgtctacgcagccggttgcttgcctgtttattggcgggattttgtgggtcttcataggtgtcatcgtcaacctcaaggtcgcggctcccacagatgcctagcaaagttcctaagttgtagtagcgatccgtgaggtaatggccagcacgggcactgacttagctaggcagagtctgttttttgctgatctagtggttgcaatgcgggtggcgagtgctaccattgtggtgactgattcttaacaagaggccgactcgttagcggtctttggaatgctccgccgggactttttggatttattttcaaaaggtcccggtaattttttgcctcccattacccctgttacgtgccataatgaactatggccgttacgctccccaaagatgatgttcgctataaggtcggtattgatgttggccttaactccattggcttttgtgctgtcgaagtcgatgacgacgattgcccaatcaggctgctcaactcgctagtatttcggcatgatgctggtattgacccagctagccgtaaagccgcactgactcggaaaaatgtttctggtgtggcccgccgtaaccggcgggcgaagcgtgaaactaaaaagcgactagtagcgcttgatcgcttactgtcagaagagtttggttggcccctgcctaaccttgaggattatcccgatccatacgagccttggcatgcgcgcgcccggcttgttgagggttatattgctgatgatgccaagcgtaaagaaatgctgtctattgctatgcggcatattgctcggcacagaggttggcgtaacccttatatgaagcctgcttcgcttgctagtttgccgtatccttctgagtttcttactaaattaaatgaagatacttctcgtgcgattgggcgaaaatttgctgcagaagctacccaaggtcagctggtagatgcattcattttgggctctttgagcttagcagcaacccctgagttacaggtgctagaagagtctgaaaaggataatagtaagaataagccgcgcgatatagtcctaggtagggtgcggggtgataaaggtgttatcgagggtaaacttcaccagagtgataatgccgaagagatccgccgtatttgtgctagtcaagaagttccacaagaccaagttgagcgcctaattgaagctgtctttaaggcaaagaatccgcgtgaagtaggtgcagcctacaaactggtaggccacgatgaactgcctgggcagaaaaaatacattcgtgcagagagagctcatccagctttccaaaagtttaatattgtagctacccttactaacctacgtattaatgaagcgggtagtaaacgcaggctgagttccgaagagctgcaaatgctgacaaattacctgagtaatgttggtcctaaagatgaagttacctggtttgatgtagctgaaaaactgaagattgatcgctctgatctgcagggaactgcacgtgcctcatatgacggtaaagcggctttaaagtaccctccgaaggatgtaacttctgtaagtataaagaagaataaagttaaggctcttaaggactggtggaaacaggcttcagaggaccaacgtgggcaactgattgattacctatctaattcaggtggatcagatacgcctaaaacggatgacgagcttgatgatttaactaagttaacgcagagctttagtgaaaaagatctggaagaactggagaatatttccttacctgctgggcgtgcagcatactcgcttaacagcttgactaagcttactcagctgatgctagaagaggggattgaccttcatgaagctcgcaagcggttgtttaatgtagatgatgactggaaacctactccagagcctatcaattcacccgtaggaaacccagctgtagatcgtgtattgaaacaagtagcacgctggattaatgcagctactgagcgttggggcattccagtatctgtgaatgttgaacatgtgcgtgaagggctggtttcggaaaaagttgttagagaactaatccgagataatgaggctcgccacaagaagaacatggaagttgctgaagagattgctaagcggttagggctatctgggcgtgcgctcaggagtcacactataaaatattttgcactgcgccgccaaaattgtcagtgtctctactgcggcactaaaattagttttggaaccgcagagatggaccatatcgttccgcgaacaaatggtggatcaaacaataaacgttcaaacctggccgcagtatgtagaacatgcaatgctagcaaaagcaacattccttttgctgtctgggtgtcatctggtaaggctgggcctggagtatccttggagggcgctaaagagcgcgtaaattcattgcttctcgaaaaagctgatttgccagaagattatgacgatgattctctcatcgaattttattcgaagaacgaaagtaaaaaattcagaaaagagattattgctcgcctggaatctaagaagccggatgaggaatttgatggccgctcgctagagtctgtggcttggatggctgttgagctgcacgggcgtatcgtgggatattacgaaagccttttgaaagatactggtcaaaaggttcctcaagtaggggtttatcgtggcgctataactgctgaagctaggaaagcttcagggtttgagaatcgagtggagctgcttggtgggaaaggtaagactcgcctagatcgtaggcatcacgcaatggatgccctggttattgcattgatgaaccagtctgtatctaagctgctgtcatggcgtatgcagctgcgtgactcacaacgaatctctgggatgccagagacttggaaagaattccatggttttaaccgtgacgagtatcgtcgttggaatgcttgggctaatgcaatgcgaattgctgtagagctattcaatgatgctttagaaaaagatgaagtatatttcagtgaaaacaagcgccttggtgttagtttggccaaagcgcatgatgacactatcaggtcgctatgtagttacgcgttaggcagagatttttctgttgaactaatcgacagggctgagacgccggcactatggacagcgcttacaaagcaacctgattttgatgttaaaaatgggttgcctgaagattcgacgcgatgcattaccgtaaacggtaaacaatttggccccacggatgaagtaaacttctttgctagtggtgctcctgcgattaaagtgcgcggtggctttgctggtattggtgacactattcatcacgcacgtatttatcgaatcgatggtaagaaaactacctacgctatggtccgcgtgttccaaacagatttgcgtcgtatggagcacgaggatttgttcaccgaacctcttaagccatcaactatctcaatgcggactgcttctaaaactattcgcaaagctcttgcggatggaactgcaacgcaaattggctggttagttgaaggtgatgagattcgtatcgaaacagaccattatccttctgacgatatcggtaaacttcttgatgagtattcagaagcttcgtcctggcgagtttgtggttttccagatgttttaaagattaggctcagaccaaatcttttgtctgaagaaggttttgatgataacactgcagcggccgttcgaaaaatagtgagtggtgctggctggcgtgtatcaatgaatacggtattaagcggtgggttagttacagttatacgtcgtaatgccttgggtgaagaacgctgggtatcgcgggctaatcttccgctctcagtgaatttgagctaaccatggatggagcatggcgagttcttgatttgagtagttttgaaggaacgcttgaatcagatcgtggtggtatcagcgttcacccagaatctggtgaagcagtgcatgtgccagttgctgacttggcaattgtcctagttggtatgggtgccaagctaagcgcatcagttatgcatcggctatgtacagcggatgtagcactactgttctgtgattggcggggtatacctgaaggtggtgcttatagctggtctgaacatgggcgagtggcagccagacatcgagctcaggctgctatgactttgccacgtaaaaagaacgcatgggcacgtctagtacgcgccaaaatcaccggtcaagcggcagtgctagagaatcttaaaattcctggtagcggccagctattggctttggcggataaagtgcgttctggcgatccagcaaatgtagaagcccaagcagctaggttgtattggtctaaaactttagagaccaggcgtatacctggatcaggtgaacgcataggctcaaactcttgcttggactacggctattccgtactgcgcggtcatgttatgcgagctgtgcttgctgctggcttggctcctgcattaggtattttccatcatgataggggaaatgcttttgctcttgccgatgatctgattgagccgtttcggcccgcaatagacgaggtagtttttcagctccctaagacagctagcccaactgatagggaagtgaaaaagatattagttgcagctgctgcacagaaatttagttccgatggccatggcataccggccgtagccgaggctctagcccaaacttttggtcgctacgcggaaggcgttgaagatcgactacaagttactgcttgggcgggtccaactttggttgatttcggcggtgaaaacaatggcggatgacgcaatgtggtgtctagtaatgtttgatcttcctgtggagacaaaagagcaacgtcgcgaagcaactaggtttcgccatgatttactggattggggcttcataatggtccagttcagtgtttatgcgaaatattggcctaccggtgggcaggaccatgctgtgcttcgcgctatcaaaacgcatcttccagagggcgggcaggtgcgtgtgattggcgtgagtgacaaacagtgggctagcgggctccattttcgtaacgcaaagcctcaaaagagcgagtctgcacctgagcagctgatgattttctagccaaaaattcctagaaaacacagtgattgcaaggaaaacctctccctcttaagtctatcaaagggagaggtgactgattcccaacccagcaggcggcgattgaggagcagaagtaagtctatcaaagggagaggtgactgattcccaactgggggtgggtagcttggtgaacaggcgtaagtctatcaaagggagaggtgactgattcccaacaggatccttacgggctttcctcgatttttaagtctatcaaagggagaggtgactgattcccaacctagtagcggcggctcgctgaaatcctgtaagtctatcaaagggagaggtgactgattcccaactgaccaaaacctgcacgtgcgacaaaagtaagtctatcaaagggagaggtgactgattcccaactgccgggctcgttagcgaaaacggcctttaagtctatcaaagggagaggtgactgattcccaactggcagcaggctaataagcggttgctgctaagtctatcaaagggagaggtgactgattcccaactatggggttgacgtacacggcctacaggtaagtctatcaaagggagaggtgactgattcccaaccatctgcccgtagttgtgcgtcaacctctaagtctatcaaagggagaggtgactgattcccaacatgaatatagccactagcattagtcacgtaagtctatcaaagggagaggtgactgattcccaactcaccgtgtctcgcagcgcaccgccctctaagtctatcaaagggagaggtgactgattcccaactgggctgggaggcatccactatcgcctgtaagtctatcaaagggagaggtgactgattcccaactaatcgattgataggagattagatatggtaagtctatcaaagggagaggtgactgattcccaactccatcggatacggcgggagggagaggataagtctatcaaagggagaggtgactgattcccaactccggtatacccggcgtcagtggcgaggttaagtctatcaaagggagaggtgactgattcccaacctcgtgcgcgatctccgtgtcctgtagctaagtctatcaaagggagaggtgactgattcccaacgacgcagaccagcaacgatcacgccacctaagtctatcaaagggagaggtgactgattcccaacacacaccaccctgagccttgcctgcacctaagtctatcaaagggagaggtgactgattcccaacatcctcttgagtgactacgccatcagattaagtctatcaaagggagaggtgactgattcccaacgcaccatcggaggccgggctgacgctggtaagtctatcaaagggagaggtgactgattcccaactatgggcgcatagccaacatgaaaggaataagtctatcaaagggagaggtgactgattcccaacgcttgcgtagcagatcccagttgtgcacgtaagtctatcaaagggagaggtgactgattcccaactagcggccgcgcagctactagcgcgtcataagtctatcaaagggagaggtgactgattcccaactcggcacgccggcaccggcggtccactgtaagtctatcaaagggagaggtgactgattcccaacaaaacctgatccagtctaccggcgctaataagtctatcaaagggagaggtgactgattcccaacactagagccgtccacgctagctagcagctaagtctatcaaagggagaggtgactgattcccaacctccctctgctggcctgggcatagaatctaagtctatcaaagggagaggtgactgattcccaacctgtcagggccgtattccatggggcgattaagtctatcaaagggagaggtgactgattcccaacttctgcggtgtggatgcagttagcgccctaagtctatcaaagggagaggtgactgattcccaactgggtacggcggcctgacgtgcgctgcgtaagtctatcaaagggagaggtgactgattcccaaccccattcagacgcaccgatcaagcggcgtaagtctatcaaagggagaggtgactgattcccaacttaactttgcttggtgcgggcatggtgttaagtctatcaaagggagaggtgactgattcccaatactccgtaaccacgtgctcaactgtaggtaagtctatcaaagggagaggtgactgattcccaaatatcttccagcttgctacaccactagagcactgtaccaggagctgaaacagatgacgtttatagtgaagaaagtggtgcatctaataaatgcatttaaatttaatgtcgcacgctgtttggatatttgatttagaaaagatggtagacaatgcgggactcgcaaggatgccaccccgctagagcaacaaacactttgtggtgctggattattttcagttgtctagttatcggctttgggtgtgctggcggcctacctggacctaaccacctggcccgctgcgccgtcgtcgacgctaaaaccaggggcactaaaagcagatagtcgcaaagcctcagagtctgccgggcccagagctgcgctgcatccctggtttaaagtgagtgcaaccctaaaagtgggctcaacccaaacccactaaccttgcagaaaaccgccagaaaaccgcgccttttgaggccatgtaaaggattacctaaattagggttaacaatctttagtcgtacaaaagcggcgctaacctcttgcgtatttgtatgccctaactaaagctgtgcaccgttggaatttcaaggaaaagtggcaatgattgaattttgcttgcgtcgggctgagcattaatttaacaagcgctgcttcctgcggcgccccggcgcaaaggaatcaaaatggaaactgcacacgtaaccgactgctcggtcagctcctgctcttacaaccacgacggctgccacgctctggccgtgaacgtcaagggggccggctgctccacctttatctccctcaacgagcgcggcggtctggaccgcgtcgtcacctccgtgggtgcttgccagagcgcggactgcgcccacaacagccacctggagtgcaccgccgcttccgtgcgcatgggtgagcgcgacggccaggccacctgtctgacctactccgccgcctgatagctcgcgcttggcttagtgctcagggtgcttggtgtttagggggccaaggcactagggcgcttggcgcgcaaatactgacatttcatcccttccctataaaaccccatggaatttttatagggaagggatgattttgtgtgtaaataggagggtgctgcacaccgttaccattgacaccccggcgggcgagttcaccatgctgggtgataactcgcgcctgtacggggctggttttactggggatttggctcgggttatggcttccatccgggctcttcccgacgacgtgggttgggaaatccgccccggcactaaccatctacttgagcaggcagtagacgccgtcaagcagtactttgaaggaaattttgagccagttgctagcttcccaatttggcagcaaggcactccgtttcgccaccagatttggtctactttgcgccaaactaaggctggacagcgtctaagttacagtcaactagctgacgcatctggttttccaggtgccaccagggccgccgcaaccacctgcgcggttaatagtgtgggactgtttattccttgccatagggtgattagagccgatgggtcgattggtaaattcggctggaatcagcaggtcaaagttgacctgctagagcatgaagcgcgcctggtcagacggccctaacggcgcgggctctggtgctgcaggcctagcctcggaaaatggtattgcaaattcataggtaggccaggcatatggtgtagggccacatgtccaggactggttttgggtgtgccttgctctggcgcgcacaaatactgacatttcatcccttccctataaaaccccatgaattttttatagggaagggatgattttgcctgtatttgcctgacttttacttggagtctaggacgccaaggagaggctggtagtgggtaaccacggcctcgcagtaggcatcggcgtcgccagctactgccgcctcatacatgaaacggtgagcttgggcggttacatgaatatcctccggcgtgggcacacccaaagacggtgaagtaatcatgtgcacctcccaaaaagcatccgttagctgctggaacaggtggttgttaagcggcgccagcaaagcattgtggaaagtgcggtcttgctgggggaaaagctggcccgcttgagacagctgctccatttccaacaaaatctgttccataagcgctgaaggcttatcctgccaagcatcaataaccggctgcgctaaagccaaatccaaagcctggcgcacctgcacaatatcctttaaagcgcgccaatcatcgcccgggtttagcaggcccctaaaagccagtagttccaccatggggcgcatagaaacagaacccacaaacattccgcgcccatggcgcacttcaacaatgtccaaagctgacaaagtacgcaccgcctcgcgcacagatgagcgcgaaacatttaagtcgctgcacatttgcgtctcagtggggagcggatcgccacgctgcaagttgtggctaatgatgtgatgcttaatagcttcaatggccacgcgcgcctgacccaggctggcactaccgcgtgaaacgccgcctgacgtgctagaaagatctataggtgtttgcccaaaaggtgtggagttattagacacgtgcccctccgcgaatggttcgtcattgaattgtgtcctttaaccgtacactcaaaacgcaacttcatggtacagttcatttcaccaacgtcagacataagacgtcaggcatccaggaggatcttcaatgtcgaatcccattcgctcaaccagccgccgtgacttcctcaaagtctccggtaccctaagcctcgccgccggtattgctgcttccctagcagcttgtggtggtggcaccactaagaagaagaaggccggtggcgccactgctgacaccagtaaggctaacaaagatggcgccattgttgcaggtatctcttatgagctaggtaccaacggttacgacccggccaccaccagctcggccctaaccattgctgccaactggcacaccctagagggcctaaccgagctagacccggctgaccgcaccgtctacaacgccctagctaaggaaacccccaagaaggtagatgacaccacctgggaggtcaccctgcgtgacggcgccaagttctccgacggcgctgcggtgaccgttgaagacgttatcttctcctacacccgcgtactcgaccccgagcttaagagcctgtaccgttcgatggttggcttcatcgacaaggtagagaagaaggatgacaagaccatcaccttcaagctaaagcaggctttctccctagttcccgagcgcctaagcatcgtcaagattgttcccaaggccgccgtcgagaaggacgccaagaccttcgacctcaaccccatcggttctggcccctacaagatgaccgacaacggctccgccagccagaaggttgtcttcgagcgcaacgaaaactacaacggcccgcgcccggccctggccaagaccatgacctggcagattctgcccgacccggctacccgcaccaacgccctgacctcggccactgtacaggccatcgactctgtgcccgcagctgacctggctaatctcaaggcccccaacaaggtctccaccgtgcagggctttggtctgctgtttgccatgttcaaccagaacggcaagttcaaggacgtcaaggcccgccaggccatcatgtacgccatggactacaacaagatctgcgacaacggcatggccaagctggccaccccggccacctgcttcgttcacaaggcccacgccgactacaagcaggccaaggtggtctacaagtatgacgccgccaaggccaagagcctgctatctgaagctggcgtaaccgagatcaaggtgctggcctccaaccacgactggttctcctccgtgcgcgccatcctcaaggaaaacttcgaggccctgggcgtaaagatcagctacgacgagaagaagtcctctgacgtctacagcaccatcgacggtgaccccaacgcctacgacgtactgatcgcccccggtgacccctcggtcttcggtaacgacgctgacctgctcatgcgttggtggtactccaccgacgtgtggaccgacaagcgtatgcactggaagggctccgacagctacacccaggttcaggaaaagctcgacgccgccctcaagctcaccggcaacgaccagaagaaggcttggggcgagatcttcgacctgctcagcgagcaggtgccgctgtacccgatcttccaccgcaagactcctaccgcttacaacggcgagtccctggttaacttccgtccgatcgcgatcaccggtctgtccttcgagaacgtaggttccaccaagtaaaagctttactagctaagttagccatgctggcttagctagtaagttttagcggccagggtaacgcttaagtaggcatcgccattaagttgcgccctggccgcgcccgctaggggatttgcggcccggccaggtggtttgcttggtttcctgtgtggttcttgcgtgatgcagctggcggccctgtcgggtggtttctgtgtggtgcagctggcggtccggctgggacgttactgggcaggggagggggacgacggcgtcgtcggccccgcgcgcaaagctggcttaaaggctggctggccccaaaccggttggcgcacaagttagcaggcccgaagccagcccaaaccggcaggcccgaagccagcccaaactgactaaccgacaaatctcttagtagtctttgccactgtaggcaaacaatcaatagcacttgctattagacatcagatgtccgacaatagacacaacggcggaccacaaacctgccgggcgcacacgtgtcatagaagacgtgaacgcaaaagcaaaggagcaaactcgtgtctaacctgatccgcctaattggccggcgcctaatcgcgctgccattcatggtggttggtgtgaccttgctggtgttcttggtaatgtcgctttctcccgcagacccggccgttctggccctgggagaatcagccagtccagaagcgctagcgcagtatcgcaccgctcatcacctagatgaccccctatttcaacgattctgggattacctagttaacctctgccacggagacctaggccaatcattcaccggtaacgacattaccgacctagttaaaagcgctttccccatcaccttgcagctaaccttcatcggtatgttcctggcggtaatcatcgccctggtgctgggtatcatcgccgccctttaccgtgaccgctggcccgaccaggtcatccgcgtcatctctatcgcctccctggccaccccctccttctggctggcactgctcatgatccagtggtggtcggacgtgcctggaggcaccggcaccttcccctcagtaatcactgagtggatccccttcggagacgaaggctacctacgccaaatcaccctgcccgccatcgccgtcgccctacccaactccgggtcactaacccgtgtagtgcgtaccgccatggttgaagaactcgataaagactacgtacgcaccgccattggcgccggtatccccaagaacattgtggtagcccgcaacgtgctacgtaacgccctaatcaccccgctcaccgtgctgggcctgcgcatcggctacgccatgggtggagctgtggttatcgaaatgatcttcaacatccaaggtatgggccagttgatcttccagggcatcacccgtaacgacgtaaacatcgttcagggcgtgtccatcaccgtggccgccgccttcatcatcatcaacatcatcgttgacatgctttacgtactggtcaacccgcgcattaggagcgtgtgagtgatgcgccaccaaaagaaactagacaaggtaactgcccctgcggcgcgcttccaaggatggaaagccatgccgctgggaagcaaaatcgcagtagtggttctggtagcgctcgcgctcatggccatactcgcccccgaacttgctcccttcaaacccggccaaagcggcctggccagcgtagaggaagtagtaaccctcgacgacggcaccgaaactaacatcaccagccaggctgccccgcctggaggcgatttcatcttcggaaccgacggctcaggtcgtgacgtgctctcccgcatcatctacggtgcgcgagtatcactggtagtaggtatctccgctaccgccctggccctggctgcggctgtagtgctcggcgctatcgccgccaccggccgcaaatggatcgccgaagccctgatgcgcaccctggacgtaatcatgtccttccccggtattgcgctcgcggctgtgctggtgctggcgctgagcgccacgctacctacgctgccagtggtggtggtctccattgcggttttgtatgtgccacagttaacccgtgtggtgcgagccaatatcatctcccagttcggagaagactatgtggctgcctccaaggtaatgggtgcctcggtgccctggatcttgttcaagcacgtagctcgcaactgcatcgccccgatcatggttttcgccactgtcttggtggcagacgcgatcgtat

SEQ ID NO: 2530 - DNA, 21068 bp, synthetic construct
  misc_feature 1..21068: note = Synthetic
  source 1..21068: mol_type = other DNA
gacgatggcttcggtctttagcctcgccgttggttcctcaagtcccgcaattttttaggtatgcattttccgcccgaagtttctccacttcacggagaagtctgtcttcctcggtcaacagtgcaggcttcgcagagcctttcggtcgtcccttcggtttggacctaagcgcttcatcaccgtctttgcgccacttactcacccagtctttgacctgttgaggtgaggacagttcaaattccttcgccaggtccatgcgtgtttcgccagcgaggaaacggttgaccacttcctgtttgacctcgaaggagtattgcttcttggttggtttctccacaagacatagcctgccatgtagaaaccagcgacgatacaggctacgagccgggtcgtgccggaccccaatccgacttgccgcagccgcaaaacccaagtcttgctcaaataggccaacgagctgttctcgttgttcctctgacagagaacttcgtgctctcatagaaacactccccattagtcggtgtctgatttctcagtccaactaaaggggagcagttcagtattttggaccgtaggggcgtcgtgtttatccataacaatcaagttgcttggacttgccttcccatgcagagcgaatagggtggcgttagcggccatagtagtgaaatgggttaccatgactatttaagtgtctgagattgagcatcttggttgtatatctgctcagctttactcacgcattcaagaaggacggctgcagcgccccagaggatgaccacccaagccgcgtatagcgacaccattcccacgttgtatccggggctatgcatccaggttgcgagacagagaaccatcagtcctatgagaccaattaagattccggcgataactgccaagatagctaagaggtttactggcaatgtcaggatacggatcagtagtcgtgaacgtgccacatgtgcgatattcagagcgatcagacaccccatcacccaaaatgaggcctggtacggaagcttagcggtcgtcgagtatgttgtgacggtcatccatagctgcgtccatgtgaatgagctcccgtcagcaatatttcttccggctgcgtctgacacgcccatagcatgagccagtgtaaagcctgagtaaacgagtgctaccagcagtggttgaacagtacgtctgtaggggatggtatgccggtcatggctgtattctctcaaatttgacaacagactgagtgcttttaatgaaccttactgcatctggttctgctctgcgcagcacctgtttcgtcagcgggtcacagaatatttttgcgccaagtcagtttagatacttggacttatctgcccatgcagagcggctagggggcggcatttaccaatgttcaaaaattttagtaattccccagctcagcggtgttgtggcgctctatcgtgagcgtcttaacggagatgactgctgaagtgtgcatagggcacccaagataagggatcaactgcgtaccgagaatccatacgaagtttatcgacggcgtcagttatggcctgtgccactgccggagcaaaggtcttatctacaggttctgcggtgatgtctgcatatagggtcgttacgaaaggcacaaccgagtcgtctcgtaccggtaaggtggcggccacgacctccttaaatccggcctgctgcgccgccccagctacatgcagggcctcattaggcgtcataaaatcacctgacgctgagttgcaggttagaagaaccgctaactggcccttgtctgcacgactcgctgccagatcacggagcgtgaaccgaccgtcgaataggtcgattccagcctcgaatgaatcattccggtctagccagccgtgcgcacttacgtggagcagagtgcattctggtagtgcagcgcggaaggcagaaatcgtggcgttatcatcaaagaggtggtttatgtgtgcctgtggtagtgcattatcgataacctgacgctcatcctccagagatatgagctgttcagaggggtctaccgatacgtgaagtacagtatccaggggcccgttctctgtttcgggatgcgaatcaatcagtagaattgttggcaggtatgtcgaaatcacccgctcgtgcatgttgggccattttgatgggtcgtttttacgctgattaatctgcggtttcctacgagggtgaataccggcggcgtgtacaggtagaagagagaactctccaagcgatgaccaccatacgtgcgggcgctcttctgcggtagtgatccgctccagaataggggcagttacattttcccagagccaccctaggcaatcaaagatcgcatctgattcagagccataggtacatccgttatcggtaattttggcctgaagcttttccacctgctctcgcaactgtccctttgatgctttcgggagatggatcagcaacggttcagcatccccctttagaattagcgctaatgacttttcctcccctggagcaagcaggacaatcggaccgtcagcgccgaggccctggtacgcataaggatcaggcactgtttgtccgagctctgcttcaccctcatgggcccgaagtcgtagctgctcatctggacgcatgttagaccgtcgtctgtcactctctacattactaatgaaaccggagagtgacgcccactgttcgtcttccttcttttctgccagtgaccgagcttggagaccctggcgccacaggactgatcggacatgatcagcccaggcaaaagcttcgagacgtcgctgattagctgcatgcgcaacggcatgctccagcacttcctgcatgtcagtcaacagtttgcgacgttccctgagggggagtccgatccatgctacctgtgtggtcaaggaaacggctcgtttgaatgctttgaatgcctcttcgtaatcccctatcacttccgcgtcacgggcccagcgggcggactgcctgaatttttctgccggggtgatcccctcaagcagagcagcttgtcgctgtacctcaagtgtcttctgggattgagatacgccgggtaccaggtgttcgagccaacgcagagactgagctaggttagacagagctggcaggagatgagcatcgctagaccccgcagcagcaactgcctcctgagctgttgtgaccgcactttttgcatcctcgagtgctaagttatggtgcccgccttcttgaaacatcagtgaccgctgcaggtacgcgtcagataggttcgagattcgataggctcgatctgggtgagacgttggcagtagctctatggagcgctccatgtgcagcagggcttgatccatgtcgtccattgatcctgtgtcctgtgcacgcgcagccaaggcaattccgatgtttgttgcatacacagaagcttcagttggtcggttctctgatagcaccagcgcctcgttgaaccacttgattgcttcggttagatccgctggcttatggtcacgctcataccgctcggacagtgcattggccaagttgttcacatagtctgcgtagtctagttcatcgaactttaaggctgttgcagcttgttgggcaaggtcgatagcttcgtcgagatcttgtgagttctcggtatctcggtaccggtcacgtagagctactgccaagttgttcctacgtagggcaatgtagctagctacaggttcaggtagggacagcgcctggcggtatagctcaatagcatgatctagctggctcctatcggcgcgctcttcgaagtcatctgacaggagcacagcgaggttagccaggcgtgcgactcgcgctggatgctgtttcggcgtcagagctagggcttcttcagcatgtttgagtgcctcatccaaatcacttagagagccggtttcacgatagcggtcgcgctgtacgttacccacggcagcgagtgctctcgcgcgatacaagtcaggatccgagaacagttcaagtgctttgttgccctgggtgagggcttcgtcgagcagcgcagagtcaggattcagctcattggcctcccggcaggcaaacaccaggtctaccattgctataccctgatcttgtgatccctcggctgcgatatcgatagcttcccggtgcatgctgagggcctcatcgatcaggcctagatccgagtcgctcttgacagtttctaagagggctgaagccgtgctcgttaggatgacggggcgatctgagtcgtcgtcgggaattcgtttcagtgccttacgacccaggcagaccgcttccttaatgtggtctgggtttccgctctcgcgtgaaagacgtttgagtaaattaataaggtcggctgtgtagccgggatgatcacagtggttgattccaagaaggtctaggccatcccgcatgtgttcgatagcctcttcgagaagactctcgtcgggtgcaatgtcgtgtaggccttccaaggctgtcgcgagaatgaaatgggcgttggctttatcttcaagggttgctgcctctgctacggcttggttcccccaggccaaaacacgtcgaagttcttcctgtgacgcccctgcatggcttaggaccagcgcgaggtttgcctcgattccttgtttggcatcttcgtccagctgaccagatgcaagggctgactcccagagggttatggcccgttggcgtactggctcaggtacaccagcggcgtccccctccattagtcctgtggcaaggttggcctggcactcggcgatgagtcttgagtctgttccgtcttcttctgccttttcaagggcagtctcaagcaactccacaaatagagcgaggtcctttgggtcatatttttcatcgaaccgatcccatatcataagagctacgtcatgtaggtgagtagcagatgagcggccctgtcgttctacgaccgacataccacgactgattgcctcgttcaggtagttgggatcgcctttgtctaggaatcgccggtatagcgcatctgctatgtaccagtgacgatcaatccaatccggatcatcgttgggtaggctgtctacttccctcatcatcattatccaatgaggcttcctcgtcctttgacagcatctcatccacatagttagtataattagcacctttcttgacatagttgtttcgcaaggaggaaaaatgagattttttaagtcttctcatagcaattctgaggaacttccgtactgtccgtccgcttcagaagaaattgacaaacaagcggccaccctctttaacggccctaacacccgtgtcgtttgttgcgacactattgatgtcccctccgttactatcaatgggccgtgtccgcgttgtggacacgttttcagtcagacacagcagcttgacctcgcacctcttgtaaaacgtggctcaggcaataaacaaaaggggatcgttcgagaggtagattttctctgtgaatgtggggttacccatccgggtgttccttgtggggagaacggatgtggggcaagcttcaggcttactatccccaactaagagatttgagatagtggttctgatgcaacccgaagattcacccaaagagcgtaggcgtccctccaattctgatctgcggttaatacaggagctgcaacgaaaagagcctgatcaggttagggcggaagctcgtgtttggcgtaacggctacacacttcttctcacaggaactggtgctgtcttgacgttggctgcccctcgcttagggagtgcctcttggccgtggcgtctggctttgtctctctcttttggtgtggggattttgttgcttgctgtggcgttgtggcttgttctcaatgtagagggcggtgaacataaacttctacgtggattcagccttgattctattctgggcaaatacggctcagtgcaagcgttcctcctggaccaagctgcccaagtacgcaaacgtattcgtcgttccaagatatgggccaagttaggtgcgttggctgtgttcattggccttatgttgaccttatggataccctcataatggcttagctgctgcggttagcgatgccgaaagataatgacaggtaggggaggagcggtaaatgactttgtcaggtaaagcgcaagctaaactgcttaaagcgcgccgtttaatgatcatcgggcttatcgcttcggtgttcggtaactatgttgtcaatgctggcttcagtgcctttgcggcatctgggactatcgcggtttctgctcttgttgttttgaaaacgatcgagcagatcattgttttcaccttcccgttttacgcgcgcatcgttggcaaaatcagtccggacaaggccctaatcactgtagacctgtgtgaagcggcaatgagcgccatcgctctagccgtcacgttcttgcagccccagctggcgattggctgcctttttgcctacgtgcttatcgacgcgctgatcgctccggtcagtgaccttgctgatgagttctatggggctgctatcgctaatgtggatgaaaaagcagccttagcttttaacgccacgctctattcttggctcgcatttatcggctttgtgattggcgggccgcttggctctttcttcgcctcggtttccattgaggccttattgctgacaaacctggttttgtcgctgtgcggggcgggtttgcggctatttgcgcggaccacgtttgcagctgagccaatccttgacgttgacgatgacgaatacgcagtgactggtagccgcttgccggtaaaagagtttttcaaggatctttttgcctcggggccggcgtctccgctgttatcgctgatgatacgaatcgctagtgcgatgactggtgagctgttcttgctttgggtggcaggggtgtctgctgaacgggcctctcacctgggtgcttttacagggatggggcttgtgctggcggtctttggtgtgggcgcaatgcttgggccgacggcggggcgctggctgcgacgtgttggttcggctaaaacggtgcttctggcttccgcgctggtgtcgggcgctattttgctgctgtttggcttatttgagttaactgtgggtagctcgtttattttggccttggggttcgtgcttgccataaccattcttaaccgggcacggatggttgttcttgagacgtttcgccaagcggagtttaagggcacgcgttttgtgcggatcatgagctggtcgtactcgtttggggcgcttgggacgattcttggcttgcagattggttactggctgcacctgtctacgcagccggttgcttgcctgtttattggcgggattttgtggggctgcataggtgtcatcgtcaatctcaaggttgcggctcccgcagatgcctagcaaagttactaagttgtagtagcgatccgtgaggtagtggctatgggacccgctgacttagctaggtagaatctggcttttgactgatctagtggttgcaagcgggctctaaatggtactattcaagagctctattctcaataagaggtcgactcgttagcggcctttggaatgctccaccgggacttttcggattcgttttcaaaaagtcccggtaattttttgcctcccattacccctgtgaagtgccataatgagttatggccgttacgcttcccaaagatgatgttcgctataaggtcggtattgatgttggccttaactctattggtttttgcgctgtcgaagtcgatgatgacgatcagcccatcagactgctcaactcgctagtatttcgccatgatgctggagttgacccatctgctcaaaaaagttcactgacccgcaagaagatttccggagtggcgcgtcgtaaccggcgggcgaatcgtgaaacaaaaaaacgcctagtagcacttgatcgcttactgtcagaagagcttggctggcccctgcctaaccttgagagttatccagatccgcacgagccttggcacgcgcgcgcttggcttcttgagggttatattgctgatgatgtcaagcgcaaagaaatgctgtctattgctatgcggcatattgcgcggcaccgaggctggcgtaatccttatatgaagcctgcttcgcttgctagtttgccgtatccttctgagtttcttactaaactaaatcaagatgtatctcgtgtgatcgggaaagaatttgctgcagaagccacacaaggtcagctagtagatgcgtttattttgggctcttcgagcttagctacaacccctgcactgcaggtgttagaagaatctgaaaagaatagcggcgagaataatctacgcgatataatcttaggtaaagtacgtggcgataaaggtgttatcggcggcaagcttcaccaaagtgataatgctgaagagatccgccgtatttgtagtgctcagaaaatttcacaagagcaagttcagcgtctaattgaagctgtctttaaagcaaagaatccgcgtgaggtgggtgcagcctacaaactaataggtcacgatgaactgcctggccaggaaaaatatattcgtgcagagagagctcacccagctttccaaaagtttaatattgtagctactcttgctaacctacgtattgatgaagcaggtagtaaacgcaggcttagttccaaagagctgcaaacgctgacaaattacctgagtaatgtcggtactaaagatgaaattacctggtttgatgtagctgaaaaactgaagattgagcggtctgatctgcagggaaccgcacgtgcctcatatgacggtcaagcggctttaaagtaccctccaattgatgtaacttctgtaagtataaagaagagtaaagttaaggctcttaaggactggtggaaacaggccttagaagaccaacgtgggcaactgattgattatctgtctaattcaggtggctcggatactccccaaacggatgatgaactagatgctttaactaagttgatacaaaactttaatgaaaaagatttggaagaattagagaagatttccttaccagctgggcgtgcagcatactcgcttaacagcttgactaagcttactgagctgatgctagaagaaggcattgatcttcacgaagcgcgtaagagactatttaacataggtgatgactggaaacctactcctgaacctattaattcgcctgtgggaaaccctgctgtagatcgtgtattgaaacaagtggcacgctggattgatatgtccacagaacggtggggcattccagtatctgtgaatattgaacatgtgcgtggagggttaacttccaataaagttgctaaaaagattattaaggaaaaccaggctcgcagagagaagaaggacaaagttagggaaaagctcgctaaacagccagggttatctgggggtgcaaaagataatctcattaaaaaacagtttgcaatacagcgccaaaattctcaatgcctttactgtggtactaagcttgaatttgaggaagcagaaatggaccatattgttccgcgaacaaatggtgggtctaacaatagacgcacaaatttagctgcagtttgtaaagactgtaatttgagcaagagcaatactccctttgctatttgggtgtcatctgataaggttggacctaaggtctcctgggagggagttaaagagcgtgtaaattcattgcttctcgaaaaagctaatttgccaggagattatgacgatgattctctcatcgaattttattcgaagaacgaaagtaaaaaattcagaaaagagattattgctcgcctagaatctaagaagcccgaggaggaatttgatggccgctcgctagaatctgtggcttggatggccgttgagctgcatgggcgtgtcctgggatattatgaaagtctcttgaagaatactggtcgggaggttcctcgagttggggtttatcgtggtgctataaccgctgaagctaggaaagcttcaggatttgagaatcgagtgcggctgcttggttgggaaggtaagactcgcctagatcgcaggcatcacgcgatggatgccctgtttattgcattgatgaaccagtctgtatctaagttgctgtcatggcgtatgcagctgcgtgactcacaacgaatctctgggatgcaagagacttggaaagaattccacgggtctgaccgtgatgataatcgtcattgggaggcttgggctaaagcaatgcgaattgccgtagagctattcaataatgctttagaaaaagatgaagtacatttcagtgaaaataaacgccttggtattagtttagctaaaacgcatgatgatactatcaagtcactatgtagttacgcgttaggtggagccttttctgttgaactaatcgatagggctgagacaccggcactatggacagtacttaccaagcaacctgattttgatgttaaaaatgggttgcctgcagattcgactcgacacattactgtaaacggtaaacattttggtcccaccgataaagtaaacttctttactagcgacgcccctgcaattaaggtacgtggcggcttcgctggtattggtgacactattcatcacgcacgtatttatcgaatcgatggtaagaaaactacctatgctatggtccgcgtgttccaaacagatttgcgtcgtatgaagcacaaggatttgttcaccgagcctcttaagccatcaaccatctcaatgcggactgcttctaaaactatccgcaaagctcttgcagatggaagtgcaacgcaaattggctggttagttgaaggtgatgaaatacgtatcaagacggatcgttacacttcatttactataggtaagctacttaagaaatatccagaagcttcatcctggagagtttgcggttttccgactccgtcaaaggttaggcttaagcctaacctaatatctaaggaaggtcttaacgaaaaatattttgactccgatacgctagaagctggcagaaaaataatagatcatcctggctggatagtggaaattaatactttgttggaaaagggaatggttaccgttatacgtcgtaatactcttggtgaggaacgttgggtgtcgcgggctcatcttccagtctcagtgaatttgagctaaccatggatggtgcatggcgagttcttgatttgagtggttttgaaggaacacttgaatcggatcgtggcggcatcagtgttcaccctgaatctggtgaagcagtgcatgtgccagttgctgacttggcaattgttctagttggtatgggtgccaagctaagcgcgtcagttctgcatcggttatgtgcagcggatgtagcgctactgttctgtgattggtgaggtattcctgaaggtggtgcttatagctggtctgaacatggtcgagtggccgcaaggcatcgagcccaggctgctatgactttgccacgtaaaaagaacgcatgggcacgtctagtgcgcgccaaaattactggtcaagcggcagtgctagagaatcttaaaattcctggtagcggccagctattggctttggtggataaagtacgttctggcgatccaggaaatgtagaagcccaagcagctaggttgtattggtctaaaactttagagaccaggcgtatacctggatcaggtgaacgcatcggctctaattcttgcttagactacggctattccgtattgcgtggtcatgttatgcgagctgtacttgctgctggcttggctcctgcactaggtattttccatcatgataggggaaatgcttttgctcttgccgatgatctgattgagccgtttcggcccgcaatagacgaggtagtttttcagctccctaagctagctagcccaactgatagagaagtgaaaaaggtattggttgcagctgctgcacagaaatttagtgccgatggccatggaatcccagctgtagctgaggctctagcccaaacttttggtcgctacgcggaaggcgttgaagatcgactacaggttactgcttgggcggggccaactttggttgatttcggcggtgaaaacgatggcggatgacgcaatgtggtgtctagtaatgtttgatcttcctgtggagacaaagaaacaacgtcgtgaagcagctaggtttcgccatgatttactggattggggattcataatggtccagttcagcgtctatgcgaaatactggcctaccggtgggcaggatcatgcagtgcttcgcgctatcaaaacgcaccttccagagggtgggcaggtgcgtgtgattggcgtgagtgacaaacagtgggctagcgggctccattttcgtaacgcgaagcctcaaaagagtgagtctgcgcctgaacagctgatgattttttagtaaaaagttcacagaaaacccagtgattacaaggaaaacctctcccttgaagtatatcaggggggagaggtgctctattcccaacagttcctaagttgtagtagcgatccgtgaagtatatcagggggagagatgattggtatccaacccgctgcggaaccggctgaggtaaaacctaagtatatcagggggagaggtgattgattctcggttatcttccagattcgaagtgtttaaatttaataccacacactgtttgggtatttgatttagaaaatatggtagacaatacaggaatcggcaaggaagtcatcctgctacagcagcccgctctctttgtggtgctggattattttcagttgtctagttatcagcttcaggtgtgttaccctcctacctggccttaaccacctggcccgctgcgtcgtcgtcgacgctaaaaccaggggcactaaaagcagatagccgcaaaccctcagagtctgccgggccagagctgcgctgcatctctggcttaaagtgagcgaaaccctaaaagtgagcgcaaccccaaacccactaaattttgcagaaaaccgcgccttttggggccatgtaaaggattacctaaattagggttaacaatctttagtcgtacaaaagcggtgctaacctcttgcgtatttgtatgccctaactaaagtcgcgcaccgttggaatttcaaggaaaaatggcaatgattgaattttgcttgcgtcgggctgagcattaatttaacaagcgctgcttcctgcggcgccccggcgcaaaggaatcaaaatggaaactgcacacgtagccgactgctcggtcagctcctgctcttacaaccacgatggctgccacgccctggccgtgaacgtcaagggtgccggctgctccaccttcatctccctcaacgagcgcggcggtctggaccgcgtcgtcacctccgtgggtgcttgccagagcgcggactgcgcccacaacagccacctggagtgcaccgccgcttccgtgcgcatgggtgagcgcgacggccaggccacctgcctgacctactccgccgcctgatagcccgcgcttgactcagggctcagtgttcagggcgcttggcgcacgggggtgcttggctcgttagggcgcttggtgcgcaaatactgacatttcatcccttccctataaaaccccatggaatttttatagggaagggatgattttgtgtgtaaataggagggtgctgcacaccgttaccattgacaccccggctggcgagttcaccatgctcggtgacgactcgcgcctgtacggggctggttttactggggatttggctcgggttatggcttctattcgggctcttcccgacgacgtgggttgggaaatccgccccggcgccaaccagctacttgagctggcagtagacgctgtcaagcagtactttgaaggaaattttgagccagtggctagctttccaatttggcagcaaggcaccccgtttcgccaccaggtttggtctactttgcgccaaaccaaagctggacagcgtctaagttacagtcaactagctgacgcatctggttttccaggtgccaccagggctgccgcaaccacctgcgcggttaatagtgtggggctgtttattccttgccatagggtgattcgggccgatgggtcgatcggtaaattcggctggaatcagcaggtcaaagttgacctgctagagcatgaggcgcgcctggccgggcagcaggcctagcggcagaggcttgggctctagcggcgttgggattagaagtcagaccagcagaaatgttgggcctgggggagtggcatcagaggcttgggctctagcggcttgagcctctgctgcggcggcaagctctgcaaattcataggcaggccaggcatatggtgtagggccacatgtccaggactggttttgggttggccttgcaggctggcgcgcacaaatactgacatttcatcccttccctataaaaccccatgaattttttatagggaagggatgattttgcctgtatttgtttgattttgggtacttttacttggagtctaggacgccaaggagaggctggtagtgggtaaccacggcctcgcagtaggcatcggcgtcgccagctactgccgcctcatacatgaaacggtgagcctgggcggttacatgaatatcctccggcgtgggcacacccaaagacggtgaagtaatcatgtgcacctcccaaaaagcatcggttagctgctggaacaggtggttattaagcggcgccagcaaagcattgtggaaagtgcggtcttgctgggggaaaagctggccagcctgagatagctgctccatttccaacaaaatctgttccataagcgctgaaggtttatcctgccaagcatcaataaccggctgcgctaaagccaaatccaaagcctggcgcacctgcacaatatcctttaaagcacgccaatcgtcgcccgggtttagcaggcccctaaaagccaatagttccaccatggggcgcatagaaacagaacccacaaacattccgcgcccatggcgcacttcaacaatgtccaaagctgacaaagtacgcaccgcctcgcgcacagatgagcgcgaaacatttaagtcgctgcacatttgcgtctcagtggggagcggatcgccacgctgcaagttgtggctaatgatgtgatgcttaatagcttcaatggccacgcgcgcctgacccaggctggcactaccgcgtgaaacgccgcctgacgtgctagaaagatctataggtgtttgcccaaaaggtgtggagttattagacacgtgcccctccgcgaatggttcgtcattgaattgtgtcctttaaccgtacactcaaaacacaacttcatggtacagttcatttcaccaacgtcagacataagacgtcaggcatccaggaggatcttcaatgtcgaatcccattcgctcaaccagccgccgtgacttcctcaaagtctccggtaccctaagcctcgccgccggtattgctgcttccctagcagcttgtggtggtggcaccactaagaagaagaaggccggtggcgccactgctgacaccagtaaggctaacaaagatggcgccattattgcaggtatctcttatgagctaggcaccaacggttacgacccggccaccaccagctcggccctaaccattgctgccaactggcacaccctagagggcctaaccgagctagacccggctgaccgcaccgtctacaacgccctagctaaggaaacccccaagaaggtagatgacaccacctgggaggtcaccctgcgtgacggcgccaagttctccgacggcgctgcggtgaccgttgaagacgttatcttctcctacactcgcgtactcgaccccgagcttaagagcctgtaccgttcgatggtcggcttcattgacaaggtagagaagaaggatgacaagaccgtcaccttcaagctaaagcaggctttctccctagttcccgagcgcctaagcatcgtcaagattgttcccaaggccgccgtcgagaaggacgccaagaccttcgacctcaaccccatcggctctggcccctacaagatgaccgacaacggctccgccagccagaaggttgtcttcgagcgcaacgaaaactacaacggcccgcgcccggccctggccaagaccatgacctggcagattctgcccgacccggccacccgcaccaacgccctgacctcggccactgtacaggccatcgactctgtgcccgcagctgacctggctaacctcaaggcccccaacaaggtctccaccgtgcagggctttggtctgctgttcgccatgtttaaccagaacggcaagttcaaggacgtcaaggcccgccaggccatcatgtacgccatggactacaacaagatctgcgacaacggcatggccaagctggccaccccggccacctgcttcgtgcacaaggcccacgccgactacaagcaggccaaggtggtttacaagtatgacgccgccaaggccaagagcttgctatctgaagctggcgtaaccgagatcaaggtgctggcctccaaccacgactggttctcctccgtgcgcgccatcctcaaggaaaacttcgaggccctgggcgtaaagatcagctacgacgagaagaagtccgctgacgtctacagcaccatcgacggtgaccccaacgcctacgacgtactgatcgcccccggtgacccctcggtcttcgggaacgacgctgacctgctcatgcgctggtggtactccaccgacgtgtggaccgacaagcgtatgcactggaagggttctgacagctacaccaaggttcaggaaaagctcgacgccgccctcaagctcaccggcaacgaccagaagaaggcttggggcgagatcttcgacctgctcagcgagcaggtgccgctgtacccgatcttccaccgcaagactcctaccgcttacaacggtgagtccctggttaacttccgtccgatcgcgatcaccggcctgtccttcgagaacgtaggttccagcaagtaaaagctttactagctaagttagccacgctggcttagctagtaagttttagcggccagggtagcgcttaagtaggcatcgccattaagttgcgctctggccgcacccgctaggggatttgcggcccggccaggtggtttgcttggttccctgtgtggttcccgtgtggtgcagctggtggcccggctgggacgttgctgggcgggggagggggcgacggcgtcgtcggccccgcgcgcaaagccggcttaaaagctggctggccccaaaccggctggtctgaagcagcccacaagccagcaggcctaaagtcagtccaaaccggcaggcccgaaaccagcagactcaaagccagcaaatctcttagtagtctttgccactgtaggcaaacaatcaatagcacttgctattagacatcagatgtccgacaatagacacaacggcggactacaaacctgccgggcgcacacgtgtcatagaagacgtgaacgcaaaagcaaaggagcaaactcgtgtctaacctgatccgcctaattggccggcgcctaatcgcgctgccattcatggtggttggtgtgaccttgctggtgttcttggtaatgtcgctttctcccgcagacccggccgttctggccctgggagaatcagccagtccagaagcactagcgcagtatcgcaccgcgcatcacctagatgaccccctatttcaacgattctgggattacctagttaacctctgccacggagacctaggccaatcattcaccggtaacgacattaccgacctagttaaaagcgctttccccatcaccttgcagctaaccttcatcggtatgttcctggcggtaatcatcgccctggtgctgggtatcatcgccgccctttaccgtgaccgctggcccgaccaggtcatccgcgtcatctctatcgcctccctggccaccccctccttctggctggcactgctcatgatccagtggtggtcggacgtgcccggaggcaccggcaccttcccctcagtaatcactgagtggatccccttcggagacgaaggctacctacgccaaatcaccctgcccgccatcgccgtcgccctacccaactccgggtcactaacccgtgtagtgcgtaccgccatggttgaagaactcgataaagattacgtacgcaccgccattggcgccggcatccccaagaacattgtggtagcccgcaacgtgctgcgtaacgctctaatcaccccactcaccgtgctgggcctgcgcatcggctacgccatgggtggagccgtggttatcgaaatgatcttcaacatccaaggtatgggccagttgatcttccagggcatcacccgtaacgacgtaaacatcgttcagggcgtgtccatcaccgtggccgccgccttcatcatcatcaacatcatcgttgacatgctttatgtactggtcaacccgcgcattaggagcgtgtgagtgatgcgccaccaaaataaactagacaaggtaactgcccctgcggcgcgcttccaaggatggaaagccatgccgctgggaagcaaaatcgcagtagtggttctggtagcgctcgcgcttatggccatactcgcccccgaacttgctcccttcaaacccggccaaagcggcctggccagcgtagaggaagtagtaaccctcgacgacggcaccgaaaccaacatcaccagccaggctgccccgcctggaggcgacttcatcttcggaaccgacggctcaggtcgtgacgtgctctcccgcatcatctacggtgcgcgagtatcactggtagtaggtatctccgctaccgccctggccctggctgcggctgtagtgctcggcgctatcgctgccaccggccgcaaatggatcgccgaagccttgatgcgcaccctggacgtagtcatgtccttccccggtattgcgcttgcggctgtgctggtgctggcgctgagtgccacgctacccacgctgccagtggtggtggtctccattgcggttttgtatgtgccacagttaacccgtgtggtgcgagccaatatcatctcccagttcggagaagactatgtggctgcctccaaggtaatgggtgcctcggtgccctggatcttgttcaagcacgtagctcgcaactgcatcgccccgatcatggttttcgccactgtcttggtggcagacgcgatcgtatttgaggcttcactaagcttcgtgggcgcaggcatcaaggccaccaacacacctacctggggcaacatgctctctgaaggtaaggccctgctgctaagtggtcactggtgggtgactttcttccccggcctgttcatcctgatcaccaccttgtgcctaaacgtcttgtctgagggcctaactgacgctatggcctcgccgcgtatccgttcgcgcgccgacgtcgaagctgacgaagccgccctggaagaagtcgctggcgaaggccacggcaagaatggcgagctggtgaccgaaaagagcattttcgagtcctcctaccccgagattcgccgtcctgaggtgcaagagcacgtatctctaagcgagcgcctaaaccagctgcgcgactctgagctcaagcgccgcgaccgtctggtttacgccactcccgaacaggagccagtgctggaggttaaaaacctgtccattgccttccccgcccagcacggtgacgtcaacattgttgacaacgtctccttctcggtgcgtccgggtgaaaccatgggtctggtgggtgaatccggttgcggtaagtccatctcctccatggcggttatgggcctgctcccgcccagcgcccgcatcagtggtgaaatcctgttcaagggcaagaacatcttggagatgaccccgcagcagcacaatgacctgcgcggccacgaaatgagcatgatctaccaggacgcgctcagctcgcttaacccctccatgctgatcaaggcccagatgaagcagctaactcgacgcgggggcacccgcagcgctgaggaactgctggaactggtgggtctagacccggtgcgtaccctgcaaagctacccgcacgagctctccggcggtcagcgtcagcgcgtactgatcgctatggccctgacccgcgacccctcgctggtgatcgctgacgagcccaccaccgccctggacgtaaccgtgcaaaagcaggtggttgacctgctcaacaagctgcgtgaagagctcggcttcgcgatggtcttcgtctctcacgacctggcgctggtggccaagctggcccaccgcatcacggttatgtacgccggccaggtggttgagcaggctgaaaccatggagctgctaaccaaccccacccacgaatacacccgtggcctgctgggtgcggtgctctccattgaggctggctccaaccgtctgcaccaggtgcgcggcaccgtgccctcgccgcgtgagtttgtcgacggcgaccgtttcgccccgcgctctagccaccccgaggttgggctacacacccgccctgtactcaagccggttgatggcaaccccaaccacgtgtttgctatcacccctgagcttgaggcgctgctgaagaaagaggcaaagtgatgagccaggcatgggaccccaaagatccggtagttgaactacgcaacgtcaacgtcatccacaagtcacgtaccggtgggcttttccaccctgacacggtgcacgcggttaacgatgtttcgctaaccatcagccgtggccaaaccctgggaatcgtgggtgaatctggttgtggtaaatccaccaccgcccgcgtaatggtgggtttgcagcccatcaccagtggtgaggtgctgttcaagggccgtaagctcacccactccaaggctgaccggcgcgatctgggccgctccatttcggtagtgttccaggatccggccaccgccttgaacccgcgcatgatcgtgcacgacaccctaattgacccgcttaacgtacacggcattggttcacccaaggaccgcgaggcgcgcgtacgtgagctgctggaactggttggtttgccgctaagtgccctggatgtgttgccgcgccaaatctccggcggtcagcgtcagcgtgtggctattgcccgtgcgctggctttggaccccgacattatcgtggccgatgagcccaccagtgctttggacgtgtcggtgcgcgcccaggtg

SEQ ID NO: 2531 - DNA, 5718 bp, synthetic construct
  source 1..5718: mol_type = other DNA
  misc_feature 1..5718: note = Synthetic
gtttattggcgggattttgtgggtctttataggtgtcatcgtcaacctcaaggtcgcggctcccgtggacgcatagcaaagtttctaagttgtagcagtgagccctggggtagtggccatgacgggtactgacttagctaggtagagtatagtttttggttggtctagtggttgcaatgcgtgtggcgagtgctaccattgtggtgattgattctcagtaagaggtcgactcgttagcggcctttggaatgctccaccgggactttttggattcagttttaaaaagtcccggtattttttgcctcccattacccctgtgacgtgccataatgaactatggccgttacgctccccaaagatgatgttcgctataaggtcggtattgatgttggccttaactccattggcttttgtgctgtcgaagtcgatgatgatgaccggcctatcaggctgctcaactcgctggtatttcgtcatgatgctggagttgacccatctgctcaaaaaagttcactgacccgcaagaagatttcaggagtggctcgccgtaatcggcgggcgaatcgtgaaacaaaaaaacgcctagtggcacttgaccgtttactgtcagaagagcttggctggcccctgcctaaccttgaaggttatccagatccgcacgagccctggcatgcgcgtgctcagcttcttgatgggtttgttgctgatgatgccaagcgtaaagaaatgctgtctattgctatgcgacatattgcacggcaccgaggttggcgtaacccttatatgaagcctacctcgctcgctagtctgccgtatccctctgagtttcttactaaactaaatgaagatacttctcgtgcgatcgggcgagaatttgctgcagaagctacccaaggtcagctagtagatgcgtttattttgggctctttgagcttagctacaacccctgtactgcaggtgttagaggagtctgaaaaggatagcggcaagaatgatctacgcgatatagtcttaggtaaagtacgtggcgataaaggtgttatcggcggtaagcttcaccaaagtgataatgctgaagagatccgccgtatttgtgctactcagaaaatttcacaagagcaagttcagcgcctaattgaagctgtctttaaagcaaagaatccgcgtgaggtgggtgcagcctacaaactagtaggtcacgatgaacttcccgggcaggaaaaatacattcgcgcagagagagctcacccagctttccaaaagtttaatattgtagccacccttgctaacctacgtattgatgaagcaggtagtaaacgcaggcttagtcccaaagagctgcaaatgctgacaacttacctcagcaatgttgcttctaaagataaagttacctggtttgatgtagctgaaaagttgaagattgatcgctttgatctgcagggaactgctcatgctgcatatgacggtcaagcggctttaaactaccctccaattgatgtaacttctgcaagtattaagcagagcaaagttaaggctcttaaggtctggtggaaacaggcttcagaggatcaacgtgggcaactgattgattacctgtctaattcaggtggatcagatacgcctcaaacggatgacgaacttgatgatttaactaagctgatacaaaactttaatgaaaaagatttggaagaattagagaagatctctttaccagctgggcgtgcagcatactcggttaatagcttaactaggcttactaatctgatgctagaagaaggcattgatcttcacgaagtgcgtaagagactatttaatataggtaatgactggaaacctgctcctgaacctattaattcgcctgtaggaaatccggctgtaaaccgtgtgttgaaacaagtagcacgctggattgatatggccaccgaacgctggggtattccagtatctgtgaatattgaacatgttcgtggagggcttacttccgataaggtagctaaaaagattattagggaaaatcaggctcgcagagagaagaaggatgaagctgctgaagagattgctgagcgattaaggctatctgggcgtgtacacaggagtcataccgaaaaatactttgcgctgcgacgccaaaattgccagtgtctatactgcggtacttcaataagttttaaaaccgcagagatggaccatattgttcctcgaacaaatggagggtcaaacaataaacgttcaaatctggctgcagtatgcacaacatgtaataagagtaagagcaacattccttttgccgtctgggtgttatctggtgaggctgggtctaaggtctccttagagggtgctaaaaagcgcgtagattcattgcttctcacaaagactgatttgccagaagattatgacgatgattctcttatcgaattttatccggagaaagaaggtgaaaaattcagaaaagagattattgctcgcctggaatctaagaagccggaggaggaatttgatggacgctcgctagagtctgtggcttggatggccgttgagctgcgcgggcgtatcctgggatattacgaaagccttttgaaagatactggtcaaaaggttcctcaagtaggggtttatcgtggcgctataaccgctgaagctaggatagcttcaggggttgagaaacgagtggggctacttggacagaagggtaagactcgcctagatcgtaggcatcacgctatggatgccatggttattgcattgatgaaccagtctgtatctaagttgctgtcatggcgtatgcagctgcgtgactcacaacaagtatctggggcgccaaagacttggaaagaattccacaggtctgaccgtgatggcaatcgtcattgggaggcttgggctaaagcaatgcgaattgccgtagagctattcaatgatgctttagaaaaagatgaagtacatttcagtgaaaacaagcgtctcggtattagtctagctaaagcacatgatgatactatcaagtcactatgtagttacgcgttaggcggagccttttctgttgaactaatcgacagggctgagacatcggcgctatggacagcgcttaccaagcaacctgattttgatgttaaaaatgggttgcctgcagatccaactcgacacattactgtaaacggtaaacaatttggccccactgatgaaataaagttctttactagcggtgctgctgcaataaaggtgcgtggtggcttcgctgatattggtggcactattcatcacgcacgtatttatcgaatcgatggtaaaaaaactacctacgctatggttcgcgtattccaaacagatttacgtcgtatgaagcacaaggatttgtttaccgaaccgcttaagccatcaactatctcaatgcgaactgctgacgaggatattcgcaaagctctaacggatggaactgcaacgcaaattggctggttagttgaaggtgatgaaatacgtataaagacggatcgttatccttcaggtcgaattggcggtttacttaaagaatatccggaagcctcttcttggcgagtttgtgggtttccggatgatgcaagggttcgtctaaggcctaatctcatatctgaagaaggttttgaggatgatactgtagaggctgttcgagaaatagtgagcggtaacggctggcgtgtaactattaataaagtattaaataatggattagttacagttatacgtcgtaatactcttggtgaggaacgctgggtgtctaggggtcatcttcccgtctcagtggatttgagctaaccatggatggtgcatggcgagttcttgatttgagtggtttttaaggaacgcttgaatcagatcgtggtggtattactgttcacccagaatctggtgaagcagtgcatgtaccagttgctgacttggcaattgtcctagttggtatgggtactaagctaagcgcatcagttatgcatcggctatgtacagcggatgtcgcgctactgttctgtgattggcggggtatccctgaaggtggtgcttatagctggtctgaacatggacgagtggccgccaggcatagagctcaagctgctatgactttgccacgtaaaaagaacgcatgggcacgtctagttcgcgccaaaattactggtcaagcggcggtgctagagaatcttaaaattcctggtagcggccagctattggctttggcggataaagtgcgttctggcgatccagcaaatgtggaagcccaagcagctaggttgtactggtctaaagctttagagaccaggcgtatacctggatcaggtgaacgcataggctctaattcttgcttagactacggatatttggtgctgcgtggtcatgttatgcgagctgtacttgctgctggcttggctcctgcactaggtattttccatcatgataggggaaatgcttttgctcttgcagatgatctgattgagccgtttcggcccgcaatagacgaggtagttttcagctccctaagacagctagcccaactgatagggaagtgaaaaaggtattggttgcagctgctgcacagaaaattagtgctgatggccatggcatcccggctgtagtggaggctctagctcaggcttttggccgctacgcggaaggtgttgaagatcgattacaagttactgcctgggcgggtccaactttggttgatttcggcggtgaaaacgatggtggatgacgcaatgtggtgtctagtaatgtttgatcttcctgtggagacaaaggagcaacgtcgcgaagcaactaggtttcgccacgacttgctggattgggggtttcataatggtccagttcagtgtctatgcgaaatactggcctaccggtggtcaagaccatgcagtgctccgtgccatcaagacgcatcttccagagggtgggcaggttcgtgtgattggcgtgagcgacaaacagtgggctagcgggctccattttcgtaacgcaaagccccaaaagagcgagtctgcccctgagcagctgatgattttctagccaaaaattcctagaaaacccagttattgcaaggaaaacccctccctctagtatatcaggggggagaggtgattgattcccagccttacagggcacgactgttacggccctgaagtatatcaggggggaggtgattgattcccagcatctgaccaaggggacgcgccaggttctaagtatatcaggggggagaggtgattgattcccagctacctcacggatcactactacaacctagaagtatatcaggggggagaggtgattgattcccgatcatcttccagatttgaagcgtttaaatttaatgcctttcgttagtttggatatttgatttagaagagatggtagacaatgcagaaatcggcaaggaagtcatcctgctaaaacagccagttcgctttctgatgctggattattttcagctgtctagttatcggctttgggtgtgctggcggcctacctgttcctaaacacctggttcgctgcgtcgtcgtcggccctaaaagcagagaaccgcaacccttcacggcctgccgagcccagagctgcgctgcatccctggtttaaagtgagtgcaaccctaaaagtgggcgcaacccaaacccactaaccttgcaaaaccgccagaaaaccacgccttttggggccatgtaaaggattacctaaattagggttaacaatctttagtcg

SEQ ID NO: 2532 - DNA, 22949 bp, synthetic construct
  source 1..22949: mol_type = other DNA
  misc_feature 1..22949: note = Synthetic
gcaagaattacgattcgattggcaaataatcacacgcggacacgtaaccgcggcgtttatggattcaatcatatttaatatcattacccccattggtataatttgcatacagatgggggatttttacatgccagataaaattatatatacgctgtattcaaatggtctggggttcagtgccgacgtgtcaggacggcatatcggtgaaattacattctttcgcgttggcattgataaatttgttatcgaccataccgcggttgtgcccgaatatcgcaatgcacaggttggtcgaaatctggtacgtcaggtatgcaatctggcgcgacaacaacatcgcaagattatacccttgtgcccctttgcccgcgcgatgttcggccgatacgcggaatttgatgacgtgcgtttaatgaatcacagccagttgtaagtcagatattttgaaaaaatgtcttgcgccacttgcgcggtctttctataatcacggcaggaaaaggagaaaaaatgaaaaaattatctattttgtcggctgtattgtgtatggctgtgtttggtgcggcgtctgctgcggatattgctatttatcattcgccaacatgtccacactgtcatcacgcccgtgattttatcgagggccagttggtctatgaatatccaacactgtcggtcagtgaaatcaacgttatggttcctgaaaatgttgaaaaattccaagacgcattggcaaaatgtgaatatgattctggtggcgtacctgtaatcgttatcggcgacaaatgcttccaaggatatgcagatttcatgcaacaggatttgcgtaacgctgtcgaagcagatatgagcgatgctgacaaggcaaccgccgctgaaaaccgcaaggcatatgaacaagacgccgaagggttcaaggccgcacatgctgatcgtgcaaatgcggtttctgaatacagtgcgaccgcggcatctgatgaaaccgcgcaaaaaaaaaatgatgtaaagcacggcacaactgcatacttctatggtttgctgattgtactggttgctgcattgggatttgttctggttcgcaagaaaaaataatcgcgtcacgcatgtaacagaatcgctggggataccgtatgtttgatttaacaacgcttgactatatctatgtgggtgttttattggcatctactgtttgggcaacaatccgtggtggggtttacgaaacaatcgcaaccctgtcatgggttgcggcggcggtgtctgcgcgatttgcgtccccattattggattcgttgttgcaacgttggtttgacctgacggattcaacggtcggaacattggttgcatcgtactttatcgtgttctttgcaattttgctgttggttggtttctttaaccagaaattacgcgacaaaattcaggccagcatgataaaggttaccgaccacacattgggcgtaatatttggtattgtgcgcggtatattcgttatgggtgtcgtgtattggattatgctgtggtattattccgatgcaccacaaatgccccagtggattgccgatgcgcgcacgcgtccggttatgcagttgacggcggtaaaattggacgaatggttcgtgcctggggctgagaacaagttgctggcgcgcgatatggcgggttctcgtgaatcgattgaaatctataataatttgataaatccggcggtgtctgattcaaaacagaaagcaagcgacggcacaaaaacagaaaatgccgcggcccctgaaacagggtataaatcgtctgaacgcaccgcattggaaaatcagttattacagattgaaaccgccgcccgtgccgaagaggcgcgcgatgccgccaaccctgatattgatgcagaatagggcgcatatcagaaattattcaccgcacattcgtgcggtgttttttttatgaaatcgttcccgatgacatgatgcgccacatatgcaaaaatagtggtacataaaccaatgggggcgcagaatgtttttcagattaaaaatttgcacaactgtatttttcttgtatgaaattatcgcggtgatattgctgcatttgcccaatacgtgcgcgacattgtttggcctgccgttttgttcagacgcagtgtataaatattttattgtttgtgcggctgtgccaatgattgcatttttaattgcaatgtggattcgtgaaattgtggtggtgcgccgccggcgtcattcggtattgcgtcgggcgcgtggcgcggtgcgcgcaatcgccgaaaatgtccgtgaccatgttgcgggccacatcagccaaccagatatggaaaaaatgattgcggcagcattgatgatgggcgttaaacgctatgcgcgccgtcatggaaatattcgtcgctggttggacgaaatcaataacccaaattattatgccgatgcgtccgactttgacgatacggaatacgatgacgacgaatacgacgatgatgatcgcaacgccccacgtcgcaattatcgcccgcgtcatgaccgataataacgatttccttggtatccggtatgcccccacgcggggcatattttgttgtggaaaaaaatatttgtcaatatataataggtgtgacaaaaggaaattaaattggcacagcagtgtattttttgtggtaaaaagccggaaaataaaaacaaggaacacgttattccccagtggctcagtaaactggtgggcagttatgatcacgtctgtaattttggtgcgttgaccgaaaagcagattacgtttggcaaactgacatttccggcgtgcaccgcgtgcaataccaaatttggggaattggaggccgccgccaaaatcgtcttggaaaaagtaatggcgggcaacgccatcaccgcaaccgaaatcaacacattattggattggtttgacaaggttcgtgttggcctgtggttggggcaactgatgctggtggacgaaaagcgtgacattgaaccccagtttcatattgccgaccgcattggcacaaaagatcgtatgttgattgttgaacgcctgcaccagccagaggccagaatcggatttgcgggtacaaacacagaaacatttatgacatgccccagtgcgtttcaactgtgtattggcgattacctgttcacaaatgcatctgaaatgggattggtggcaaaccgtttgggatacccacaaatatcaaaaatcagaaaggacgcggaaacaacctgtgacattacccccggacgcaacaaaaccaaacaccctgtggtggcatcgttacaggcatcaccatatcgcacattgatttatcagccaatgttcaaatgctttgcgcccacaacgcgcacggaatattacaatgtgccatatgtcctgtcacattcattggatatggaaaacggcgtgggcggtgtgttttaccagcgtggcgataacacggtcagatatctgggcgcaaacgacaaaataaatatcgtaccgcgcaagtcacccgaaaacgtatcgctgtatcaaatgacggccaaggtgtacgatttacaacacacggttttgaatctgttcgattacgccggccgcacagaatatttcaaatcagtggctgattcattaaagaatgaaacagaacgttacaaacgcctgatgcacgaactggacaaacatcaacgttaaaaacacaaacaaaaaaccgcgggtgaccgcggtaattctggtgccagttgtcggacttgaaccaacgaccctctgattacaaatcagatgctctaccagctgagctaaactggcaacgggctttactatacatggttaaaaaaataatttcaagtgtaaaaatcataaatcgcttgattttatgcaataaccgtaaaaaatatacagcaaagggcacggattatgattaaattaccagaattacttgcaccggcgggcacgctggacgcattcaaaaccgcaattttatatggcgcagacgcaatttatgctggtctgccgggtttttcaatgcgtgcgcgtgcaaaaattacagttgacgaggtaaagcagggcatagatctggcccatgctgcgggcaaacgggtttatttggcttttaatctgtttgcacacgaacgcgaatatgcgaatatgccccgtgtcagtgcggtgatagattacctgcgccctgatgcgctgattgtcgccgaccctggggttatgatgtgggtgcgcgaacatcatcctgatattccaattcatgtgtcgacacaggcgaatatttgttcatcggcgtcggtaaagttctggcaaaaagcgggcgcaaaattgtgcgttttggcgcgcgaagtcccatttaacgaattttgtgaaatccgcgctgcgtgccccgatgttggtctggaaatatttgttcatggcgcaatgtgtatgagttattcgggccgttgcctgttatcaaactttatcacggggcgtccatcaaaccgcggggcgtgcgcgcaactgtgccgatggaaatacgatgttattttgcgcgaggcccagtccggcgttgaaatgccgatagaggaagattcccgtggcgcatacatcatgaactcgcgcgatttgtgcctgatgccacgcttggcagaaattattgccgcgcaccctgattcattaaagatagaggggcgcaatcgcagcgaatactatgtcgccatggtgacgaatgcatatcgctgtgcgctggacgcgtatgcggcggggcctgataattttgaccccgcgccatttatggatttgctgaacaagttggaaacgcgcggatacaccacggcgttctttgacgggaacttgggggcagacgcgcatgattacgaaacaacgcgttcaacgtctgattggcatgcggtgggcgtggtaaccgcggtggacacggacaaaattacactggaattacgcaatgaattgcgcgccgataccgacattacattcgtgttgcctggggtaatcggtggcgcaacggtgcacctgaatcaaattataaatgcaaaaaatggcgatgcgttgccaaaaatgtcggcgggccagcataacagtattacaataccgcgcgcgtggatttcggcggaaaactgggaaaaatttgcgccgtgcgttgtcgcataccagcataaataaattttgcaagaaaaagatttctttgactttattcccaaaataggtataccatgataaacggtcgtgtcacaaaaacgcactgttgccaataatgggcggtgtggatatgacctccggtcttgccaataatgggggccgcagaatttcatcacaacgaaggagttatttgatgaaaaaaacaattacgttggcgacagcagtggctgcgctgactgcgcctgcgatggctgcaaacattcctgggccgtattctacggttcataacatggaaaatccgttatatttgccagaacagaatatgttctattccaaattatccaacggtattatgttaaaggtcgccgataattcatgggcgcaccgcgaaaaaaatcacagcggcggatttgaatttccaatcgtccgcgtccaagaagaaatgggctatggtattacagatcgttgggcggcacactttatgttgcaatacacccacgataacgacattggtcgtaccggtctgtccggcggccgtttgggtacaacatatcgtatcttgaacctgtacaagggttttgtgtgggacgtgtacggcgatatccacttgggtggtgtcggtgaaatgcgcggcacatacaatgtaaagggtgacttgaataacccgagcactgtgtacggcgtgtttgattatgataactattccgacggtatgtggggattccacgcgggaacaaaatttggtcacgtatgggacaaatttaccgcacaggcatttgttgaaatcctgcaaacattcgcagatgacaacaatatgatacgtgttgtcggtgcaaacaagggaaacagattggcattggccgccattgatgcaccaacccagatttccgcaaaattaaaaggaaatactgatttgagtaccggtgtccaagggttctatgaattttcaaaccgttggagcatgggcggctggttcaaattcaatcgtcattctgatcatggcgttgataaaatcacaaccgaaatgccaaatgcgcgcaccaagggattggcggctgcgctggaaaaacagttggctgatatggaagacggttgggacgaatacgttatcggcgcgtcattttcaaaccagttgactgataacacccagattacgctttatggcgaatatacgctggacgactcgcatcgtaaatcccaaaacgggacagatgtcaaggccgaaatgggcgttcgcctgaactttacgttctaaacataaaacaacaaaacatattggactaaatcccgcgtaatgcgggatttttgttttgtactcttagggatttttatgatataatgtacgcaaaaggaaatggattttacatgaaaaaatctgctgtttttgccgttttaacgggtgttttggcgggcgtatcatttgacgcgcgtgccgcgtatcctgtgtatcaggcggcgtatccaacaacatatcaggcaaccaccgcccagggtcaggttatcgcattgccaaatcaaacgtcggtcacgaccagtaccagtttgccggccaatacccgtgtcacgggcgcattaccacgtgtcgggtcgtctgcaacaaatgcaggacgccagtattaccagccagcggactatgaccgtttggcggacagtggtctgtacatcggtgtttccgcggggtattctgcatcaatcacgggcagcatgtccgccgactatgccggcgaagataaatcgtatgtcgtccccggcgcattcaaagatgcaaacttttcgtctgataccgtgattccattacaggtatcggttggcgcggcaatcaataacgatgtgcgtattgatttctcgttcttgcgttattcgggcctcagttacccagacacggttgaatccgccgatggtaatggtggctatatcacgggcaaggtcagtggtggcgcaatcaccgcaaacacgacgatgttgaacgtgtattataatatcgattcttatactggctatctggcggggggcgcgttgcgtccgtacatcggggctggtgttggtatttcgttgaacacaatcgccgactatgtcgtgtacgatggcacgttttatgacgtgatggatccatcggcggcgggtgcgggtgacctgacgggtatctcggacgtatatgcatatcacaacggcggcacaacagaacagttggccttttcggtcgagggtggtttaaccaccgaactggacggcggcattaaattggatttctttgttcgctatgccaatttaggcaaggttaaaacatcgggcagtatcgttgtttcccaaaccgaatggttgggcgacgatgcgggcggtgaataccaagcaccatacgacagcgtgttccactataccaactggtacgaaagtggccgtctgggcatggttgatttgggtgtccgcgcgcgtttgcagttttagagcatagagcatagataatagagcatagatatgacggcaaatagcgtaacggtacaaaagagtaaggatttcgctgttcgtatctataagttgtgtaaatatttaacaggagagaaaaacgaaataattttatctcgtcagttgttgcggtcgggaacaagcatcggcgcaaatctatcagaggccaaatgcgcaatatcggcagatgattttttagccaaagtttatattgcgtacaaggagtgttcagaaacgttgtattggttagatttgttaaagaatgttggtttaattccaacagaatggtatgagagtataaattctgactgtgaagagataatgaaattattgacggccaccatcaagacaaaaaagcaggtaaagaaaaaatgaaatataactattatctattatctattatctatgctctattatctggcggccacgccgccgccgcagtgcgtgttggcaacgcatcgcgcagttatgcagccggctatcaacaggtaaatgcccaacgtgaacagattgcagcggccgcagcggccgccgccacaccaactgccacgacccagtcggcggacgcggaaacaaacctgccggtgcgggtggcaaatcgtgaattggcacaaaagttatcacgtggcgaaacggattcgcgtgtcagtattgcaacactggattcttgcgcaatggtatatccaaatggcgaatttgcatgggattcgccgacggttggcaatggtgcgggtggcgcatcaacgtgtgtcgcggttgtcgaattgcgtggctatcaaatgggactggacggttctgatgccgttttggcgcgcgcaaatttggcggctggcgatgcggtcaaatgtaatatctctgactttcctgaattttcatacaccaccgacgcggcacaggttacattccccgcggacaacgaaccgacccgtgcggacgtggttcaggtattaaatgcggaacagaaacaaaacgccggcctgcgcatcgcggcgggcacggtgattggtggtctggcgggcaatgccgccggcaaaaacgaaatcggcagtgacagtatattgggcggtggcaaacataaaaccaccggcacaatcatcggcgcactcagcggcgcagcactgatggcgggcaatgcctattctggcaaggttgcaggtgacacaattctgtcaactggtgtcaacgccgccgcgggcagtatgattggcaacattgccgccagtggggaatctgtcctgcgtatcgaggattgcaaaatacccagcatcaccgaaaaaccaaaatcaaatcaggaaaagtcagatacgtccaataataccggttcagccagcgcgactgcgtccgcgtccgccagtgccacaacggacgataaacccgccgagccacagaataaaaattccaagtgcctgtggggtgttatcagaaagagtacggcactgtctggtaaaaacgcttattacaacactggcgacgaaacaacattagtatgtaactcagacgatactggttgtaaacaagaaaccctgttgaatattaaactagaggcatacccgaacaaagacattgaagctgtggccaaggaagggttcgaaaaggtcaaagctgattcagcaaaacagttttatctgaccgaaaaaaacgaaatgaaaaatggtgcaaatcctgacagtgcgatgtatgccaagatttccagtgccaccattgccaccggtacacagattcctgcgatgattgccgacgtcaatgacaaggcatttggttacaagcgttctgattgggccaaattgaaaacagatttatcagggcatacaatcttgggccgcacgtccagtggtgctggatatgctttggacggcgaatacagcatcagcgacttctacccaataatggtcgatgcgtccgatggtggtattattgactttggtaacaaggccagattaaaaggcacattgattggcgcgggtgctggtggtgcgttgggtgcatacgccggataccaaggggcgcaatccgatattgaaaaccgttgggtcacggccgtgcgcgaatacaaggattcgttgcagaaaatatactgcgccaccggaaaacgattcttgggctattacaacgacgaaatcgtaatccccacaatgatcaaccgataaaacaaaaacacccgcccgcgggtgttttttgatgtgtttgccataaataaaagccgtcccccgttgggggacggcgcaggggatacgtaatcgtaaaaccccacagaaaatattctttattatataaacggttgcttctcaaatcgtccgtcaataaagatttcttacgtcactatgctatgatagattattgctgacgtcaagttttttgtttttatggtgtcgggttgtaatttgtgcttgttgggtctatattcataatacaagggtaaaaacaaagaggaatgcacatgtctttgatttttggattcgatttgggtatcgccagtatcggttgggccgctgttagaatgtcagatccaacggcatcaaccacagatgcgtccgcgcccgacagccgccccgtgggtgaaatagtgggtgcgggtgtgcgctgttttgatcaggcacaaaatgccgccgatcgtcgcacggcgcgtggtgcgcgtcgcagaatcagacatcgtgcacagcgtatgcgcgaaattcgcgatattttacgtcaataccatctgattgatattccagaaccaaaatctgacggacaaaataatttttatctgaaccgtgatacggatataaacatctggcaactgcgtgcggttgacgcttttacgcgaaaactgacgccgcgtgaaacaggacgcatcttgtaccatttggcaaagcatcgcgggtacgatgatataacataccctgtgccagctggtgcaaaatcagaaaaggcggacgacgcagagtccaaagaggaattaaaagccattggtgcaatcaaagataatttggccaaactgcaacgtgaaaatccggatcaaacaatgtgccaaatgctgtatgccaccgaacacgctcagatgcgcaacggcagaaaaagcgttgtcaaaatcgcaaaagacggcacgcaaaaaacagaagtgcaatcaacgtattcaagttctattccgcgttcggaaatcaagcgcgaagcagaaatgattttgcacgcgcaacgtgactttggtaatgatttttcggacgcgtttgaaaaatggtgggctgttgcgtgtcgccaacgtaaatttaatgaatctgcatcgccattggccaaatctattgcggaaatgcgtggcaaatgtccgttcacgaatgaaccggtcgcgcccaaggaatcgccaacggcgcaaaagtttgtcgcattgaccaagtgtcgccaaaatgattttacggttgctgaaacccagacagttatagatgagttatataaaaagaaaacggggctgaaatatgccgacgtgcgtaacctgttgaaatgggacgatgataaacagttcaaaacgttgaactattcccgtatatatgacaaagaaaacaaggtgtggattgaacctgatatcaagaaaatcgaatgtcagaaattctatgcatttacgggttggcataaactggccaaatacacaaccgatatagacacgatggacaagatatttgatgtcatcgcaacccagaaaacgccggaaaatattgaacgcgctgtgtctgaaatattgccagaacatgccgccgcaatcgcacaaatcaccagttcagaatttatcaagttgtctatctctgcattgcaaaaaattattcctgaaatggagaatggcaaaaagtataacgaagcggttgcatctggcctgaacaaagatttcagggcacaaaacgtgtcgtatataaatcgcgacgacggcgcgccagcggggcatctgcaccagataaattggactttgctgggtaatcgtattacatcaccagttgccaagcgaacccttgtccaattacgcaaggtttataatgcgatggtttatcggtttggcgcgcccgacagaatccatttggaaatcggtcgtgaattaaaaaattcgcccgatgatattgcgcgcatgaatcgcgaacaggaacgcaatcgtcaggcaaccgaagaagcccgcaaagagtacggcaaaaattactttaagtataaattgtatatggagcagggtggcaagtgcccatactgtaatgcggtattggctgctggtgattggggggcgtatgaaatagaccatattttgccatattcgcgttcccttgataattcgcagagcaacagggttttggtctgtcacgaatgtaatcaacgcaagggcagcaaaacgccatatgagtttctgacatctgaacaattttatgacatgacggtgcgtgcgcgtgccttgcataatcctgcaaagttcaaaaaattgacgaacaccgatttacccaagtgtgatgccgaacaaaacggttttattgaacgtaacgcgaatgataatgccactattgccaagttcgccacggaatatttggaatatggtatcgattggcctgcatctgatgatataaaaaagcgagtattggtgcgtactggttctttgacggactatctgcgtcaccagtggggcttggtcaaaaatcgtgatgaatcagacaaacatcatgcccaagacgcgattgtaatcgcatgtgcgacacagggtatggtaaagtacctgtcaacgctgtcggcgcgatttgaaaacaaatatgcgctgattcaaaaatatggtcaggcatggtataccgcactgaaaacttctatccaagaaccatggaacggttttcgtactgatgttatctcctgcttgaacgatattattgtatcgcgcccgccacgttgtaacgccacgggtgcggcgcacgatgaaacaatttacgcagatccaaaatcatatcgttcaaaacgtggtctgaataaaaatcgcgacaaaggatcactggaaattcgacatggacgcgctgttcgtggcgatatgtttcgatttgatatttggcgcaatgcgcatggcaaatacgtgtgtgttccgatttttgttaccgataccaaggggaaagatgacgatgtcttcaaagtcccagatggtgaatttgtctgttcgttacacaaggacgattatgttcgcctgaccgctgcagatggtgtgtacgaaggatatatcaccaaaatggatcatggcacaaacttcatattgtatcgccaagataacaatcggacacaggttgtgaaaaaatctgttggtaaatgcacaaacattgaaaagtttgctgtgtcattactgggtacaccaaaaccgataaagttgccagaacagcgcacgccggttgtaaaacgaaaatagtgcactatatcacctgtgtgggaaaggatacaaacaaaggacaattaaatgtcttggcgtattctgaccctgacaaatccatgtcggatttgtgttcggcacaagcaactgcactggactggtgacaccggtggtgtccaagatatcccattagaagatatcgcggttgtcatactggaaaatccccagattcaaattacatctgcgctgatgtctgaattggctgaaaacggcgtggttgcgttttcttgtgatgcgtcacacctgccgaatggtgcattctttccgtttcataataattccagatatactgaaattgcgcatgcacaaattgcatcgtcgttgccattccgtaaacgtatgtggcaagaaattgttaaacaaaaaattcgaaatcaatcggcaatcttaaagttgtgtgataatcccgcatataagcgtttggaaattttggctgaaaatgtcgcgtctggtgacactaaaaatatagaggggcttgcggctcgtatctattggtcggccctgtgggaaaatttcaaccgcagtgatgatgccgatgtacgaaatcatgcattgaattacggctatgccatattacgcgggtgtgtcgcacgcagcgcggttggtgcgggtctgttacctttttatggcgtacatcattgtaacaaacttgataatttttgcatggtcgacgacatgattgaaccgtggcggccatttgtggactttattgtgctgtcatttgattttgatggttgtgcgcatttaaccccaaatatcaaacaacgattggtgtcggtattattgcacagttgcgcctttggtggtgttcgacattcggtgctgaatgccatgccgctgtatgcagaatccgtggcaacatgtttttgtaataaaaacttagatgcattgaaattgccatctataaaatcagcaccagaaatagtaaatacccagaactaaaatgttgtacaaccgtcaggaaaaatttatgcgtataatagtattctttgatttgcccgttggcacaaagcgtgaacggaaatatgctacgcgtttcagaaacgacttgttgaacgacgggtattacatgatgcaattctcggtatattcccgaatagtcaaggggttggccggaatggagaagcatttacaacgattgcgacatttgacgccgccatctggttcaatcagggttttaaccgtcacggaaaaacaattcgcagatatgctgtttttggttggcgatgcgcccacggcagaaaaaatcagttcgcaacaattactgatgttttgataaaaaaacaagacgattcgtcatcagccgatggcaatacgtacgttttttgttgaatataatacacaaaaacccacttttatcagtgggtttttgtgtgtctattatatcaaagacgatttgagaagcaacctataacattgcacgtgtaaatgtgttcgaatggtttattatatcaaagacgatttgagaagcaacctataacggaattgtgttacgtggtacaaccccgaatattatatcaaagacgatttgagaagcaacctataacaaatgcgcccaatcaaggtctttgaattcgattatatcaaagacgatttgagaagcaacctataaccaggtttacataccacaccgggattgtgttattatatcaaagacgatttgagaagcaacctataacacgatgggaaatgttattgcgactgttgacattatatcaaagacgatttgagaagcaacctataacatctctgagtatcatagcttaatcctttttattatatcaaagacgatttgagaagcaacctataacacgatgggaaatgttattgcgactgttgacattatatcaaagacgatttgagaagcaacctataactttgcaggcgcaggttgacaaagatgtgccattatatcaaagacgatttgagaagcaacctataactccttcgagtgctctgttctacatatttcgattatatcaaagacgatttgagaagcaacctataaccgggttgatttgtaccgttgcgaatgctggattatatcaaagacgatttgagaagcaacctataaccgtagacgctcgcacatgctaagcatataaattatatcaaagacgatttgagaagcaacctataacaggttaaattgcctatttctggtaattcacattatatcaaagacgatttgagaagcaacctataactgtaagttgcgaaaagcgaacgaaaaaatgattatatcaaagacgatttgagaagcagcctataacgagatatgttttttgtgtgataattacgtaaaatctcaaaaaacgaacagtgtattctacaataagttgattttgtcataaaatacaatctgtggtagaaaaaacagctgtttttgtaagcagtgatagaaaaatataaacaattcaaccaatggttgaattgcagggcggttttcagatgtcgattgtctaaatggtataaatgtgtaaagttgtaaaaaagtttgcatatagtacaaaattaggtgtaaattctagtattggttgatttctttataaaaaacgcattgtgtaaccggtgattgaatatttgcataaattcgcgtatcacgcgaattttgtctgatggttaggatgtttgtaaaaaataaattgaattttcgtctttgtacaacctgtggttgaattgtggtctgtaatactctgtattggtgcaaaaaagcgcgtgatgcgcgacaatatatccagttatgttgcacataaaagcaatatatcacaaaaatattgggaaaaatttcctaaaatacagtaattacaataagttattgcttttgttcctaatgtgtgctatctctttattgtaaaacaagaggaaaaagcatggcgtctgaaaactatatggttattaggggtgcaattgagcacaaacagcaattgttttttgattatgacggatttcatcgagaagtgtgtccacatataatcggattgaatgaccaaggccaagaacagttgctagggtatcagtttgctggagaaagcagcaaagggcagataccaacggaaatacctgcgtcgtggcgttgctttaaaattgcaaaaatgtctcgcttggttgtgcgtgatggtcaatggtacacagatgaacagtgtcaacacaaatgtgagcagcagtgtgtcgcgcatgttgacctagatgtgtccaagatttaaggagaaatatatgcacgagataaaatgtccgaaatgtaatacgcaattcactattgatgaatcgggttatgcagcgattgtaagtcaaattaaaaatgttgagtttgacaaggaggttgcgttgcgattacaacaatataaggcgcaatcaaaaagtgaaatcgacttattaaaagaacaggcaaaaaacgataaagaattatcaatttctgcgttaaaagaagaaatagcaacactcaaagagaaaatttcatcggcagagcgcgatgctgcggctgaaatgaagttaaaaattgcgggtatagaagcggacaaagcaaagtctattgcatgtttgaatgaacaaattgtcgaattcaaagcacgtataaatgcatcagagcaggaaaaggtaattgcagtagaaaaggcattaagtaaatcaaaggatatgctttttgaaaaagacgcgcaaattcttgccttgcagggcgaagtaaaggcggccgcacaagatattgaattaaaacaacaaacattaaaaagtgaatatgatgcacaattaaaggcaaaagatgtcgaaattgcgctatacaaggacatgaaaacaaaaatgtccacaaaaatggtaggagagacattggaacaacactgtcatattgaatttgaacggatgcggcctgcagcattcccaaatgcatatttcgaaaaagacaacgaagtcaagaatggaagtaagggcgattttatatttcgtgattatgcagatgttgataaaaaaacggaatttatatccattatgtttgaaatgaaaaacgagatggatacaacagccacaaaacacaaaaatgaagattttttcaaagaacttgataaagaccgaaaggataaaaattgtgaatatgctgttttggtttcgttgctggaatctgacaatgaattatataatgctggtattgttgatgtgtcgcacaaatatccaaaaatgtatgttgtaagaccacaatgttttattccaattataacattgttacggaatgcggcactgaattctgttcaatacaaacaacaaattgcagaatacaagcaggccaatatcgatgtctcaaattttgaagcagaaatgaatgagtttagagatcgctttggtcggaattataaaacagccagcgacaaattcaagaaggctatagaagaaattgataagacaatagatcacttgcaaaaaataaaggatgccttactcgggactgaaaataatctgcgtttggctaatgataaagcgcagaatttatcaataaaacgtttgacaagaaataacccgacaatggcgaaagcatttgaggatctaaaataagcataagaagttacacgatgatagatgctattcaaaagatttctaacataggtagttttcgtaagcagtcagaaacagtaaaattagcaaaatacaatctgttttatggttacaatggcactgggaaaacaactcttagtcgaatgtttgaatgtatcagtcgtggtcaaatgcaatacgtagacaatgaaaataacgtgctgtacaatttttctaaaggcgagttgtgttacaaagttggcggaaaaagaaaggtttttcgttctgtagtagatgggccattgatagataaaataaaagtttttaatacggattttatagagaataatctttccttaaaaaaatctcgagcaaacaaagttgatattattattggtgatcaaaatataaaaattacagaaaaactaaataaaatcaatgcggatattgaaacccttgttgttggtggtggtacggacttaaagtcaaatatagagctgcaaaagctagaacaacaaaaaaatgattttctaagtaatgttgcaaaagaaatacgtatttgcttgcatattgatagcccgcagaagtatacacaaaagcaattaaagatagatttagaacgtgtgcaacaggataaagaggaacgcattagtgaagaagaaaaaaatcacgcaagagatatttttattgaaccaataaaaacgaaaatagaattaaatatagtcaataaattaagaaactttgatgcagatttcaatattgatgcgtataaatcgataatagatattttgcagacatcgttatccagaaattccaatcctggaacagagaatataaaacagtggttagaaagtggcttggcattgcaccggggtaatcattctaattgtttgttttgtaatcaaaagattgccgatgatttctggcagcagcgttatcaagaaataaaagagttggtcaagaaagatgttgtttttgatatgcaagaaaaagctttttggacgttaatagatgtcttgagagataatagggaacttatagaacaagttgaaatatctttgccggatgcttctaaattatctagggacagtgcgtatgataggtatattgcagaaaagaatcaaataaataacatattgatagagctgaaaccactcttagaaaaattagatgaatctgttgcaaaaaaagcacttaatttggagacaacgtattctataacgtacgaaaatcagatatatgataatttacaatgtttaataaaatcgataaagacgatagaggttataatacaacaacacaatgcaattatagattctctggaaagtagaaaagtaaaatataagcagcaagtggttctgttttatatccaaaagaattcacagacattaaatataatggatgaaaaaataaaacaaaaaacaaaagatagggatacagacaaacaaagattaggtgatttagaaaagcagaaactggattgtaagcgtaagttggccgagaagtctaaaattattatgttgatcaataaagcattggaacaatctgcattaaataatatctcttttagagagggcccaagggagaatgtttatacaatacaaagaaagcttgacgatggtacattcgttgatgcaaaaaatctaagcgaaggtgagaaaactcttatcgcatttttgtattttatcattccaattcaatcgatgaaaaaagccggaaaggaaagtccaataatagttattgatgatcctgtttctagcttggatagtaagaatctattccaaataggtgactggatagttaccactataaaaaaatgtgagcaagtaatattgctgacacataatttctatttttttgtaaaaattagagaagctatgaaacatatagataagaataatttcaagatatttgaaatacaaaaaatagcatcagtgggttcaaagattagaatggctagtgattacttacaaaacagtacttctgaatatttggatcttgtacagaaattaaatgaattttatcagaataaacgaacacccccagacgtatgcataggtaatcttattcgacgggtactagaaacttacttggatgcaaagattcctaatacaaattcgtatttgaaaaagtttaactgtctgacagaaaatgataataatagatttcactatttatggggcgtggccaatgcgttttctcattcgaatggtgttggcgcgatttccggatgtcagaactttagctatgtggctggccgagacgaaattgcagatttgttccattttatcaaaagtacagacaaaaagcattttaacgcattgagtataaaaatataattttataagtccctttttatgattgattgaatttgcatgtgtgttatgtatttattgactgtcttatgcgtttttaggaaatattgtgtatgtatttgaaaaatacaacttggagttgaatgttttttgtcgatatttcaaatgatgtctatattgagtatgggtggttctaaatcttgacaatcacattaaaaaaactatttttaccgtatggtagttagaatttgtaaattttgtgggcaagaaagggaacttataaaatcacatattattcccgaacgaagctggtccgtggtggacagaattcaaaaaggaattgttggcgtttctggggtgcatattcaaagaccaatgcgatgcgttttcccaaggggtcatttacatcgacaacgaacaaatcagcggtcacacgggcttgttttaatatccatggcattacgtttttgataataaaaagcgcccgattgggcgctttttattatcaacgatctttaactgtcacacgtagttgtttaagtttgaccttgttttcaaccttcttttgcgcggatttgaaatcagcggttttctcgggacttttgtcgctaataacattaccttccgcatcaaaaattacttcatgatatacaggaaaatgctctacagaaccttctttgttgggcttaaaataaacgacacgccaaccagaaccatgttgttctagatatgtggcatcatcatgcagagcaaaccattcttgtattttttgtggcgcattttttgggtgaaatatcgatttgggctggtaaccatgactataattaaccataacaagttcaccttttagtccgtaaacgttatgtaaatggtattcgttaggatgctgaggatcttccacgtatactttataaccaatacgtgtttttcgtattagtgtacgtttgtggtcataaccggcaatacgactgtttgcgggaaatgcaatttctttgatttctactgtccctttatcatggtcacagacctgaactgtcagtattacagttttctctttttcacttccatttgttatatttttggttgtttcctttacttttgctgggttaccgtttgttttaatgcccttttcgtgaaaaccaccaacccttttgccatttgtatcaaaaaagtaaacattgtgtcttactaaaggtaaagggtggttaattgaaggagcctggtgcgagtattcttccgctattttgtatctgccatcttttgttcggcttatcgtcaccgtcgcattggttggttgtttatattttacaatatcgctgtctgctggaaattcgacttctgttgtttgttttgattcttcgtcatagattttgagtttcattgtcacagttggtcgtgcgatattttgtgatgggaacgtaaattgttgcccctcgaaatcgaacccgatgcaattgccattcacatcccaatattgtgtgatatgggcaaaactgcttttcattggcggttttgataccattgtatgacggtcatatgtacatgaatatgcgataccatttcgtggtggttttatttcccgaatttcatagtgtttatttggggattccttgttcatccgatcaaggtctcttttgaacgcgtctaaattttcctttggtaaaaaggttttaaaataattaataacttgttggctccaatctcttgaatatcttggtgctggtatcggcattatcttctcccttgttgtttataaattttatattccataactttttgagcatgttcgcgtttccacaaatctcgttcaaactttagtgtttgcagttggaattttgctgtattgtgatttgtcaaggcgcgattatagaccatatttgcatcacttaatttcttaaggttttccaccgtcggcgaagcattatatatcttttgcatactgtccaagatgtcttgttgacgaactctctcttcgtatgccttacgtaattctgggccatattcacgatattttttatctgcggcctggtatttgttccataaatcttgaatgattttttctattgttgcatcacgacgttcgttacgcggtctataatcattataatctggacgcgaagtgctgcttgtgtttgacgatccgcttggacgtccagtgtttgtattattgttactgggttgtgctgatccagattgtgaacccgtcgccccattgttttgtgtgctgccacgttccaaatagtttaaaaacaccgcatgtgcttcgtttattttcttcatcatttcagctgcatgcggatcgtttggatgtgcgtctggatgccatttttttgctaatgtgcgaaatgctttgcgtaactgttccgcattcgctgtggtcggtattcctaaaatttgtgctgcttcgctaggtgtcattttattttcttttatctttcttttgtcgttgttgttctttgttttgattgacctttggctaatactttttgactcgcagacttaaaaagctctggttcgatatacttcaacaattctttatcgcccgagataaagctgccatcaaaggcaaaagtcatatcatatgcttgccccttgttataaattgtttttgcaacacgatatgtcggggtgagaccgtcaagttgaatccacattctgattcgcggaatctgacttggccaatcgttaagaaatttccccagtgttgtaccagcgtaccgtttcatgaatgccattttagtttcatcatccaacaatacgcaaagtggttttgcgcgcatttctgcaataatttccaacattcctttatcactcatatcaactcctttttattatttggtttttacgcgtattttgtttttccttttgcatcaacccattcaaccatattatgcaccatactccttatgatgctggccccaataaacctttgcagatggaaattgccgtatcatttttactaaatcactttcaggcaaacgttttttaaacttttaatttgtttttcattcaataatttgtcggacatttttattcccctttttgttttttatttaacgttccatgacagattcgtgtttggtgacttttttcttggtcttatcagccgatttgttagccacgcgtttctttgcagaatcaaa

SEQ ID NO: 2533 - DNA, 14478 bp, synthetic construct
  variation 10190..10215: note = n is a, c, g, or t
  source 1..14478: mol_type = other DNA
  misc_feature 1..14478: note = Synthetic
gattcaaaacagaaagcaagtgacggcacaaaaacagaaaatgccgcgacccctgaaacagggtataaatcgtctgaacgcaccgcactggaaaatcagttattacagattgaaaccgccgcccgtgccgaagaggcacgcgacaccaccgcccccgacgctgatgcagaatagggcgcaaataaaaattcattcaccgcacaattcgtgcggtgtttttttgtgaaatcgttcccgatgacattatgcgccatatgtgaaaaaatcgtggtacataaccaatgggggggcgaaaatgtttctcagattaaaaatttgcacaactgtattattcctgtatgaaattatcgcggtgatattgctgcatctgccaaacacgtgcgcaacgctgtttggattgccgttttgttcagacgcggtgtataaatactttatcgtatgtgccgccgtgccaatgattgcgtttctgattgcaatgtggattcgtcaaattgttgtagcgcatcgccggcgtcattcggtattgcgtcgggcacgtggtgcggtgcgcgcaatcgccgaaaatgtgcgtgaccatgtcgcgggccacatcagtcaaccagacatggaaaaaatgattgcggcggcgttgatgatgggggtcaaacgttatgcgcgccgtcatggaaatattcgtcgctggttggacgaaataaataacccaaattattatgctgacgcatccgattttgacgatgccgaatatgacgatgaatatgacgaggacgagtcccgtgccccacgtcgcaattatcgcccgcatcacgaccgataaatcatatttccttggtatccggtatgcccccacgtggggcatattttgttgtggaaaaaaatatttgtcaatatataataggtgggacaaaaaggaaaataaattggcacagcagtgtattttttgtggtaaaaagccggaaaataaaaacaaagaacatgttattccccagtggctcagcaaactggtgggcagttatgatcacatctgtaattttggcttattgaccgaaaagcatattacgtttggcaaactgacatttccggcgtgcaccgcgtgcaatactaaattcggggaattggaggccgccgccaaaatcgtcttggaaaaagtaatggcgggcaacgccatcaccgccaccgaaatcaacacgctgttggattggttcgacaaggttcgtgttggcctgtggttgggacaactgatgctggtggatgaaaagcgcgacattgaaccccagtttcacatcgccgaccgcattggcacaaaagaccgcctgttgattgtcgaacgtttggccgatcccgtggcgcgtctgggattttccggtacaaacaccgaaacatttatgacatgccccagtgcgtttcaactgtgcatcggcgattacctgttcacaaatgcatctgaaatgggattggtggcaaaccgtttgggatacccacaaatatcaaaaatcagaaaaggcgtcgaaaccagttgtgatattaccccagggcgcggcaaaccaaaacaccccgtggtggcatcgttacaggcatcaccatatcgcacattgatttatcaaccaatgttcaaatgttttgcgcccacaacgcgcacggaatattacaatgtgccatacgtcctgtcacattcattggatatggaaaacggcgtgggcggtgtgttttaccagcgtggcgataacacggtcagatatctgggcgcaaacgacaaaataaatatcgtaccgcgcaagtcacccgaaaacgtatcactgtatcaaatgacggccaaggtgtacgatttgcagcgcagtgttttgaatctggtcgattacgccggccgcacagaatatttcaaatccgtggcagattcattaaagaatgaaacagaaatttataaaaaattgatgcacaaactgacccaacaccaacgttagtgggcgttgttatttattctcccagaaagctcgtattgacttaaaatgggcgattctgttgttgattttttattttgctctgcattcgtgttgcgttcccaaaatacaccgtctgtatatccttgtatggttggctcactctcggctgtttcaagacgcttttctgcccaagcacaatatgttttgtctaattctatgccaacatatttacgaccaagtttttttgcaacaacagatgttgtgccactgccaagaaacgggtcaaaaactacatcgcctttatttgaactggcaagaatgagttttgcaataagtttctcgggtttctgggttgggtgtgcagtattctctggcataggccaatatggaatagatatgtcgtcccagaaatttgaagggcacgtatctctgtatttgccggcggcagaatcaatccaatcttttggcttcccatcttgtttatatggtgcaataaccttgcggcgaatttttacatcgtctagattaaaaacccatctgccgttattagtcgcaaaccaaatgtcctccatagaatttttccagttttcttttgcaccgcggcctttttctcgttgccaagttatgcgatttctgatgttcaaatattttggtaaaatatttccaataatcaaactggttttccagtcgcagcatacatagacagacgcctcgtctttcaacaagggagttaccaattttaaccatttttctgtataatcaatgtatgcttgcgtgtgcatttcattgaatttatttccattataatctttggacaggttgtacggtggatcaacaatcaacaagtccacaaatttccttggtaaaaatttcattatttcgaaagtatcaccgtttatggttttgtttaatatattgtccaaagacaagtcgctgtctcttgaaagacatcgattgaaaaatgcaataccatcatccaatgagaaatcgatggtcttgttttttaaagatttctgctttccaaccatgattggaaatcatactaaaacaaacagaaaaacgccagaaaataaataactcggtctggaaagaatttttttatttttcataataacatttttcgccaattattgtgaaataaccagtttggtctttgtaatcacctgccttcagataacattgcgtaatgtctgttgctacattctgtgccgcgggtgtccatccgccatccggacactcgagacacgtcgtgtctgcccagtaatagttttcattgcaattgcaaaaattataattgtgatttgtggcgtgcggatgactatattcgttacattggatacatttagatatttgcggaacataaaaatagttttcttgacacaaatcatttcggcattgtttttctctgtgcatgccatcgttttccattacagcggttccgttcgggcattctgtgcatccactgctgtctacataactgtcagggccacaaccgtataccattacctcgcaatttgtcaaaaacacatgtggtatggcatccgtaacgatgccgtcatatcggacgctcacatattcataatccgtgtcaaaaattactaggtctttgccggcaccggtagtacctttgtcacaatacactgttttgaccccgtattgttcataaaataaatcggttattatttggctgccaagtattgggccgtatattgtttcccccatcgcatttgcatttgtggttgcaaatatgccaattgtaaaaattactctggctaatactcgaatttctgtcattgtctttgtcctttgttacaagtaaaaatccgccgaaagattggcggtcagggagttagcaaatctatagttgaaagattccgctgttttcaatatataacagacggccccctgaccagatggtcaaggacaaatacagtgcaaaatgcaccgtaatgcatataacgatgcattcgcaccgcaactataaggcttgctacagccccgaacccaatttccactgggttctcaacacagattataaatcaatcatataaattttgcaaacaaaaaaccgcgggtgaccgcggtaattctggtgccagttgtcggacttgaaccaacgaccctctgattacaaatcagatgctctaccagctgagctaaactggcaacgggcattactatacatggttcagaaaataatttcaagtgtaaaaatcataaatcgcttgattttatgcaataaccgtaaaaaatatacagcaaagggcacagattatgattaaattaccagaattactcgcaccggcgggcacgctggacgcattcaagaccgcaatcttgtacggcgcggacgcaatttatgccggtctgccggggttttcgatgcgggcacgcgcaaaaatcaccaccgaagaggtaaaacagggtatagaactggcccatgccgcaggcaaacgggtgtatctggcgttcaatctgttcgcgcatgaacgcgaatacgcaaatatgccccgtgtcagcgcggtgatagattacctgcgccccgatgcgctgattgttgccgaccccggggttatgatgtgggtgcgtgaacatcaccccgatattccaattcatgtatcgacacaggcgaatatatgttcgtcggcgtcggtaaagttttggcaaaatgcgggcgcaaaattgtgcgtgttggcacgcgaagtcccttttaacgaatttcgtgaaattcgcgccgcatgccccgatgttggtctggaaatatttgttcatggcgcaatgtgtatgagttattcgggccgttgcctgttgtcaaactttatcacggggcgtccatcaaaccgcggggcgtgtgcgcaactgtgccgatggaaatacgatgccattttgcgcgaaacccaatccggcgttgaaatgccactagaggaagatgcccgtggcgcatacatcatgaactcgcgcgatttgtgcctgatgccacgcttggcggaaattatcgctgcgcaccctgattcattaaagatagagggtcgcaatcgcagtgaatactatgtcgccatggtgacaaatgcatatcgctgtgcgctggatgcgtatgctgccgatcctgataattttgaccctgcgtcatttatggatttgctgaataaattggaaacgcgcgggtacaccacggcattctttgacgggaatttgggcccatcggcgcacgattatgaaacaacgcgttcgacatctgattggcatgcggcgggcgtggtaaccgcggtggatgcggacaaaatcacactggaattgcgtaatgaattgcgcgccgataccgatatcacattcgtattgccgggggtaatcggtggggcgacggtgcacctgaatcaaatcataaatgcaaaaaatggcgacgcattgccaaaaatgtcggcgggccagcacaacagtgttacaatcccacgtgcatggatttcgccagaaaactgggaaaaaattgcgccgtgcgttgttgcataccagcataaataaattttgcaagaaaaagatttctttgactttattcccaaaataggtataccctgataaatggttatgtcgcaaaaacacactgttgccaataatgggcggtgtggatatgacctccggtcttgccaataatgggggccgcagaatttcatcacaaccaaggagttaatttgatgaaaaaaacaattacgttggcgacggcgatggctgcgctgaccgcgcctgcaatggctgcaaatatcccagggccgtattccacggttcataacatggaaaacccgttgtatttaccggaacagaatatgttctattccaaactgtccaacggtatcatgttaaaggttgccgataattcatgggcgcaccgcgaaaaaaatcacagcggcggtttcgaatttccaatcgtccgtgtccaagaagaaatgggctatggtattacagatcgttgggcggcacactttttgttacagtacacccacgataacgacattggccgtaccggtctgtccggcggtcgtttgggtacaacatatcgtatcttgaacctgtacaatggttttgtgtgggacgtgtatggtgacatccacttgggtggattgggtgaaatgcgcggcacatacaatgtaaagggtgacctgaataaccccagcagtgtgtacggcgtgtttgattacgataactattccgatggtatgtggggattccacgcggggacaaaatttggccacgtatgggacaaatttaccgcacaggcatttgttgaaatcctgcacacattcgcagatgacaacaatatgatacgtgttgtcgggaacaacagtgtaaagcatgctgctggggatgtgattaaattacctgcgacaacggcggcacagttggcgttggcgggtgcaccaaaccagatttcggccaaaatcaagggctatacagacatcagtgctggtgtccaagggttctatgaattttcaacccgttggagcatgggtggctggttcaaattcaatcgtcactctgatcatggcgttgataaaatcacaaccgaaatgccgaatgcgcaaacacaaagattggcgcgtgcgctggaaaaacagttggctgatatggaagatggttgggacgaatacgttatcggtgcatcggtttcgaaccagttgactgataacacccaaatcacgctttatggcgaatacacactggacgactcgcatcgtaaatcccaaaacgggacagatgtaaaggccgaaatgggcgttcgcttgaactttacgttctaaacataaaaacaaaaaacatattggactaaatcccgcgtaatgcgggatttttgttttgtactcttagggatttttatgatataatgtacgcaaaaggaaatggattttacatgaaaaaatctgctgtttttgccgttttgacgggtgttttggcgggtacgtcatttgacgcgcgtgccgcgtatcccgtgtatcaggcggcgtacccaaccacatatcaggcaaccaccgcccaagggcaggttatcgcattgccaaatcaaacgtcggtcataaccagtaccagtttgccggccaatacccgtgtcacgggatctttgccgcgtgttggatcatcggcaacaaatgcgggccgccagtattaccagccggcggactatgaccgtttggcggacagtggtctgtacatcggtgtttctgcagggtattctgcgtcaatcacgggcagtatgtccgccgattatgccggcgaagataaatcgtatgtcgtccccggcgcattcaaggatgcaaacttttcatctgataccgtgattccattacaggtgtctgttggtgcggcaatcaacaacgacgtgcgtattgatttctcgttcttgcgttattcgggccttggttacccagacacggttgaatccgccgatggtaatggtggctatatcacgggcaaggtcagtggtggcgcaatcaccacaaacacgacaatgttgaacgtgtattacaatattgattcttatactggctatctggcgggtggcgcgttgcgtccgtatattggtgccggcgttggtatctcgctgaacacaatcgccgactatgttgtgtatgatggcacgttctatgacgtgatggatccatcagcggcgggtgcgggcgacctgacgggtatttcggacgtttatgcataccacaatggtggcacaacagaacagttggcgttttcggtcgaaggtggcttgaccactgaattagacggcggcattaaattggatttctttgtccgctatgccaatttgggcaaggttaaaacatcaggcagtattgttgtttcccaaaccgaatggttgggtgacggtgcgggcggtgaataccaagcgccatatgacagcgtgttccactataccaactggtacgaaagtggccgtctgggcatggttgatttgggcgtccgcgcacgcttgcaattctagttttttataaaagccggagtagaggggagagaatgaagtttaattattatctattatctatgctctatgctctatgctctgcgtcggcagacgctgccgtgcgtgtcggtaacgcatcgcgcagttatgcggccggctatcaacaggtaaatgcccaacgtgaacagattgcagcggccgcggcggtcgccgccacaccaaccgccacaacacaatcggcggatacggaaacaaacctgccggtgcgggtggcaaatcgtgaattggcgcaaaagttatcgcgtggcgaaacggattctcgcgtcagtatcgaaacgctggattcttgtgcaatggtgtacccaaatggtgaatttgcatgggacacaccgacgattggcaatggcgcgggtggtgcatcaacatgcgtcgcggttgttgaattacgcggttatcaaatgggactggatggttctgatgccgttttggcgcgcgcaaatttggcggcgggcgatgcggttaaatgtaatatttctgactttcctgaattttcatacaccaccgacgcggcacaggttacattccccgcggacaatgaaccgacccgcgcggacgtgattcaggtattaaatgcagaacagaaacaaaatgccggtctgcgtattgcggcgggcacggtgattggcggtctggcgggtaatgccgccggcaaaaatgaaatcggcagtgacagcatattgggcggtggcaaacacaaaaccaccggcacaattattggcgcaatcagtggcgcggccctgatggcgggcaatgcctattcgggcaaggttgcaggtgatacaatcctgtcaaccggtgtcaacgccgccgcgggcagtatgattggcaatatcgcggccagtggtgattccgtcctgcgtatcgaggattgcaaaatcccaactgtgaccgcagccaaagaaaaaacgaccaccgcgaccagcaacgcaaacaccgatgacaaggcaaccgctagcgcgaacaataacgccaatgcggacgataaagccgccgaaccagaaaataaaaattccaagtgcctgtggggtgttatcagaaagagtacagcactgtctggtaaaaacgcctattacaacactggtgacgaaacaacattggtgtgtgaatcagacgacaccggttgtaaacaagaaaccctgttgaatattacactagaggcatacccgaacaaagacattgaagccgtggccaaggaaggtttcgaaaaggtcaaagctgattcagcaaaacagttttacctgaccgaaaaaaacgaaatgaaaaatggcgcaaagcctgacaatagtgcgatttatgccaaaatttccagtgccgccattgccgacggcgcgcagattcctgcgatgattgccgacgtcaatgacaaggcgtttggttacaagcgttctgattgggccaaattgaaatcggacttgtctgggcatacgattctgggccgcacgtccagcggtactggctatgcattggacggcgaatacagcatcagcgacttttacccaatgatggttgatgcgtccgatggtggtatcatcgactttggcaacaaagccagattaaaaggcacattgattggcgcgggtgctggtggcgcattgggcgcatatgccggttaccaaggggcacaatccgatgtcgaaaaccgctgggttacggctgtgcgcgaatacaaggattcgttgcagaaaatatactgcgccaccggaaaacgattcttgggctattacaacgacgaaatcgtaatccccacaatgaccacccgataaaacaaaaacacccgcctgcgggtgtttttttacgcctttgccataaaaaagccgtccccgttttggggacggcatcaggggatacataatcgtaaaaccccacagaaaatattctttattatataaacggttgcttctcaaatcgtccgtcaataaagatttcttacacacccatgttatgtcagattacccaaaaggtcaagttttttgtttttatggtggtgggttgtaatttgtgctttttgggtctatatttaatacaacggtagaaacaaagaggaatgcgcatgtctttgatttttggattcgatttgggtattgccagtatcggttgggctgctgttaaaatatcagatccaacggcatcggccacagatgcagccgcaccagacaaacgtccggcgggtgaaatcttgggtgcgggtgtgcggtgtttcgatcaggcacaaaatgccgccgaccgtcgtatgnnnnnnnnnnnnnnnnnnnnnnnnnntcgtatggtgcgtggtgcgcgccgcagaatcagacatcgtgcacaacgtatgcgcgaaattcgcgccattttacgcaaatataatctgattgatattccagaaccaaaatccaatgggaaaaataatttctatctgaaccgtgatacggatataaacatctggcaactgcgtgcggttgacgcgtttacgcgcaaactgaccccacgcgaaacgggacgtatcttgtaccatttggcaaagcatcgcgggtacgatgatataacataccccgtgtctgctgatacaaaatcggaaaaggcagacaacgcagatgccaaggaagaattgaaagccatcggcgaaatcaaacggaatttggccaaactgcataacgaaaatccaaaccaaacaatgtgtcaaatgttgtatgcaatcaatcatagccaacatattaaaatgcgcaacggcagaaaaagcggtaccaaaatcgcaaaagacggcacacaaaaaacagaattgcaatcaccgtattccaattctattccaaggtcgcaaatcaagcgcgaggcagaaatgattttgcgcgcgcagcgtgactttggtaatgatttttcgaatgtgtttacgaaatggtttgatgttgcattccgtcaacgtaaatttaatgaatctgcatcgccattggccaaatctatcgaggaaatgcgtggcaaatgtccattcacgaatgaacccgtcgcgcccaaggaatcaccaacggcgcaaatgtttgttgcattgaccaagtgtcgtcaaaatgattttactgttgaagaaaccaaaaaaattatagatgagttatataaaaagaaaacgggattaaaatatgccgatgtgcgtgaactgttgaaatgggacgacgacagacggttcaaaacgttgaactattcccgtacatacgacaaagaaaacaagatattgattgaaccggacatcaagaaaattgaagatcggaaattctacgcatttacggggtggcacaaactggcaaaatacacaactgatattgccacaatggacaagatatttgatatcatcgcaacccagaaaaccccagaaaatatcgaacgtgcggtgtctgaaatattgccagaacacgccgcagcaatcgcacaaattaccagttcggaatttataaagttatctatctctgcattgcaaaaaattattcctgaaatggagaaaggtaaaaagtataacgaagcggtcgcagctggtctgaaccaagatttcagggcgcaaaacgtatcgtatataaatcgtgacgacggcgcgtccgcggggtatctgcaccagataaattggtgcttgctgggtaatcgcataacgtcaccggttgcaaagcgaaccctagggcaattacgcaaggtttataatgcgatggtttaccggtttgggtcgcccgacagaatccatttggaaataggtcgtgaattaaaaaattcacccgatgatatcgcgcgcatgaaacgcgagcaagaacgcaatcgtcaggcaaccgcagatgcccgcaaagagtatggcaaaaattactttaagtataaattgtatatggagcagggtggcaagtgcccatactgtaatgcgacattggttgcaggtgattgggccgcatacgaaattgaccatattttgccatattcgcgttcgcttgataattcacagagtaacaaggttttggtctgccacgaatgtaatcaacgcaagggcagcaaaacgccgtacgagttcctgacgtctgaacaattttttgatatgacggtgcgtgcacgggcattgcataatcctgcaaagttcaaaaaactgacgaacaccgatttgccccagagcaatgacgaccaaaacggttttatcgaacgtaatgcgaatgataatgccacgattgccaaattcgccgcggaatatttggaatatggtatcgattggtctgcgtcggatgatataaaaaagcgcgtattggtgcgtacgggttcgctgacggactatctgcgtcaccagtggggtttggtcaaaaatcgtgatgaatcagaccggcatcatgcccaagacgcgattgtaatcgcatgtgcgacacagggcatggtaaaatatctgtcaacgttgtcggcgcgatttgaaaacaaatatgcactgattcaaaaaaatggtcaggcatggtacaatgcactgaaaacgtccatccaagaaccatgggacggttttcgtacagatgttatttcttgtttgggtaatgtcattgtttcgcggccaccacgctgtaatgccacgggcgcggcacacgatgaaacaatttacgccgatccaaaatcatatcgttcaaaacgtggtatgaataagaatcgcgacaaggggtcgctggaaattcgacatggtcgcgccgttcgtggcaatatgttccgatttgatatctggcgcaatgcgcgtggcaaatacgtgtgcgttccgatttttgttaccgataccaaggggaaagatgacgatgccttcaaaatcccagatggtgaatttgtctgttcattgcacaaggacgattatgttcgcctgaccaccgcagatggcatgtatgaagggtatattactcaaatggatcatggcaggaacttcatactgtatcgtcaagataacagcaaaaatattgtcgtcacaaaggcggtgggcaaatgtacaaacattgaaaagtttgctgtgtcattactgggcacaccaaaaccgataaaattaccagaacagcgcacgccggttgtaaaacgaaaatagtgcactatatcaggaatgtgggaaaggatacaaacaaaggacaattaaatgtcttggcgtattctgaccctgacaaatccatgtcggatttgtgttcggcacaaacaactgcactggactggtgacaccggtggtgtccaagatattccactggaagatatcgcggtcgtcgtactggaaaatccacagattcaaatcacatctacattgatgtctgaattggctgaaaacggcgtggttgcgttttcttgtgacgcgtcgcacctgccgaatggtgcattctttccttttcataataattccagatatacagaaattgcgcatgcgcaaattgcctcgtcattgccgtttcgtaaacgcatgtggcaagagattgttaaacaaaaaatccgaaatcaatcggcaatcttaaagttgtgcgacaaccccgcatataaacgtttagaaattttagctgaaaatgtcacgtctggtgattccaaaaatatagaggggcttgccgctcgtatctattggtctgccctgtgggaaaatttcaatcgcagcgatgatgccgatgtgcgaaatcatgcattgaattatggttatgccatattgcgtggttgtgttgcccgcagcgcggttggtgcgggtctgttgccattttacggcgtgcaccattgtaacaaacttgataatttctgcatggtcgatgatatgattgaaccgtggcggccatttgtggactttattgtactgtcttttgattttgatgggtgcacacatttaaccccagatatcaaacaacggttggtgtcggtattattgcacagttgtgcctttggtggtgtccgccattcgatactgaatgccatgccgctatatgcagaatccgtggcaacgtgcttttgtaataaaaccttagatgcattgaaattgccatctataaaatcagccccagaaatagtgaatacccagaactaacatgttgtacaatcgtcaggaaaaatttatgcgtataatagtattttttgatttgcccgttggtacaaagcgtgaacggaaatacgccacgcgtttcagaaatgacctgttgaacgatgggtattatatgatgcaattttcggtctattcccgaatagtcaagggactggccggaatggaaaagcatttgcaacggttgcgtcatttgacgccaccatctggttcgatcagggttttaaccgtcacggaaaaacaattcgcagatatgctgtttttggttggcgatgcgccaacggcggaaaaaattggttcgcaacaattactgatgttttgattaaaaaacgatacgattcggcatcaactgatggcaatacgtatgtttttttgttgaatataatgcacaaaaacccactttaatcagtgggtttttgcgcgtctattatatcaaagacgatttgagaagcaacctataacatatcatccgcgtgtaaaatgtatatgtaaattatatcaaagacgatttg

SEQ ID NO: 2534 - DNA, 11937 bp, synthetic construct
  misc_feature 1..11937: note = Synthetic
  source 1..11937: mol_type = other DNA
cctggtttcaggaaaattgggattcccaaacgtctctaaaattcacaaaagtgacgatcgcgcgaaaaactattctgatgtgacaccggggcgcaatagggcggtgcatccggttgtaatgaatatgatggcgtcacccatgcgcacaattatatatcaaccaatttttcgtgcgtttaatgcagaccagagacaaatgtgggacaatccctatgttcgtgcacattcattaagttttgaacacggtgttggtggaatcttttaccagaaaaacaataacaccgtgcaatatttggatggtgaatcgcgggtgaatatttccccaaaacaagatacgccatattgcgatgttgaaaaggtgtatttgcgcactctctcgttgcaaaattatgttttggaaaatcgcattgatttcaaatcggtcagtgacgcatcgcgccgatgttacaatgtgttgatggcaaaaaacaatatgatattgcgtgccaataactgtcgataaaatgtgcccgtcaactggcgggcattttttgttatattacaaacaaaaaaccgcggtttcccgcggtaattctggtgccagttgtcggacttgaaccaacgaccctctgattacaaatcagatgctctaccagctgagctaaactggcaacgggctttactatacatggttaaaaaaataatttcaagtgtaaaaatcataaatcgcttgattttatgcaataaccgtaaaaaatatacagcaaagggcacggattatgattaaattaccagaattacttgcaccggcgggcacgctggacgcattcaaaaccgcaattttgtatggcgcagacgcaatttatgccggtctgccggggttttcaatgcgtgcgcgtgcaaaaattacagttgacgaggtaaagcagggcatagatctggcccatgccgcgggcaaacgggtttatttggcttttaatctgtttgcgcatgaacgcgaatatgcgaatatgccccgcgtcagcgaagtgatagattacttgcgccccgatgcgttgattgtcgccgaccctggggttatgatgtgggtgcgcgaacatcatcctgatattccaattcatgtgtcaacacaggcgaatatttgttcatcggcgtcggtaaagttctggcaaaaagcgggcgcaaaattgtgcgttttggcgcgcgaagtcccatttaacgaattttgtgaaatccgcgctgcgtgccccgatgttggactggaaatatttgttcatggcgcaatgtgtatgagttattcgggtcgttgcctgttgtcaaactttatcacggggcgtccatcaaaccgcggtgcgtgcgcgcaactgtgccggtggaaatacgatgttatcttgcgcgaaaccgaatctggtatcgaaatgcccattgacgaggattcgcgtggcgcatacattatgaattcgcgcgatttgtgtttgatgccacgtctggcggaaattatcgccgcccgcccagattcattaaagatagaggggcgtaatcgcagtgaatactatgtcgccatggtgacgaatgcatatcgttgtgcgctggacgcgtatgcggcggggcctgataattttgaccctgcgccatttatggatttgctgaacaagttggaaacgcgcggatacaccacggcgttttttgacggaaatttgggggcagacgcgcacgattacgaaacaacgcgttcaacatctgattggcacgcggcgggtgtggtaaccgcggtggacacggacaaaattacactggaattacgcaatgaattgcgcgccaatacagatattacattcgtgttgccgggggtaatcggtggcgcaacggtgcacctgaatcaaatcataaatgcaaaaaatggcgacgcgttgccaaaaatgtcggcgggccagcataacagtattacaataccgcgcgcgtggatttcggcagaaaactgggaaaaatttgcgccgtgcgttgtcgcataccagcataaataaattttgcaagaaaaagatttctttgactttattcccaaaaagggtatatcctgataagtggtcgtgtcgcaaaaacgcactgttgccaataatgggcggtgtggatatgacctccggtcttgccaataatgggggccgcagaatttcatcacaacgaaggagttatttgatgaaaaaaacaattacgttggcgacagcagtggctgcgctgactgcgcctgcgatggctgcaaacattcctgggccgtattctacggttcataacatggaaaatccgttatatttgccagaacagaatatgttctattccaaattatctaacggtattatgttaaaggttgccgataattcatgggcacaccgtgaaaagaaccacgatggttcactggagtttccaatcgtccgcgtccaagaagaaatgggctatggtattacagatcgttgggcggcacactttatgttgcaatacacccacgataacgacattggtcgtaccggtctgtccggcggccgtttgggtacaacatatcgtatcttgaacctgtacaagggttttgtgtgggacgtgtacggcgatatccacttgggtggtgtcggtgaaatgcgcggaacatacaatgtaaaaatgaatggcggaaaattctcgggcgtgtttgattatgataactattccgacggtatgtggggtttccacgcgggtacaaaatttggtcacgtatgggacaaatttaccgcacaagcatttgttgaaatcttgcacacatttgccgatgacaacaacatgattcgcgttgcaggtgataacacaaataagaatatacctgcggcgatgcttggtattactgcacctggtatgaatttgacggccgaacaattcttggcgttggcgggtgctccgtacagcatttcggccaagataaagggctataccgatttcagcgccggtgtccaagggttctatgaattttcaaaccgttggagcatgggcggctggttcaaattcaaccgtcattctgacaagggtattgataaaattacaactgaaatgccgaatgcacaaaccaaggcgttggcagctacactggaaaaacagttgactgatatggaagacggttgggacgaatacgttattggtgcatcggtttctaatcaattgaccgataatacccaagtaacggtctatggcgaatatacatttgacgactcgcatcgtaaatcccaaaacgggacagatgtcaaggccgaaatgggcgttcgtttgaactttacgttctaaacataaaaaataacaaatattggactgaatcccgcgtaatgcgggatttttgttttgtactaaatacttttatgatggggatttttgtgatataatgtacgcaaaggaaatggattttacatgaaaaagtatgctgtttttgccgtgttaacgggtgtttttacgggcgtatcatttgacgcacaggccgcgtatcctgtatatcaggcggcgtacccaacaacatatcaggcaaccaccgcacagggccaggttatcgcattgccaaatcaaacatcggttacaaccagtaccagtttgccggcaaatacgcgtgtgacgggggctttgccacgcgttgggtcggcagcaacaaatgcgggacgtaaatattaccagccagcggactatgatcgtttggcggacagtggtttatacattggtatttcagcggggtattctgcatcaaccacgggcagtatgtccgccgattacgccagcgaggaaaaatcatacgtcgtccccggcgcattcaaggatgcaaactttgcgtctgataccgtgattccattacaggtatcggttggtgcggcaatcaacaatgatgtgcgtattgatttttcgttcttgcgctattcagggctcagttatccagacacggttgaatctgccgacggtaacggcggctatatcacgggcaaggtcagtggtggcgcaatcaccgcaaacacgacaatgttgaatgtgtactataatattgattcttatactggctatctggcggggggcgcgttgcgtccgtatatcggggccggtgttggtatttcgttgaatacaatcgccgactatgtcgtgtatgatggcacattctatgatgtgatgaaaccatcggcggcgggtgcgggtgacttgacgggtatttcagatatctatgcataccataacggcggcacaacagaacagttggcgttttctgtcgagggtggtttgaccaccgaattggacggcggtattaaattggacttctttgtgcgctatgcgaatttgggcaaggttaaaacgtcgggcagtatcgttgtttcccaaacagaatggttgggtgacggcgcgggtggcgaatatcaggccccatatgatgctgtgttccattataccaactggtacgaaagtggtcgcctgggcatggttgatttaggtgtccgcgcgcgcctgcaattttagttttttataatgccagagtagggggagagagaatgaagtttaactattatctattatctatgctctatgctctatgctctgcgtcggcagacgccgctattcgtgtcggcaatgcgtcacgcaattatgcggccggatatcaacaggtaaatgtccaacgggaacagattgcggcggccgcagccgcaccagttgccacaacacaatcggcagatacagaaacaaacctgccggtgcgggtggcaaaccgtgaattggcgcaaaagttatcgcgtggcgaaacggattcacgcgtcagtattgcaacactggattcttgcgcaatggtatatccaaatggcgaatttgcatgggattcgccgacggttggaaatggtgcgggtggcgcatcaacatgcgttgcggtcgttgaattacgcggctatcaaatgggcttggatggttctgatgttgttttggcgcgcgcaaatttggcggcgggcgatgcggtaaaatgcaatatatctgattttccggaattttcatacaccgccgacgcggcacgggttacattccctgcggaccacgaaccaacccgtgcggacgtggttcaggtattgaatgcagaacagaaacaaaatgccggcctgcgtattgctgcgggtacggtaattggtggtctggcgggtaatgccgccggcaaaaacgaaatcggcagcgacagcatattgggcggtggcaaacataaaaccactggtacgattatcggcgcactcagcggtgcagcactgatggcgggcaatgcctattctggcaaggttgcaggtgacacaattctgtcaactggtgtcaacgccgccgcgggcagtatgattggcaacattgccgccagtggggaatctgtcctgcgtatcgaggattgcaaaatctccgacgtacctgcatccacgaaaaaaacaaccgctgcgaacagcgacgcaaacgcgaacaaaaaagtcacagaaccacagagcaaaaattccaaatgtctgtggggtgtcatcagaaaaggtgcggccctgtctggcaaaaacgcctattataacactggcgacgaaacaacattggtgtgtgaatcagacaacacaggttgcaagcaagaaacattgctgaatattgaactggcggcgtatccgaacaaagacattgataccgcggccaaggaaggttttgaaaaaatcacagcagattcaacaaaacgtttttatctgactgaaaaaaatgaaatgaaaaacggcataagtcctgataacggcgcaatttatgctcggatttccaatgccaccgttgccaccggcacacagatgcctgcgatgattgccgacgtcaacgacaaggcgtttggttacaagcgttctgattgggccaaattgaaaacagatttatcagggcatacaatcttgggccgcacgtccagtggtgctggatatgcattagatggcgaatacagcatcaacgacttttacccaatgatggttgatgcgtctgacggcggtattattgattttggcaacaaggccagattaaaaggcacattgattggcgcgggtgctggtggtgcattgggtgcatatgccggatatcaaggggcacaatccgacattgaaaaccgttgggtcacggccgtgcgcgaatacaaggattcgttgcagaaaatatattgcgccacaggaaagcgattcttgggctattacaacgaccaaatcataattccaacaatgaccaaccgataaaacaaaacacccgcctgcgggtgtttttatgtcgtcttaatacaacagaaaccgtccccgcagggggacggtttcaggggatacataatcgtagaaccccacagaaaatattctttattatataaacggttgcttctcaaatcgtccgtcaataaagatttcttatgcgtacatgttatgccagattattccaaaggtcaagttttttgttttttatggcaacgggttgtaatttctgattattatgcctatattcataacaaaggtacaaaacaaagaggaacgcgcatgtctttgattttcggatttgatttaggtattgcaagtatcggttgggccgccgttaaaatgtcagacccgacggcatctgatacagacgctgccgccccagacaatcgtcctgtgggtgaaatcttgggggcgggtgtacgctgtttcgatcaggcacaaaatgctgtcgatcgtcgtgtggcgcgtggcgcacgtcgcagaatcagacatcgtgcgcaacgtatgcgtgatattcgcaaaattttacgccaatataatctgattgatattccagaaccgaaattcaatgggcaaaataatttctatctgaaccgtgatacagacatcaatatctggcaactgcgtgcggtggatgcgtttacgcgaaaattgacaccgcgtgaaacggggcgcatcttgtatcatttggccaagcatcgtgggtacgatgatataacatatcctgtgttgaccggcgcagtgccagaaaaagcggacgatgcagaggccaaagaagaattaaaggccattggtgcaatcaaagataattttgcaaaactgcataacgaaaacccagaccaaacaatgtgccaaatgttgtatgctactgaacacggtcagatgcgcaacggcagaaaaagcgttatcaaaattacaaaagatggtacgcaaagaacagaagagcaatcatcgtattcaaattctattccgcgttctgaaatcaagcgcgaggcagaaatgattttgcacgcgcaatgcggctttggtaatgatttctcagacgtgtttaagaaatggtgcgtggttgcgttccatcaacttaaatttaatgaatctaaatcgccattggctaaatcgattgagaaaatgcgtggcaaatgcccgttcacaaacaaacctgtcgcgcccaaggaatcaccaactgcgcaaatgtttgttgcgttgaccaagtgccgccaaaatggttttacggttgctgaaaccaatgctattattgacgcattgtataaaaagaaaacaggactaaaatatgctgacgtgcgcaaactgttaaaatgggacgatgacagccagttcaaaacattgaactattctcgcacatacgacaaagaaaataaaaagtggattgagccagacgtcaagaaaattgaaaattcgaaattttacgcatttacgggttggcataaactggccaaatatacgactgatgtcgccacgatggacaagatatttgatattatcgtaacccagaaaaccccagagaatattgaacgtgcagtgtctggaatattaccagaacacgccgccgcaatcgcacaaattaccagttctgaatttataaaattatctatatccgcactgcaaaaaatcattccagaaatggctgccggtaaaaaatataacgaagcggtcgcagacggtctgggaaaagattttagggtgcaaaatgtatcgtacatagaccgcgacaacggtgtgtctgcgggttgtctgcaccagataaattggaatgcgctgggaaatcgtattacatcaccagttgccaagcgaacacttgggcaattacgcaaggtttataacgcaatggtttatcgatttggtgcgcctgacagaatccatttggaaattggtcgcgaattaaagaattcgcccgatgatattgcgcgtatgaaccgcgaacaggaacgcaatcgtcaggcaaccgaagaagcccgcaaagaatatggcaaaaattactttaagtataagttgtatatggagcagggtggcaagtgtccatattgtggtgcgacgttggttgcgggcgattgggctgcatatgaaatagatcatattttaccatattcacgttcccttgataattcacagagcaacaaggtcttggtctgtcacgaatgtaatcagcgcaagggcaacaaaacgccatatgaatttttgacaacagaacaatttcacgatatggcggtgcgtgcacgggcattgcataatcctgcaaagttcaaaaaactgacaaacaccgaattgccccaaagcagtgacgaacaaaacggatttatcgaacgtaacgcgaacgataatgccacgattgcacgatttgccacagagtatttggaatacggtattgattggccagaatccgacaatataaaaaagcgcgttttggtgcgtacagggtcgctgacggactatctgcgtcaccagtggggcttggtcaaaaatcgcgatgaatcagacaaacatcacgcccaagacgcgattgtaatcgcatgtgcaacacagggaatggtaaaatatctgtcaacgttgtcggcgcgatttgaaaacaaatacacactgatagaaaaatacggacaagcatggtacaatgtgctgaaaacctctgtccaagaaccatgggccggttttcgtactgctgtgttttctctcttggataatatcattgtgtcgcgtccgccacgttgtaatgccacaggtgcggcacacaaagaaacgatttatgcaaatccaaagtcatatcgttcaaaacgtggcttgaataaaaatcgcgacaaagggtcgatgaaaattcggcacggtcgtgtcgaacgtggcgatatgttccgttttgatatttggcgtgatgcgcgtggcaaatatatgtgtgttccgatttttgttgctgacaccaaggggaaagatgataataatttcaaagtcccagacagcgaatttatctgttctttacacaaggatgattatgttcgcctgaccaccgcagatgctgtgtacgaggggtatattactcaaatggatcacggcacaaactttatactgtatcgccaagataacagccaaatacaagttgtaaaaaaatctgttggtaaatgtacaaacattgaaaagtttgctatgtcattactgggcacgccaaaaccgataaaattaccagaacagcgcacaccagttgtaaaataaaaatagcgcactatataactggtaacgggaaaggatacaaacaaaggacattaaatgtcttggcgtattctgaccctgacaaatccatgtcggatttgtgttcggcacaaacaattgcactggactggtgacgctggtggtgtccaagatatcccattagaagatatcgcggttgtcatactggaaaacccccagattcagattacatctacactgatgtctgaactggctgaaaacgacgtggtcgtattttcttgtgatgcatcacacctgccaaatggtgctttctttccatttcataataattccagatatactgaaattgcgcatgcgcaaattgcatcgtcgttgccatttcgtaaacgcatgtggcaagaaattgttaaacaaaaaattcgaaatcaatcggcaatcttaaagttgtgtgataatcccgcatataaacgtttggaaattttggccgaaaatgtcgcgtctggtgacactaaaaatatagaggggcttgcggctcgtatctattggtcagccctgtgggaaaatttcaaccgcagtgatgatgccgatgtacgaaatcatgcattgaattacggctatgccatattacgcgggtgtgttgcacgcagcgcggttggtgcgggtctgttgcctttttacggcgtacatcattgtaacaaacttgataatttttgcatggtcgacgacatgattgaaccgtggcggccatttgtggattttattgtgctgtcatttgattttgatggttgtgcgcatttaaccccagatatcaaacaacgattggtgtcggtattattgcacagttgtgaatttggcggcgtgcgacattcggtgctgaatgcaatgccgctgtatgcagaatccgtggcaacatgtttttgtaataaaaacttggatgcgttgaaattgccatctataaaatcagccccagaaatagtaaatacccagaactaatatgttatacaatcgtcaggaaaaatttatgcgtataattgtattctttgatttgcctgttggaacaaagcgcgaacgaaaatatgccacgcgtttcagaaatgatttgctgaacgatggatattatatgatgcagttttcggtttattccagaatagtcaaggggctggctggaatggaaaagcatttgcagcggttgcggcatctgacgccaccgtctggttcaattcgggtgctgaccgttactgaaaaacagttcgcagatatgttatttttggttggcactgcaccaacagcagaaaaaattggttcccaacaattattgatgttttgataaaaaacagaaccgattcgttaaaaataaaacacaaacatgcccgtttttgatattacaaacacataaaaacccgcaaatttcagcgggtttttatgtgtctattataccaaagacgatttgagaagcaacctataacaagacgcactcaacagcaccaatatgcaggattataccaaagacgatttgagaagcaacctataacaacaagtatacgcaatgtttaaccaaatcaattataccaaagacgatttgagaagcaacctataacaggtcaggattatcaaccacgtatcgattcattataccaaagacgatttgagaagcaacctataacctatactaagggcatatcaataaggacataattataccaaagacgatttgagaagcaacctataacatgtatatttcattgttgatattttctttgattataccaaagacgatttgagaagcaacctataacccagccatgttatatatttgtgccgcttgtattataccaaagacgatttgagaagcaacctataactgtagttgctgtcgtaatacccgaccgtcaattataccaaagacgatttgagaagcaacctataacccattctgtggatttacccacgtttcttttattataccaaagacgatttgagaagcaacctataactccaaaatgcaacctatgcatttaccacatattataccaaagacgatttgagaagcaacctataactggtatgtccagaaattcgttgccgatggtattataccaaagacgatttgagaagcaacctataactgccgttgccggttatgttgggtggaaaaaattataccaaagacgatttgagaagcaacctataacgaaccgcgccgcattgcaaccattatgcgaattataccaaagacgatttgagaagcaacctataacaatgtgtcaaggattatgttgagtgcgtcaattataccaaagacgatttgagaagcaacctataacagtgattccatactaaacggtgtggaactgattataccaaagacgatttgagaagcaacctataacttgctaacgcttgctcgcacacacgccgatattataccaaagacgatttgagaagcaacctataaccaaaattacgttcaataaacgtattgcgaaattataccaaagacgatttg

SEQ ID NO: 2535 - DNA, 23474 bp, synthetic construct
  source 1..23474: mol_type = other DNA
  misc_feature 1..23474: note = Synthetic
cctgctgcttgtccgcaggccaatggcggatgttgtcataaaccagcatgaattccgccagcgaagccacgtcgaagctcgcgccttcttgaaacaaggtgcgtacaatctccggcgaggaattggctttcaccgcataataagcctgcaccttcggcagatggcttttgaagcgggcataattttgccggatgatgttatggtccaccacgattaccggagtgccatgttggcgggctatgtcctgcaaggcagtttcattcataactttgctgcgcagcgcaaagttgcagtggcgcttgggccgggtctagcaaaaaatgcaactttcaatatcccgactcttaacgccttgatcaacggaatgccccatttatcgtgcgtactgttggcatatcaagtttgccgcaatccggcccgactggtaaatggtcggcaggccactgccggggtgggtgccaccgcccaccaaataacaagcatcaaactcttcaaattgattgtgtggccggaaaatgagcatctgacccagcttgtggctgaggttgaacgtggcaccacggtaaatatgataatcctgctcccattctaagggcgagatgaccttttctacgacgatatgttggcgaatgtccttcaattctgttttagattcaatttgccgcaaaaccagctcccgaaatcggggtttctctttttcccaatcaatgtttgcctggcgatttggaaccggcaccagtacgtaaagggtggattttccgggaggagccagcgtcgagtccaaacggctggcattttgcaaataaaacgaagggtcctccgaaagccggccattttggacaatatctttgacgtttttctcgtagtcctgggcaaaaattatgttgtggtggggaatgtcataaattttatccaacccaagataaagcatgaacgtggagcaggaatattccatcttcgccaaacgttcgtccgtatattttcggcgatgctccggacgaaccatgtgtttcatggcccatgcaaagtctggattcaccaccacggcatcggcagccaccttatcgcctgatgccagccgcactcccactgcacgccggttttccaccaaaatttcctgcaccggttgttggagatgaattttccccccgtcctcttcaatacacttggccatagccgcggatatggcgttcaacccacctttgggatggtaaatgccatatttatgttcaatgagggacaagattgtgaaggtggccgggcactgccaaggtgacatgcccaggtatttggcctggaatgtcatggcaatgcgcatgtgttcatgtttgaagtagctgctcagccggtcgtacaccgaagtaaaagcgtcaaggtgcggaatggccttgatgaaattagggttgagaaaatgccaccacctcatgtatgggtgttgcaggcacggatagaccaagtccagttttttgccctcctgccgcctgtagcgcagataattttcaccatctcccggaaacaatcgttcaatctcggccagcattctttcagaatccatcgttgggaaaaagtcggtcttcccgtcaaatcgaaggcggtagaaaggatcaatggcaatcagatcgagataatcagccagttttcgcccgctttcggcaaagacctcctcaagcacgcgtgtcatcatgagaaaggtcgggccggtatcaaaggtaaatccatcaagttttatgggggcattgcgtccacccacgacaggggctttttcaaaaacctcaacgcgatagccctgtcggaccaacagcatgccggcggtcaatccacccgggccggccccgatgatgacaatcgttcgagccatggcggggcagttaattcacggaaaccagtgccgatgtcttggattccatagtttcatcatttgccggttgggcaaaatgatgtttgaaagtggccaggtgagagcgcatgtcccgcattaaaacagccctcggattgcatttcaagaccatcccatccaaatacatcaaactttttatgatgggatacatgccccgctcaaattccatgccactatgcacggcaagctgtatggtccgcatcatttgccgggtcaagctgacctcgctcactgttttgcctgaaaaaccatcatacagctccataaaccgccgctcaaattccaaccattgggatcgaggcaatttacaccgcgacatcttgtgaatggctaaagccgaaacttgatagtcatccaatgccagcccctcaaaaaattcaaacaatcccaggcggaattgctcggaaacacgactgagagcgccagtatccacaaagtaaatcaatccgttctgccaaatgatgttgccgggatgcaaatcgccatgaaaaacgcccattccaaacatatatgcaccgtgaactaaaaagagtttcaggagctcctcgtagggcaattggcccgcctccaaaagctcgtcaaaagtttttccctcaaggcattccatgaccaacacgttttcgcccgataattcctcataaatatggggaaaacgcaggggctcaagcattggccaatgagcatgctgctctcgcaagtgctgcaagtgccgggcgtgtgcaacctcattgcgcaagtccagttctgccagcgtgtattcttcaatgtgctccaaaataccaacgggatcggccacacggcccagcttgggatagagaaatgtcgccagacgcatcaacttcttcagccttcggacgtcacttacaaatcgctttttgaaatcgcttttgatcatcttgatgaccactggccgaccatctttaagaatggcacggtgcacctgtcccacactcgcagcagccaacggtcttttctcgatatggccaaaactcagatgccactcaggagaacagtaacgtcgcaacagtgcctccatgtcctccggcgggatagctgtggttgaacgataaagttttgcaagatggcgacatttctcctcccccaagaaatcaatacgcaaagcgaaagtctggccaattttgaccgccagcagccctcgttgttgaaaacgattcaagtctggcagcgttggcccgtagatatcccttaacaatccaataaaacttatccaattcatagacattatatatacatttatgagacaaccatggcataaattttaccctccgcaactgacatgcagaaaaaaacggtcccaatctaatgggaccgtttttttgcctcactatgaaatcaaggctggctgctttccttttggcggaagccgtcttggcaaaggaaacggttgacagcgttcaggtaggctctggcgctggcttcgatgatgtcggtgctggcacctttgccggtgattatttttttgtcgccgaagtcaaccttgactgtgacctcacccacggcgtcttttccttgggacacagcacgcagggtgtaatccatcaaggtgccgccggttttggtaatgcggtcaatggctttgagggcggcatcaactggaccgtcaccaatggctgcatcttggaaatgttccactttacctttggcggtgggtttgcgcagccgcacggtagcagtgggcatggtggcgttgccggtggtgacatgcaggtattctaaagaccatgtttccggcacctcggcgatatggccctccaccaaggcaatcaggtcttcgtcgtacacgaatttcttgcggtctccaatctccttgaagcgttggaaaagggagttgatgtcggcatcgttcatcttgaaacccaggtgtttgagccgcgcagaaactgcggcgcgcccgctgtgcttggtcagcggcaattcagtttggccccatcccacttccatgggatccatgatttcgtaggtctcacgtttcttgaggatgccgtcctgatggatgccggcggaatgtgcaaaggcattttcgcccacaatggccttgttgcgctggaccatgaggccgctcatgcgagcgacaaggcgggaggttttgacaatttccctcgtgttaacgcccacggtgtatccggcaaagaaatcggctcgtgtcttgagggccatgacaatttcctccaaggaagcgttgccggcacgttcaccgataccgttgatggtgcattccacctgccgtgcaccggcgcgaacggcagccaacgaattggcgactgccaggcccaagtcattatggcagtgcacactgataatcgcctggccagactgaaattcgggcaccgcggcgtgaagttgggcaatcaaagctgcaaattgatccggaacggcccaaccaacggtatcagggatgttgacagtggtcgccccggctttgaccacagcacgacatacttcaatcaagaattccggttcggtgcgggaagcgtcctcgggcgaaaactcgacattttccacgtaaccgcgggcgcgagttaccccttcgactgcgagacgaaggatttcgtcctgtgctttcccaagcttgaattcccgatgaattttgctggtggccaagaatacatgaatgcgtgcgcgtttgccggctggtttgagtgcggcaccagctgcatcaatgtccttcggcgtgcagcgggccagcccggcaatcatggggcctttgatttccttggcaatggcattgacagcggcgaagtcaccctcgctgatgaccgggaagcccgcttcgatgacgtccaccttcagccgggccaactggcgggcaacttcgagtttttggcgcaagttcatggaggcgccggggcattgctcgccatcgcgaagcgtggtgtcgaaaatgatgatgcgttggtttttcatgttttattttgtcgtggctgccgccggtagtgttatttttgtctgccaaaacaaaaaccccaccgccagtgtggcagcggggttcagatatctgttttcttcagctaaaacccgcctgccacgcggctgcgcaacagcagcagcgcgttcaacagtcgcaggctcaggtttctgctcatgcaaatacctttatagtgaaaatcctgccacgtcaaatgattttgcggtaaccgaccgaagcggaggggggtcaaaaaacttgcggattggactggtatggcgcccgaaatcatggcatatcacatccaagacagacgctacggcaacaaaatcaaaatcatgaaagctcttcgttggttcatcgtcacgggtggtctggcaatattcggcctgcaggcggccgatgtccctccggctgaaaaattgcttccggataccactcttgcagtgcttaccgcccccaattacccagcagcggaagcttggtacaacagctcaccaggcaaaaagtttctggacgacccggccatgaaacccttcatggacaagtttagagccaagttcaagaaagacatcgtcgagcccttggagaaggagttgggactgaagtttgcggactacgaggggctggctcaaggacagtccaccttggccataacggctgccgattggcaaggcaccaaggacaacatacctgccttcctttttttaatggatacaggagccaaaaaggatcaattggctaaaaatttggccgaaatccgcaaaaaatggagcgaagcgggcaagccgatgaagaatgaaaaggtggaaggtgccgaactgactacttatacgatcatgaccgaagacctccgcacagtgtttgagcgggtcttcccagacccaaacgcagggtgggaaagcatcactcccacccgccccggaggcccggcacgacgaacacccgcacgccctgaaaaccgccctgttcatcttacgcttgggcagaaggattctctttttgtggtagggacctctgtcccggaaatccgcaaggttttggagcttcatgccggcaagggcggtcgtaccttggcagatgtaccaaccttcaaagccgactatgaccgtctctttcgcaacgcccagtattacggctggattaatgtcaagctgctggtctccctggccatgaaaggcgtggaccctgctccggcgggtggcgcaaacaatcccatggcgatgaatccggtgcaggtcatcaacgccttgggcatcgcagacgcccagtcagccgccgtggtcttgcacggcgacaaccaaggagcgacggtgcaatttttcctcggggtgcctgaggcttcgcgcaagggacttttcaagctgctggccccgatggcaggtgacaccgccccgccgccttttgttccccaagatgcggtgaaattcacgcgcatacgttacaactttggcgaagcgtggaatacccttgaggaaacacttaacaacatcaacccgggcctgcttggagccctggccttttttgaaagtgcactcaaacagcaaaaccccaatttcaccttgcgcaaaggcctgatcgaactgttgggcgacgacatcatcacctacgaattcaagcccaccggccagacattggaagccatggccaacgcaccgggtatcgcgctgattggttcaccggcccccgaaaaattgattgatacaatcaagggcctctataacaactttgctcaaatgcgcggccagcgtggtggccggcgggacgccgagccacaacaactcaagacccgccaattccaaggcaccaccatttacacattcccacccacgccccagatgaattttcaaggccagcgtgttggcgaacgcagcctgagcttgtgtgccagtggcaaatacgtcgccctctcgtatgataacgacgctttggaacaatatcttcgctcagccaaggccgcgcggcctctttctggcgcacctggactagcacaagccgcagaaaaggccggtggtttcaattccggtttattccattatgaaaatcaaactgaaacaatgcgcttcctttttaccgtactgaaaaaagaaggcccacgaattggcgagctgttggggatgacacccttgggcagccgccttggttttgcggatgacagcaaggcctttcaggagtggtttgatttttctttgctgccaccgtttgacaaggtgagcaaatatgtgggaatcaccgtttacagcggcggagcaactcccgatggcttgcttatcaagagttatacccccaatccgccgggcttcaaataatttggccaacagtcccatccctgatgggctatccttaaaataaaatcggcgtggcgatgaagacgccacgccgatttttttgacgtttgctgtcaactcagacttttttaaccttctcccaacggccggtcttcgccgacttcagtacggcatcgcacacgtattgagtttccaacgcctccttaaatgtggggctcgctggtttgccattggccacacccacaaggaagtcattgagttggtgaacgaagctgtgctcaaaccctatcatcagacccggtacccaccatttatccatgtaaggatgctcaccgccgtggtcggtgacatggatgctgcgccagccacgcaccttgccttggtcacggtggtcaaaccattgcaaacgatgtgcatcgtgcaagtcccaagcaatggaagcgtgctccccgttgatttcaaatgtatagagcgccttgtgaccgcgcgcgtatcgtgtgctttcaaaggtggccagcgaaccgttgctgaaccgggccaaaaaggcgcaggcatcatcaatgcccaccttctcaaccttgccggtcaattgatgcaggcgctccttcacgaacgtctcagtcatggcgttgaccttgtcaatgcttccgttgagccaaagggccgtatcaatgcaatgggccagcaagtcaccggtcacaccgctgccggcagccttgacatccaaccgccacaatgcgtcgccaccctgcggcacgtccttggaaatcgtccaatcctgcaagaatttggcacgataatggaagatgcggcccaaccggccttcatcaatcaattgcttggcgaggctcaccgcgggaatacgacgataattaaaagagacaaaattgggcacacccgccttttccacagctttcaccatggcaagcgcctctttgccatcacgagcaagcggtttttcgcaaataatcattttgccggccttggcagcggctgttgccacttcggcgtggaaattattgggcaggcaaatatccaccaaatccacatcgtcccgctgcatcaccttgcggtaatcggtttcgtatccctcaaaaccccagcgttcggcaaacttcttcgcgcgctcctcgttgacatcacaaatgaccttcaacaccggacggtacggcacatcgaaaaagttccataccttgcggtgagcgttggtgtgagcgcggcccatgaagccgcaaccgatgactgctacattgagtggtttcataatttgtcctgattgttcaagttatgcattaaaaagagtgtgactcgttcaataaaagctgtttggcgacactctgcccgccttcatcatgccttccagccgtggttgtcgcgcacctggatcatggcagccaaaatgtcattccacgtttgctgccgcatcatcacctcattagggaacatgcaaccatcccaacaaatatgtttgaattttttggtcactttcccctggtcatcgcgcatccagtagccggcatcgcgggcaatgttcagcttcccgttgggatcggtggccatgcaatgcttgccggtcttttcgtgctcgccagaccccttcactgtggcgtcgttttgagccacatgaaaatcaatcgtccaaggacgcaacgccttggtgagcttcttcatcgccttgtggaatacctccggctcccaccggaaattggccggcaccaaccggtgctcaggggcgttgtatccaaggacataaagcaacgtatgcgccatgtccgcctgaaaacccaaatacttgggcatgtctaccccttcgagcacctgcaacatgtacttccaactatgaatgcccccccaacaaatttcgccctccgccgccagacgctccccgtggtcgcgggccaccttggcggcttccttgaaggtcgcaataattttcttggtgttacccttggggtccttgtcccaatccgtcacactgcacgccgaatcaatccggaccaccccgtaaggacgcacccccaactcccggaacttcttggcaatccgacatcccttggccacctgaccgacaaattttttgcgctcctcctcattccccatcgcagaccctccaccggttggcggccagatgggcgccaccactgacccaaccaccaaccccttgcctgctattttgtccgcgatgcgcttcaaatcatcatcgctggagtcaatgttgatatgcggatcaaaaagaaaaatatccacgccatcgaatttaatgccgtccacctccgccttggcggtgaggtccaacatcgtttccaaatcaatgcacggctcggcccccgggctgcccttgcccaccagacccggccacatcgcgttgtgaagtttggggtagttgttcacgtgttcactcataaaaacatccctccgtcaaatagattgacgctgaccaaaaacatgctgtggcacgcttggttttccatgcgtgtactgtgtgcttgctgcgccccagcatgcccaacccctctccccaacgcaaccgcaaaatcaaactaaagcctcagattttccaccttagcgccctgcgccaaccccaggcacaaacaaactaaatatggttgccaagcaattgaaaaatgctttaataaatgcagaatacacaaaaattatgaaggacaccgggccagtttttacgcgcctccttcatcgggttcctttggattgcaccgttggttcaatcaggattattggcataatccaaacaataaaaaaatcgccggtggggaaccggcgatttttaagtaagatgcttttcattccggtgtgcagcctggctgcaggtttccggcttgcacgcatctaactttgtcttgattcacaattaaattatcacctaacaccatgcaaagcaacaaaaaaattgaggaagcgaaccaagatttggaaatcgcctttgatgtcggccacagttccatcggttgggccatactccaagacacaaaccactccgacccgggggatgacgggtttgcgactccaaaattgttgggttgtggtgtggttacatttggagcagatgactgcctcgccaaaaaacggcgcgactaccgccgccagcgccgccacattcgcgccacccgccaacgtattgcccgcttgaaagaacttctcaagcacatgggcgttctcacacaacaacaattagacaagcctggctgtgcctggccgtggttgcttgccgcccgcgtcttgaaaggcgggccactcctcacctggccggaaatgtgggatgtcttgcgctggtacgcacacaaccgtggttacaatgccaatcgcctttggagccgccaagatgacgccgatgccgaagatagcgaaaaagttcaaaatgcccttcatctattcgaacaatataaaaccaatacgatggctgaaaccatctgcgccatctgcggtttggaccccttgggcaacaaaaagtcctgccaccttactgctgatcgccgccccaaagggctgaatgctgcattcccacgggaaaacatcgaaaacgaaataaagcgaatacttcaacaacacatcggacatctgccacaaattaacgaactgctcattaaagcgttgttggaagactggcgtgcactcccctgccctgtaatcaagctgccaccccgttatcgtggagggttgctattagggcaactcgtcccgcgttttgacaatcgcatcatcaaatcctgccccattacctatgagcgggaataccagaggtgtcttaacaattcagaagactctgaaaaagccgcgcaacaagccgcaaaagcctccaaagtcccaacagccaaatgcccggaatttctttgctttcgttgggccatgctgctggcaaatgtaaaaatttcccaggcaggcaatggccatttgcgctcgctgaccataaaggaacgcgcagaggtgcactgccaaatggaacaaaaaggctaccttaccaaagaggaattcaaaggagccgtgcggcaattaactaacaacatgccggacaacctggaccagatgctcatgcatcccgactcggaaggggccctggtgctggatcctgtaaagaaagttctatcgcaggagccatgggcgacactttggtctcaaatgtcaccacgtctccaaaagcgcgccatcggccgcctgcgacgcggtaaatcaatcagcctcagtgagctggcaggggccgccccggatctaaaggaggaatgtgaccggctgcgtcaggttcttcaagaatacgttgatggtcaaaataccaaaaaaaaacgcggcaaagaaatttcgatagaccaagtgtggcagcaaagttttgaagcaaaactgcccaaaggccgggctccgtacacccgacaagtaatgagagaggtctggcaggacgttatggaaaagggcattcaccccaaggaaaaggaggggtgcctttacagagatgaagccatacgcgaagctcaaattcaacgcagcattgaccagcaaaccaacaaccacctcgttcgccatcggcttaaaatacttgagcgcctacataaggatattctcaaaacctatgcaaccgacaaccccgcccgcgtcaaacgaatcaccatcgaagtcaaccgtgaattgcgcgaatactccggtatgactcgaaaagagcaggagcaagaccttggacagcgactggcccatttcaagtccgctgtcaaaaaattggaaaacgaccttaaggaagctgacatacaaaaatacaacattcgcatcaccgccggcctgatccggaaaacgcgaatcgccatggacctggattggacctgtccttacacaggcgaacgatacgacgtccttaccttggcaagaaagggcgtggacaaagatcacatcattccccgaagtcaacgagccagcgacagtctcgattcccttgtcatcacattccccgaggtcaatcgaatgaaaggcaagcggacggccctgcgattcatcgaagaattccaaggccgcacggtggaaggacgacccaacctaaccatccgcaccgtccaacaatataaagcatgggtggaaaaactcgatacacgactcggacatctggaagaccaacgacgcaaaaaacgccgaaaagaaatgctgctcctgtctgaatacgtggacaaagatttcacccctcgcgatctaacacaaacttctcaactcgtgcggctcggggccgcgttactgcaacgtccatatcttcacctggaaaaaaagccggtcatcacctcactccccggcagcgttacagcgtttgtacgccgtgcctggaaccttttgggatgcctgagcttggctaatccccaagtgttgaacgaagagggccatgtaaagaccaaggatgaaattcgtggcattacccatcttcatcacgccttggatgcctgcacccttgcgttggcggggcattacctgcctcgcgacggccacatttggtcgttgctcgtcaaacgccgtcttaacccgatggaacaacgtcaactggttcaagccacccatggtctctgccaaataactgctgacggcgaggtgacgctccgcgaccttccaacctctttcaaagagcaactgcgtcaacgtctggccgaacgccgcgtggtccaacacgtccccaaagacatgtccgggctccctgccgaagaaacggtgtaccgcgtgttcgaccccgccgatcaacatccctcggccagacgtctccgccgttggtttgacgctcaaaaagtaaaaatccccggcccggacgacgacaccgtcctgatcgtctgccgcaaacgtaaaacctcggccgacagtcaaactggcacaattctccacgaaacagacacttggcgatgggtttacaaagaagtcgaaaaatccaaactcatcggtctcaatccagaacccaactccaagggtaaactcaaaaagctcaaggcggtgaaaatcatcagtgataactttggcatcgccctcgaccccgagccaacaatcatccgcttccacaaagtctggcaccaacttcaagctctgcgacatcaaaaccacgataaacccattcgcgtgctgcgaaagggacagattattcaaatccacaatggcacgagagcaggaatttggagggttttttcagttaaagacactgaggcatatggggtagctgtagatctctcacttttagataatcccggtctaaatcggggtaatgcccctgtggaaaagttattaattgatggtttaagcattattaactgccccttagtcggaatagattcaagcaaaatccaaatggccccggtcaaaaaacgattaagaaaatccaagaaaaacacggccaatgaataatgtcctaccacatcgtaaacatagactcgccacaatgcaccatcagttgccgggacggtcagttggtctgtaaaacagcagattccgaacgcaaactcccgcttgaggatgtggctgcgattattattacaagcttctcagcctccatccacagccacctattcctgcaggctgccaagcacggggtggcgctcatcgtttgcgaagccttcaaaccggcctgccttgttcttcccgcccggcgcgcgaccgacacactcctgtgccgggcccaagtcaatttgagcgaccagcaacgaatagccttgtggcaaaaaaccgtggaagccaaatgccacaatcaactctcgctcgcggaaactctggcccccgagaatccaaagatggcggagttgcggtccgcagcacgaagccgcaaaccccacaaggaatcattctgtgcacgatactattggcaggttcttggcagcgctttgaatacacctgacttcaaccgtggacgacatgcagggtcatggaacaacttgctaaattatggttacgccgtccttctctcaaccacccttcaaaaactgttcgcgctgggactggaccccacctttggcatttctcacaccactcgtgagcgaagcacaccgctggcttacgacctcatggagccgtttcgcccctgcgtagattggcgcgtcattcaatggatgctccaacaccgcgcaaccaacaattgggaagtcaccaaagaatttcgccagtgggtcacagggttcgccatcgaacgcgttgaatacatgggattcaagctcgacatacagggctgcatcgagggagttctgcgcggatttcgacgggccgtcatcgagaagcagacgaaattctatcgtccgtggacgtccaaaaaatgggtcttttagacccatgttacaaaatacaggaggcttaagagcagcccaacgcgattttttcgctccgttatgcagacatgcaaacacctcaacaatggatactgagaaatataaaatgggttggctaatagttgcatttgaccttccagttttgactccggcccagcgcaaagccgctaccgactttcgcaaatacctgcttgatgacggctacttgatggtgcaatttagtgtatatgcccgcccttgtgtttcctttgcgaggcaggaaacacacattgaacgccttaaaaaagccatcccacccgaaggctcgattcgagccatcttcgttacccgtgcccaatgggaacgctcatttgtgatgactggatcgcccgctgctcccacaaaccctgaggaaattccagaacaaatgcaattttggtaaatgaaaaagttcgctaaatgcgaaccgcatccgatgcgcttggccatcctcaaacagaaaacgaaatctgcaatcccctctttcacaggggattgcagatttcgattttaccccccccgttttttgaatcaaggcaaagcgaaagtctgcaaaggctcgagttgactcaggataaatgttaccggggctgggaggtggacaagggcgagttgactcaggataaatgttaccggggctgggaggtggaaaagggcgccgctgatacgttgactcatattcatggttactcaagaaccaaccatgagcaagtccgcccaacgtggattattggccaccttacatggccgataatactgcgccttttggcaccacaaggcgcgtaccctgccagggttaagagggggttgaagtgcgggcaaagagaagtgaatcgtggtaacgtttgttgctcgcgcgcaggcgtgcggtcatggttttgccgacggccattaaaaacggcgctgccagtgcaggctcctgcaccacgagtttgtgaaaggcctccgcgctgattttgagcaacaaactgtccacgttggccacgacatcagcgctgcgcgggccggtatcgaagagggatatttcaccaaaaaattcgccggtaggcagcgttgccaagaggctttcacgcccttgcaccatcaaccgcacccttagttccccttgcaaaataagatacatggcatcacctatgtctccctcgcgcacgaccacttcccattgcttgacctgacgcatttccatcaggctgatgaacctctggatttggaaatcactcaggccggcaaaaactttgatgcgccgtagagcccccactttcaaggtgctctggccggggacgatgtcggagccttcagttggaaacaagggggccagttccggcaaagtagaggccaggcgccactcggagcgtttacgaaggtacaaccaggaaccgggcaccacccgctcttcgcgaacccaggcagtcaactgctccaaatccaccggcccataaaccgattcatcggctccccaaagataataggtcgttgagttggaatgggattccatgaacgaacaatttagaccgggtccatcttcttggcgacttgaaattattttgttactctggccggcacgtggtagcgttgaaaacaacatgaaacattcaggcaaagccacggtggcggggttgaagctgatgttctggtcactgatgttggtggccggggtgttgtcgctgggaattatcgccgaatacgtggcaaggtttattcaaacggtccagtacctgctgccggcgctgtgggtgattttcgcgattttttgtttatatttctttcgcgatcccaagcctatggttccatcagatccgggagctgtggtctgtccagcgcacggacgaattgatttcatcggagaaacggaggagccgtggcttggtggacgatgccatcgcatctcgatgtttttgtcgccgcttgatattcatgtgcagtacgcgccggtggcatcacgtgtggtccaagtcatccatacacccggcaaattcagtgcagcgatgagcactgccacagcccaacataacgagaacgttttaatcaccctggaggatttggaacgtcccggccagcgtctggctgttcgtctggtggccggtgtgttggcgcggcgcatcgttccttttgtccaaccgcaggaggagctggcgcgcggcgatcggatgagcctcattcaattcgggtcacgctgcgaactgtaccttcccttgtcggcccaaatcaccgtcaaggttggggacaaagttaagggcggggaaaccatcgtagcgcgggaccgagccgctcaaggggcatgaaaatcagccaaagcacgtcttcgggctccagtcctccgggatcagggctgaaaatatattttctgcccaacctgatgacagccggcaatttgttctgcgggtttgtggccctcaccaagattgtggaggctgaccccgaagcccgtaattttgctgtggttatcaagacagccctcgcttttattttgctagcctgcatctttgatttacttgatggccggctggcgcgctggggtggagcggaaagcccgttcggacgagaatttgactcactggcggatttgatttccttcggtgtggcccctgcattcttggtgcatcgtattgtgttgaaggatgttttttccacacatcctgaagtgggttggtttattgcctccatttacttgatttgtggtgcccttcgtctggcccgctataattgcctatccgccatggcaggcacaggaggggggaaagaattcgtgggttttcccattcctgcggctgcggctttggtggcctcattgaccctgttgttgctttgggtggaagaggaccgcgtaaagcacagcctgtggcgatttggacttcctctgctgatgctgtttctttccatcatgatggtcagcgaggtgaaatatccaaccttcaagtcgctcaatttgagagctcagcggaacttcaccaagctggtgattgccgctttgtttgtaggatgtttgctaattttgcgagagcgggtgctttattgggtgctgcccgcgctttttaccatgtacctgctttacggtttcatccggccatggttgccccatcggacgcgcgaggagattgaagaggagcaagacgagccttccgagtcgtcttcctcctgagatggcatgggcgagtcctttcaaatattcacgccgtgggtgacagggtttattgcaggcttcgtcgcatcctttgttccaggtcccattaatgtggccatcattaatcaaggagcgcggcagggcttcaaatgggcgctcatgattggtttgggcagcacggtcatggaggtgttatattgcgggattgcttttgcaggtttttccgccctgttcactcagcgggttattaaagccgtgctggaggtggttagtttcctgctaatgatttatctgggattgaagtatttgcgcgccaaggttatcgaagaccataatcccgcagccgaccgtattgagcaaaaattgcatccccactctgcgttcgcgattggttttgttcaagtgttgggtaacccgggggtgttgttgatgtggattgccttgacggcgagctttgtggcgcatgaatgggtggaacccaattggagcgaaaaactcatttgccttgtcggggtggcgttgggggctttggtttggtttgtggggctttcttatgccatcagccgcaagggacgcactttttcccggcaaacgttgttgtggatggagcatttgagtggagttttgctgctgatcatcgccgcgattttaggggcacgcattgtgattcttttgtcagtgcatcattagtctccgacaacggaggcctgttgactcgacaacaagtccagttttcgacaaggtgttgccgtgcaacccgaacctcatgaatacctggcttctgtgcgggagccgatgcagcaggcggtggagctgcggcgacgccaccggggcggctggcaaaattgggaacgcaaggcttttgaaagattgcgtgatttgatcgtaggagatgcgcaattgtccctggcgcttccccaggttaccaccaaagaagaccagattgtttgggcgcgcagtccggtacgccttgatttggccggtggttggaccgatacaccgccgtattgtttggaatacggtggcaaggtggtgaacctcgcagccaacctcaatggtcaaccgcccatacaagtctttgcccgggtcattccacaacctgaaatcgtccttcgcagcattgatttgggacagggagttcgattgcggacgtatgccgaggtggagaattttggggccccttttactccctttgccattgctcgcgctgcgttggccctggcgggatttattccccgctttcatgccaacggcggacatggttccctccaaaaacatttgcgcaactttgggggaggattggaaatcacacagctttcagccgtccccaaggggtccggcctgggtgccagcagcatactagccgccacgctgttggcggctttgaacgatttgtgcggactccgttgggataaaaacatgattgcggcacggacgctggcattggagcaactattgaccaccggcggggggtggcaagaccaggcgggcgccatctatagcggtgtcaagctgctccaaacctatcctggcctccgacaacaaatccaggtgcgctggctgcctgaacaccttttccaagccgcccaattgaatcaccgcgtcctcctttattacaccggcattacacgactggccaaaaacatcctgcaggagattgtccgtcagatattcctcaattcacctcaacacctggagacgcttgcggcgattgggcaaaatgcggaagcaacttttgaagccatccagcgttgtgattacggcgctttggcagtgtgtgtggacaggagttggaagttgaaccaaaagttggactctggcacaaatccgcccgccgttcagcgattattggaccgtgtgcaaaaacacctggccgcggccaaactgttgggagccggtggcgggggttttttacttatgtttgcccacgatgaatcccatgcgcaggagattctgcgaaaactgacccgcaaccctcccaatccacgcgcccggtttgtagaattgaacctttccaccaccggattgcaggtgacgcgaagttgagacaggctcagagagagaggatgaaggctgtcaggtcctccaattgttgcggcgtcagatgactggttttgccgtgccgatcctgacggtttttggtggtcaatacctcttgaatggtgcgtgctgagccatcgtgtaaatacggcccagtacgccagagttcaatcagcgtgggcgtgtcgaactcagcattgcggtccagtggtccctgcgtgccaacgtcgtaatgtttgagatcggtgtatagaccgggcggatgacactgggcgcagccgacttgtgaattgaggaacagtttgcggccgcgttcggcggctttggagagcttcccattttccaaaaaggggctgggcatgggacggagtgttttaagccattcatccatggcgatgggcaccgactccggctgcaccgtgaagaggatgtggcgtatgccggcgcgaacagcggtctctgccgtgtcacgcacgcccatggacatggcgggaggggtgcgatgtgagagcaggaggcttttgctgtttttgggattgccaatgccatcattgagaaggtcccaattcaatccgtccacacgggcatcgaacgaatggcaactggcacacgtctgccagccttgaaaacagatagtggcgtcattgaaataaaattcaccctgccgcagaatatccatgggttgctccggtcccagaggcaatgactcggctcgccatacgggagcagtggtatccacaacgctgagattgtcgctgaaataattgccggtataaaccatgcgccccaccaatgccaacgaacgtgggccgtaagaattcagtttaacccgcgtccgcaatcccaccaaaaatgagaggtcattgggcacatcggcggctacacgcgaggcggctgtgtaatcaatggtttgtccgttggtcagggaggtgggcatggccgccagttttttaagcagcccggcagcatcaatcacgcttagttcatgcgtgccggcgtgggtgacgtacaatgtggcgctgtcttgggaccatgccaccgcataggggttggcggctccgctatccacactgtccaccaacactgtgttgatggcctgccgtgtactggtgtcaagaagcgtgattgcgctggtattcatccaaccccgctccagttgtgtggtgggaaggtgatagcgtgccaatgagtgggtgacggccacccaacgaccattgggggatacccggagcccgcaaagcaagccgctcccattgggcaaggtgacttcaccggccacctggcgtgctgcggtgtctataatagacacctttgccgcgacaacctcggcgtcggcccgcccatccggcaaatgattggccacataaagccaccgaccatcaggcgtgatgtccatcgcaaagggttcccttggggtggagactttgaagagcaatcgcctggttttcaaggcgtacgccgcaacttcgttctggaaacggtggcttatgtacaccgttgctccatccggattgaggacgggcgacatcggataatagccaaccggaatggtctgggtgattttaccggaagcagtgccaatcacggcaagggttcctgcaggagccgcacaagtgacatacaattccgtgccgtcccgagaaattgccaaaccggtaggagcagcaggcaaggagacacgccgcacaacttctttgcgggccgtgtcaaaaacaagcagttgcccggcggtatgggccgccacatagagggttttgccatcaggagaggccaccaaagccgtcggcgacaaatacggcgccgcagaaactttgaggccaagcatggcagccccaagtaaacacagcccattgaacaggcgctttattgattggtacggaaacatggttgtcattttcgtgaagtttgacgaaaccgccagcagtttttttcaaatgaaaataacaagctctgacgagttcactccccaacaaaaaaaacaccgtcctcgatcaatctcgcggacggtgtgttgaagagctctaaatgcttacggattcgtcgcctatgttggtgacggagtttttaactcaagccagtgctccgggagtgccggcggcgggggtggcttgagaaaaggatagtttgtccgattccacagtcaccagaatgggttcgccatcgtggaacgagccccgcaagatttcctcggccaacgggtcttccaggtaacgctccacggcacgacgcatgggccgtgcgccgtattgagggtcgtaacccttttccaccaaaaagtccttggccttttcatccagacgcagctcgaagttgcggtttttgagccgttcgcagactttggcaatttcgaggtccaagatggtaatcaggtcgggcttggtcaaggaccggaagacaatgatgtcgtccaagcgattcaagaattcgggacggaacaggcgcttggcctcgtccatgattttttcccgcattttttcgtagctcgtttcgtcgctgattggcgaaaaaccgagagtcgagtttttacggatggtttccgcgcccacattggaagtgagcaggatgatggtattgcggaaattgaccactcgtcccacgctgtctgtgagtttgccttcctccaaaatttggaggagcatgttcatcacatcgggatgggctttctccacctcatcaaacaaaaccaccgaataaggccgccgcctcacctgctcggtgagctgaccgccttcttcgtaccccacatagcccggaggcgagccgaccagtcgcgaaacggtgaatttttccatgtactcgctcatgtcgagctgaatgagggccttggggtccccaaacatggactcggcgagtgttttagcaaggagtgttttgcccacaccggtggggcccaacagggcaaaagtgccaatgggccgcttggggtccttcaacgaagcccgtgagcgccgcagcgctttgcacaccgcagctaccgcttcccgttgaccgaccacaaccttggacatctcctcttccatgtgcagcaaccgctgagcttcgccttcctccatgcgacgcaacggaatgccagtccaccggctgaccacctggagaatgtcgtcctcgtccaccttgacccgcttttcttcgcggtttgccttccaagtattcaagatggcctcgagtttttccttggcctgcttttcctgatcgcgaaagcgggccgcaccctcatagtcttgttgtttgatggcggcttccttctgagatttaatcttctcaatctccgcttcaaggtccttgatttccggaggccgcgtcatggcggcaatgcgggcgcgcgcaccggcttcatccatcaaatcaatggccttgtccggcaggaaacgatccgtgatgtacctcgccgacagccgcacagccgcctcgatggcagcgtcggtaatttccgccttgtgatggtcttcgtatttgggccgcaaacctttgagaatctggatggcatcctcgatggacggctcctcgaccttgacgctttggaagcggcgttccaaagcagcgtctttctcaatgtatttgcgatactcattaagcgtggtggcgccaatgcattgcatctcgccccggcttaaagccggtttgatgatgttggaggcatccatcgtgccctcggcagagccggcccctacaatggtatgcaattcgtcaatgaaaaggatgacgtttttggagcggcggatttcatccatcaccgctttgatgcgttcctcaaactggccgcggtattttgttccggcgaccatgagagccaaatcaagagtgataacccgtttgtcccgcagcaattccgggacgttcccccgggcgatttcttgggccagtccctccacaatggctgttttgcccacgcctgcttcaccgagcagga

SEQ ID NO: 2536 - DNA, 23444 bp, synthetic construct
  source 1..23444: mol_type = other DNA
  misc_feature 1..23444: note = Synthetic
gacgcatggacggtctcgccgagatgcctcgccagccgcgcaccgcgcgagatcgcgacccagcacatcgcacgggaaaaagtgtacggtcgcggcgtctggcggaattcccagatgccggtgtcgttggtgggggcagcggcaatggcttcctccaccagccgctgcacgaggtgaaaataatcgccgccgcgcagatgcgcgagccgcggatcggtgagcagcgtttcgaggcagaggataagttcgcccatgagatcattctgccgctgctccgccgcctggttgccgatgcgcaccgggccgttgccgccgaaaccgctcaggtgcccgagcgtttcctccggcagatcgcgttcgccgccgattccgtagagcggctggagcggcccggcctccgcgacatcgcgcaggtaacgcaggaattcctcgccctcccgcaagtgcgcgagccgtcgcagcgcctcgacgacaaacgccgcatcgcgcagccagcaatagcggtaatcccaagtgcgcagcgtgcccatcgcctccgggatgctcgtcgtcgccgccgcgatgatcgcgccggtgtcgtgatattggtgcagcttcagcacgagcgccgagcgcagcacggtgtcgggtgcaaaggtcggcagcgcgcaactcatcgcccatcgccgccagccttcgaccgtgcgctcgaattgctccagcacatgccagagcgtgatgcgctgacgcgtgccgccacaggcgagcgaaaaaaacatcggcttgtccaaggcgaactcgcggctgcccgtgacgtacggcatcggcacatccgtgaaaaggcgcagcggctcggcagccccggtgatcagcaggcagtcgcctgccggcatcatctgcacctccgcgcgggcgtagtcgggccgcggatcaaatcgcacgcgcagccgcggatggccgcgcagcggacgcaccagccgcgccaactcaaagggcacgcggatttccatcccgtccggcagccgtggtgcaaaatcaatcacctcccacgacgcatcgccgacctcgaagacggtgcggagcacgttggtgttcgtgatgtattcggacttcccgcgcacttcgcccgacgcgtgctcgatgatgaaggtgccacctttctcccggtcgaggatgcgggcgaaaaccgacggcgaatcaaaccgcggcatgcacagccattccaccgcgctggtcggcgagacaagcgccaacactcgcccattaccgatcacaccgtgatcgaggggaggaatagcctgcgcattcatcacaccccattatcgcgtgtgaaccgcatttcgcacctacgaaaaagccgccccggtttcgcggggcggctttcgtgattgtttcaggcagcgcggcctactttttcttcgcggcgcgcttttcctcgatcgcggcctgcgctgctgcgaggcgcgcgactggcacgcggaagggcgagcagctcacgtagttcaggcccacgcggtggaagaacttcacgctgtccggatcgccgccgtgttcgccgcagatgccgagcttgatgtcggggcgcgtggcgcggcccttttcgatggcgatcttcacgagctggccgacgccgctctggtcgagcgaggcgaaggggttcttcttgaagacttcgttttcggtgtaggcgttgaggaagttgcccatgtcgtcgcgcgaaatgccgagcgcggtctgcgtgaggtcattcgtgccgaagctgaagaactccgcggtctgcgcgatctcgtcggcggtgagggcgccgcgcgggacttcgatcatggtgccgacctggtagctcagcttcaccttcttctccttctgcacttccgccgcgacgcggtggacgatggccacttgaagatccagctccttcttgaatccgacgagcggaatcatgacctcgggcttcactttgatgcccttcttctgcacctcggcggcggcttcaaaaatcgcgcgcgcctgcgtctcggtgatctcgggatacgcgatgccgaggcggcagccgcggtggccgagcatcgggttgaactcatgcagcgcagcgacgcgggcctgcactttctcgagcgtgacgccgagtttcttcgcgaggtcggcctgcgcctgttcctcgtgcgggacgaactcgtggagcggcggatcgagcagacggatggtcgccgggaagcctttcagcgctttgaaaatgccgacgaagtcctcgcgctgatacggaagaatcttcttcagcgcgtggcggcggcccgcttcggtgtcggcgaggatcatctcgcggacggcatcaatgcggtcgccctcgaagaacatgtgctcggtgcgggtgagcccgatgccggtcgcgccaaatgcgattgcctgccgcgtctgctcgggcgtgtcggcgttcgtgcgaacggcgaggcgcgtggccttcgagcaccatgccatgagctggttgaacgccttgaacttctccgtcttctgcgcggccttgtcgccgccgatggtgccggtgacgatgttgctcgggccggtcttcacctggccgccgtagatggtgcccgcggtgccatcaatcgagaggaagtcgccttcctggaacgtctggccggagatggtcacggtcttcttgtcgtaatcaatttgcacgcctgacgcaccgcagatgcagaccttgcccatctgacgcgcgacgagcgccgcgtgcgaggagacgccgcccttcgccgtgagaatgccctcggcggcgatcatgccgcggaggtcttcgggcgaagtttcgttgcggacgagcagcaccttctcacctttttccgcagccgcagcagcgcggtcggcgttgagatagatcttgccggacgctgcgccggggccggcgggcaggccgctcgcgaggatcttcgccttcttgatctcagcgagatcaaagtcgggcgcgaggagctgctcgagctggtcggcgggattgcgcaggatcgcggtttcccagtcgatgagcccctctttcaccaggtccatcgagaacttcagcgcggccgcagcggtgcgcttgccgttgcgcgtctggagcatgaacagcttgccttcctgcacggtgaactcgatgtcctgcacgtccttgaaatgcttctccaggatctgccgaaccttcatcagctccgcgtagctcttcggcatctgcttcttcagctcggccaccggctcgggcgtgcgcacgccggcgacgacatcttcgccctgcgcgttgatcaggaattcgccgtagaattcatttacgccattcgccgggttgcgcgtgaatgcgacaccggagccggacgtttcgcccgtgttgccatagaccatcgcctgcacgttcaccgccgttccccattccgtcgggatgttgtatttgcggcgatacacgatcgcccggtcattcatccacgagccgaacaccgcgcccgctgcgccgcggagctggtcccatgcgttgtatgggaacgccttgccggtgcgctccttcacgagctttttgaaacgcacgacgagttccttgtagtcgtccaccgtgaggtgcgcgtcgtccacctgctcctcgtgatgctcctccttgagatgctcgatcacactctcgaacggatcgtgatcctcgcccgcgcgcttctgcacgcccatcaccacgtcgccatacatctggatgaaacggcggtagcagtcccacgcgaaccgctcattcttcgtcgccgccacgagcgccagcaccgtgtcatcattgaggccgaggttcaaaatcgtgtccatcatgcccggcatggaatcgcgagcgcctgagcgcaccgcgacgagcagcggcatcccggtggtcgcgccgaatttgcagcccatgatcttctgcatgttggccacgcccttttccatctccgcttgaagcgtcgcgggatacgtgcgcttgttcgcgtagtagtaggtgcagacttccgtcgtgatcgtgaatccaggaggcacgggcaggccgatgcgcgtcatctccgcgaggttcgcgcccttgccgccgagcagcggcttcatcgagccgtcgccgtctgccttcgcagcgccccaagtgtaaacatatttcacggatttgcccgcggacttcgccggggccttggatttcggagcggatttcagtgtggatgccatagagatgtgtgttgtgtgaatcagggttgaaaacattgcgtcggcgaggcgcgggagcgttccttccgggcaaaatgggcgcgctgtatgccacagcgggcgaggggaggaaagggattttgtgtggaaaatcagaacgatccaaatcgggccgcttcgggctccggcgcctgcttatccgtttggttgacaagcagacaaattaggaaggcaggaaaggagagcttccgtccctctgagcatgatttcctgccttcccaattcaattctccctccgattgtcacgcaatccgacaagcatgcttcggcgagcctcgcgatcctcggatcattttcccacggcggttcaggaaatcccggagccgcgttcgtgagaacgcgggcatctttccgtggagacgccgtggccgcgctctcacaagtgcggctgccgttttggtggaaccgctcccgcgcgtgtcctgcacgcggcgaactccgggccaacggcccgacacaagccagcccagcaaggccgcgctatcaatcatggcgcggacgccgccctggtgtggtgagcgattagtgcgcttacaaagcctaccgccgcagcgcggtgatcagctcgttgatcttcgcgcggagggtctccatgtccccgacggtcgggggatcattggtgaaaggggagaacagcgtgtccacggagttggaattggcggaggaattggaggcggcggcggagagcgccccggcgattgcggcgtccaattcggcactggtcacatcgccgggcattccctgcgggccgggagggccgtcgctgccattggtccccgccgggccttgcgcgccatcgttgccctgcggccccgtcggcccggtttcgccctgcaagccttgtggcccgtcattgccctgcggaccttgcgggccggtcgccccgtcgctcccgttcgcgccgggagggcccggcggcccagcggggatggcgtcaatcagatctttaagaccgttgaactgcgcgcgcatatcggaggcgcgcgccttggtgctgtcggcggggagggagggatcgtaaggcatggggtgggatgattggttgtatggattgcgttattgtgactggtgatttgtgattggtggctggttgctggtgagaggtgttcctgcggcgtgcatcgggcggtggcgatgggatgggcggggctttgaccagcgaccagcgaccagcgaccggtcaccagtcaccagtcacgatgcccccactccccgcatcggattcgcgacgacggactgtcgccgccgccgctgctctacgtcaccacgacctgcgcctccgggctcggtgccgcgtcgccgccgtcattcccggcgaccacgcgcaccttcacggtctggcctgcggtgaagcctttcaggatcgcctcgagatccttgtagctgcccgcattctgccattccgtgtccacgccctcgcgcttcgtctccacgcggaaccgcaccgcgcgcgtcgcgtagggccagttcaattcaaatcgcccgttgcccagcgccgccgccgtgacactggccaccgaatccggcgcgctcggattcgccggcacgttcagcccgaacgcctcgtagcgcgaatcatcgtccttgatcagcccgcccagctcattgatgagcccgcggacccggttgcgcaggccgccctcggcatccgtccgtgcgtcgagggcatccgtctgcgcctgctccgcatcggccacgccctgccgggcggtcgagagcgtgtcccacgccgcaccgcagagcgcggcggtcgcccccatctcggcgctctcatgggccggctggtcggtgaagtaggtcttcagcttgtccagcagggtgaagcgcggatccatcgtcgtcggcaccgccgtggattggccggggaaccccgtgggctcccacgcggcgctccaccgctggccgagcttctgcgccagccgcagcttgcagttcgtcagcgtcacaaatcccgcatcatccgccgtcttcagggccgtgtaggcgtcatccaccgccttctttttcttccccacctggaactccgcggttccgagcgtggcaatggcggtgcggatggccgcctccgtgttctgcttgatgccgattggcgcttcataagtgtggcatccgtccgccattcggtcggcgagcgcgcggaggatgtcgttgttgtcgggggtggggttgctgctcatggttcgtcggttggtttttttgctgcttttggagggcggccccggatcatccggagcatcccagaagaattcatcccagacggtggacgggtcatcccaatcgcccatggtggtggggcgcgtcgctccgcgcgcattgctgcgtgtgtggggaaaccggcccttcatgcgaggaagcgcgcgcggagcgacgcgctccaccctgtcgccttcccggtgccagccgagaatcccggctgaggacggggagactcgggaacgtcagccgagaatcccggctgaggatggggagactcgggaacgccagccgagaatcccggctgaggatggggagactcgggaacgctggccgagaatcccggctgaggccaccgagcctccgccccgttccgcgaccaatgttccagccatccccaaggcaggcccggtggaacgcgcgctccgccgcgcgttccggcacggactggaatgcgtgcccacagccggaggaagcgcgcgcggagcgacgcgctccaccgcaccccattccccggcgacgcccaggcagcccgttcccgacgggaaaactcccgccgccccgcgcctcccggtccccgagtcgcgcagtcctcttcatgacagcgaggcgtgttccatgcaccggcgggaatgcagccggctcagttccgcgacggacttcggcagccccgtgtaaatggcatccgcgcccaccccgaaggcggacgagagcttgcagatgtcgaacccgcacggcaccgcgctcccgccttcccaccgctgcaccgtggaagtgtccacggacgccttctccgccagcttctcctggctccactcgcgttcaacccggagtttggcgatgttcattccgatcctgcgtgaaaagggggtcttcatgcccgcggagaatgcccgaatcccaaacgccgcaccaccgcaagaatgcggtttttttcatcttccattcatgcggaaaaattggcgcaaaaaatcgccacgccacgccccccgccggccgatcgcctcccgcctttcagactgcattcctgccgcgcccgcgccagtgggagaagccccacagcgcgcccatcgccgccgcgccgagcccggtgaattccgcgcgctcctgccagttcgcgggctccgcgccctccttcacctgctcgaccaccggcttcgccttcgccgggacggagaattcccatgcgccgcgcttcgccgtgcgggcggcggcttcgagttcgccgagacgttcgaggtaatcctcggccttcgtgccttcgggcagcgtcaccttcgtcccgtgcagacgcgcgagcccggcttccacgagcacgtcggcgaggttccgcccgtccacctccacgatggcgtagtgccgcggcagcttgctcgacccgagcgccgacgcccagcgggtgtaaatggtgagcttcttcccgagcagcaaatcatgcacgaactgcttcgccaccttccccatcgccaccgattgctccggcgtgatcccgaaatactccgcctgctccgcattccgcacggggaaccgcgtgtccgattccggcgcatccacaaagtagagccgcagcacccgctcctgcccgtccacccgcacccggaacgaatccccgtccgcatacgccgtgtcgaggaactcgcagtccgtgaaccggaggaatttcttcacgtgcctcggctccgccgtgtcgtccgcaagggccgcgccggtggtgaacaggaccaatgccgcgagcaggccggtaaaatgatggaacacttgcggcaggaatgacgggaagggtggggcgcagcaacgggaatcagcaaatcattgcgtcccgcatttcctccgtgccacgcgccgggcattgcgctacacgatgcgccatgagcattggaaagtgacaagccatgaagcgaaaagccaactggatccagcaggccgacgccgcgctcatgcgcgccgcgaagcgtgcccgtgaagtggcggagcaaaccaacactccgctcattgtgatgagggacgggaagattgtcgatctgctggccgtcgagcgccatcagcgcgcgacggatcaggagaaggagggccggcgatgaaaaggaagtggcggctgtatctcgacacatcggtctttggcggcgtgtttgaagccaccgagggacgcgacgcggcctcgcggcaggtgctcgatgcggcgctatccgggcaagccgtagcctgcttttccgatacggtggtgcaggaactcatagacgctccgccgcgcgtgcgcctgctgctggagagcctgccggcggagtgccgggaagagatcgcgatcaaccatgaaatccgtgcgctgagccaggcctatatcgcggcgggtgtggtgggtccaaagtgggctgaagacacactgcacgtcgccgccgcaaccgtcgcgcgagcagatgcgatcgtgtcgtggaatttcaagcacatggtgcggctggacaaaatccgggcttacaacgcggtgaatattgcggaaggttacggcatgatccagatcatcagccccaaggaggtgaacttcgatgaatgaagaattctggcgggagttcccgccgattcccggcttcgattgcgtcgcgatgaagcaccgtgcgcaggaacgcatccaccgcgcaacggaggggatgacggacgacgaattgatcgagtattacaaccgcaccggacgcgcttttcgggagaccggaaagattccttcggtcgaggccgggagcatggtgttgcgagaggagccgtcgaagcctggtgaatctcgatgacaattgaagactcgaaaaaaatccagccgatccccggcttcgactgcgtgaagatgaagcacgacatccaggcgaagatctacgaggagatcaaggacatgaccgcggatgagcgcatcgcttatttccggcgcgggagcgaggaattccgccgggagatggcgcagcgaaaagctccggaaggcgatctggtgctgcgcgaagaaccgccgccctacggaaaaaagaagcgctgactgctgcggatctgcatttccaagtctccttttctccaaatccccaagtccccaagtctcactgtccgtccgcattctccggttctccccatctcccagtctccggctctccccgtcttgcctcaatgccccggctcccccgattcttccgcaagggccgcgccggtggtgaacagaatcagcgatgcgagcagggcgacgaaatgatggaacacttgcccgagcaatggcgggaatggcggggcgcatcaacgggaatcgcgtgatccttatccgtggcatctcgcgcgcaagacagcgcttgccctcgtgtcgctatcctgtcatgacgcagccggattcctcccatgaatacgacctgcggcagaaggtacggtgccgcccggagagcagtgctgccgggttcggttccgcgtcctcataaaaattccgtgatgctttccgtggaaagcaaacgggcggagtcttgcgacgccgcccgtttgagagagaacgcttttgaaccggtgtgtccgcctagcggacagggaagcggtctgcgctatctaactttgtcttgaatccatcccctcactaccacctcctatgacaacagcaaacaaaaaatctgccgctgatctgcaactcgcatttgatgtcggccacagttccatcggctgggccgtgctgaaagctcctgctggacaatcgccgtcgctgctcggctgcggctcggtgatttttcctactgatgattgcctcgcctcggagcggcgcggttttcgcaggcaacgacggcacatccgcgccacgcggttgcgcatcgcgcggctgaaacggttgctcgcgcatctcggagtgctcacgcaggagcaactcgacgagccgggctgcgcgtggccgtggctgctcgccgcgcgcgttctgcgcggtggaaagaaactgacatggagcgagctttgggacgtgctccgctggtatgcgcacaatcgcggctacgatgggaacaagggctggagccgtcacgatgccgcgaacgcggaggatacggagaaggaacagcgcgcgaatgaactgctcgccgatttcaaaaagaagcacgggcgtgacggcacgatggcggaggttttctgcgacgtgctgaagatcgatccgctcggtgaactgaaatcctcaatgatccgcgtgcgcaatctcggtgcggcgtttccccgtgagggagtggagacggaggtggagcgcatcctgcgcgcgcatctcgatggtgtgttgccgaagctggacgacctcgtcattcaggcggtgatgcgtgatcacaccgcgctctccgggccggactaccgtctgccctcgcgctacggccagcggctcgccgatggttcgctgagtcccggcgggctgctcttcggccagcttgttccgcgttttgacaaccgcatcattgcgcgctgcccgatcaccttcgagcgcgtgtaccagcaggcgcttgcggatgaaaaagatgaggcggaggcgaaacatgaagcggagaaacaggcgaaggtgccgggtattgattgcgtggaattccaccgcttccgctgggcgatgcagcttgccaacgtgcaggtggcgacgggcgatgcgcgcaagacgcgccggttgtccgtggcggaacgcgctgcggtgaatgcggagatggagaaggaaggctccctcacaccgggcgatttcaagaaggcggtgcgggcactcaccggaggagcgaaggacaatctcgaacagcttctttcccatcccgatgccgaccgcgcactcgtgctcgatccggtgcggcgctacgtccacgggaatgcgcttgcgtcctcgctttttccagcgctctccgagcgctggaaaaagcggctcatggggcaactgcggcgtggaaagcaaatcaccgtcggcgaactgctctcggagtgccctgagatcgagccacaagtggtttccattctcgacgggcagaacaccaagaagaggaagaaggacgagccgctcacacgcgaggcattgctgaaaaccccgctccatgtgcagccgccgaatggccgcgccccgcacacgcgtgacgtgatgaacgcagtggtgaagtttgtctttgcaaacgacgggcacccgatggaggaggacggcccgctcttccgcagcgaagccatccgcaacgcgcagcttcagcgcgccctcgacgagcagacgaacaatcacctcgtgcggcaccggctgaaactgctcgaacggctgcacggggacttgatcaaggaatatgcgaagggagatcgcgcgctcatcgcccgcattaccatcgaggtgaatcgcgatgtgaaggagatgtccggcaagactgcgcaggagcaggcgaagatcaccgggcagcagctagcgcacttcaagggcgtggcgaaaaaacttgaagccgcctacgaggggaagggtgtccacgtcggtcccggcctcatccgcaaggggcgcatcgccgaggatctgaactggacgtgcccctacacggggcatccgtatgatgccattcagttgctgcatcgggcggtggacaaggatcacgtcatcccgagaagcgagcgcgccagcgacagcctcgattcgcttgtgatcacttttgcagagatcaacaagtggaagggaaagcgtactgcggttcgctttgtggaggaagagcagggcaagcccgtgccagggcttcctcaactcacgatcaagacgctgacacggttcactaaggatgtggaggcgctggaaacattcaaagggcatgacgacgaccagcgacggaagaagaaccgcaagcgcctgctgctcttgcgcgattacgtggagaaggaattcactcctggcgatctcacgaagacttcgcagatcgtccgcctcggcgcgcaggcattgcagcggcattaccttggtgcggaggagcagcctgtgatcacttcgctgcccggcagtgtgaccggcgcggtgcgcaagtcgtggaatctcatcggctgcctctcgaccgccaatgcacaggtgctcgaccccgaaggcaaggtgaagaccaagacggaaatccgcggcatcacccatctgcaccatgcgctcgatgcgtgcgtgctcgccttcacctcactcttccttccgcgcgatggtggcgcatgggaactgctggtgaagcgacgtctgaacgccgatgagcagaagcgcgcgagggaaatcttccgcaacatgatcgagatcacgcaggacggggaaatgcggctggccgacatcgcaccgcagttgaagatacaaatctgcgagaggctgaaggaacgccgcgtggtgcagcacctgccgtcggatctctccggcctccggtgcaaggagaccgtgtggcgggtttttgatcccacggacattcatcccaatgcgctgcggatttctcgctggcttacgaagcagggaataccaattccattgaaggatgacgagacattactgattgtcgcccgcaagcggagggacaagggagccgagaagccgaagaagcttcttcgtgagacaccgacttggtggtggttttacgactccccgctgaaatcaaaactgattgggttggagccgactgtcggcaccacaggaaaattacgtgcgatcaaagcggtgaaggttctcggtgataattttggaatcgccttggccggtggggatggcgttgtcgtgcgaccgttgaaaatatggccgcagcttgccgctctcaaagcatcgaacggagggaagcgtccccaagtcatacgaaaaggaagtctactttcagtcccgcgcgggaactacgaaggagtctggatggtcgttgaatgcaaggacgataaaacgaagggtacgctcgtcacgctccacgttcctgatttggcgtcggcagagaaggctggagagagacaacgaattcgcgatgttcgcgtaaggacacttgtgaaggatggaatgatgctgctgtccccacgactctgcggcatcccgtcaacccaggttgaaaaggcaaagcaagactcgaaggaatgaccggatggaggaatgaggcatgtccttccacatcgtcagcattgactcgccgcagtgttcgctctcgtgccgcgatgggcaactgacttgcaagacggtggacggggagaggaagctgccgctggaggacgtggcttccatcatcatcaccagtttctcggcgagcatccacagcaacctattcctcgaagcggcgaagcacggcgtggcgctgatcatctgcgaggacttcaagccggtgagcctcgtgctgccggcgaatcgctccaccgacacgctgctcacgcgggcgctcttgaagctggaggagaagaccatcgcacgaatgtggcagcagacggtggatgcgaaatgccggaaccagcacgcactcgccgagcatctcgcgccggatgaccgcgcgctgcctgcgctccgcgcaaatgcgtggggacgcaagccgcacaaggaggcggtgtgcgcgaaaatgttctggcagatcttcgggcggagccagggcgacccggagttcacgcgcgaccgcgcgtcgggcggactgaacaatctgctgaactatggctatgcggtgctgctctccacgatcctccaaaaacttttcggcgtggggctggacccaacttggggcatctcgcacgcgccgcgcgaacgctccacgccgctggcgtatgatctgatggaaccgttccgacggtgcgtggactggcgggtggtgcaatgggtgcggcagcagggaggcaacggcgcatcgtcctcgccggagaagccattggaagtgacgccggagtttcgcaagtgggtgacgggtttcccgctcgaacgcgtcgagtatctcgatctcacgctggatgtgcgtgggtgcatcgagggcgttgtgcgcggcttccgccgagcggtgctcgggggcgacacaaaattctaccggccatggacaccgagaaattcaaaatgggctggctgatcgtcgcctttgatctgcccgtcgggaccaagcagcagcggaagacggcgagcggtttccgcgaatggctgaaggacgacggctaccagatgctgcaattcagcgtgtacgtgcgggcctgtgtgacctttgcacggcaggagacgcacattgatcgggtgaagaagaatctcccgcccgaagggagtgtgcgggtgatcttcgtgacgcgtgcgcagtgggaaaggagcattgtcctccacggttcccccgccgccgaaacggcggcggaggaactgccggagcagattcagctttggtaaagcgctctatttgagcgccctgctcccagcgactctgctgtgccggggattggattcaaggcaaagcgctcgccacttcgtcatattcgccgcccttactctgctgtgccggggattggattcaaggcaaagctggcgcggacggctgcgtgggagcggtcgtactctgctgtgccggggattggattcaaggcaaagctgattgtgcgccatcaccttttcaccgggcactctgctgtgccggggattggattcaaggcaaagctgaagtccatcacgcgcaagcgcatggcgaactctgctgtgccggggattggattcaaggcaaagcggcgcggtgccattcgtcgagcggttcgcgactctgctgtgccggggattggattcaaggcaaagctgcgcgccgcggcagaggacggcaagccacactctgctgtgccggggattggattcaaggcaaagcaaggatatcaccgtcttctgggtaagcgaaactctgctgtgccggggattggattcaaggcaaagctcctcgctctcactcccgagcggccgctctactctgctgtgccggggattggattcaaggcaaagcggaaactccccgctccctttccatttaataactctgctgtgccggggattggattcaaggcaaagccacgagcgcagtgtaaagcgaataggcgcgttcgcgccatgagcgatggctgatgaacgcgcagcgttcggcagacagcgcgaaaatttttgcgaacaacagggcggcgagagcgcggaactgagggacatgctgattgcccgcagttctccccgttctcgacgatcctgccccccgcctgcgcaggtgcgggcatgtgcaaacactaccggaaggagtggactggacaaggagagcgggggaagaggggacggggagactgggagacggagagacggggagacttggggactgggggacggggtgaagaggagatggggagatccgtcttgcgccaccggcttgggtgaggcagaatcccgcccatcatgagcactgtcgccgaagtcattgatgcggtgaagcacttcaccgaggaggaaaaggatgagttcctcgcccggttgcaggagattgcgtttgaggatgcatgggaccggcagatggaggcggatgcgaaggcggggcggctggatttcctcgttcgggaggcggatgattcggccggcagcgggactttgagcgaggggcctcggggaatgtagccgtgaagtcgcaggccacggcgcggttctggaagggctatgcggcactgccgcaggaaatccgccgcctggcggacaaggggtatgcgctgtggagcaaggatccgtggcatgtctcgctgcatttcaagccactggcaggcttcgaggatttgtggtcggtgcgggtgggacggcaataccgtgcgctcgcgcgtcgcaagggggagaaggtcgtgtgggtgtggatcgggcatcattccgaatacgacgccttgctccgccaacgataaaccgccctgtcccgggggctggaagggccaagggacataggcgctgggtggagattgattttcgcagttcccctcgttcccggcgatccggcgtccgcctgcgaaggtgcggggatgtgcaatcactaccggaaggagtggactggacaaggagagcgggggacttggagacagggagatggggagattgggagatgagtcgcggctttacgaaggatacgcggcgggctagtgtttttgcatgagcacgatcaccgcgatcctggaagccgatgccgatggcacgctgcacctgccgctgccggcagagttgcgcaattccaagttgaaagtcacagccacgatcgaagccgcgcccgaggaatgcgaacgaccgacgcgggagacagcactggccgcgctcaagaaattgcgggagatgggcacgttcaaagaaatcaccgaccctgtggcgtggcagcgggaaatccgcaaagaccgtccgttgccgggccgggattgagcgatgcttctggacagcaacattctgatttacgcggcgaaccagaccgcgccggcgatcgcggcactggtggtctccggggacaacgcggtggccagcgtcacacggatcgaggtatcgaggtagtatgggttcacggggctgaagccggaggagaatggcgcgctcgacatcctttttcgccgcctgacggtgcatccgctggatgcggtggtcattgagcgtgccatcgcgctgcggcaggagcgcaagatgggactggccgacgccatcatcgccgccacggccctcgttcatggcctggaactggtgacgcggaacgtggacgacttccaacacgtcagcgggctgcgactcgtcaatccgtttgaggcctgagggccggaccgggcgagcgggcatgggcaatcattaccgtaaggaggaagcaggacaaggagactgggggaagaggggacgggggacttggggactgtgagaggaggtgccgtggaaaagccagggccacctgccttagggcttgtaggaggccgggaggttccggcaggatgtgggcagaaaggcagccacgcccatgcgcatgattttcaacaaggaacttctgaatgaggagcaggcgctggttttccagttgcggcaggaggagaaggtgctgctacgggagattgcggagcagatggggctttcggtgaaacgggtgcagcagatcgagtgtgaggcgcgaaggcggctggaggaatatggggagaatccgagggagggctttgtgctgctgcccacccgggtgaggaagatgctggagaatctggagttcggcagccgttccgaggtgctggcggcggtgcagtcgggccggatgtattatgatgaggagaggcggtggagcggcggcttcaatgtcgcggatttggagaagacgggcatcaacgtcgcccggctgcgcaatgcgggccggaagagctgggacatcctgctgcagtggctcggcctgcagaccgcggaggagcaggaggagattgcgaaaaggaagatggaggaattggaaaggaagcgtgcggagcggctggagcggctccgcaggaaggcggaggaggtgcgcgcgaggaagagggcgaagaggaagttcccgtggtgaggcgacgggacgagaaaacggggattgcttcctaggcgagcgcgtccttgcagtattgcacgcacttggccacttccttcacggagtccgagcctgcggggatgggatactccagttcgatctcggcggggaatgtccacttctccttcctgatgagctggaggatttcccggatgggcgtctggccctggccccagggcacgttgccgccgtcggcggtcctgtccttgaggtgaaggttcgtgatgcggtcgtggtatttctcgatgaccgggagcggggacaggcccttgctgccggcgaagtaatgcccgcaatcgaggttgaagccgatgtatttgccgagggagaggatggcatccatcttgtccatcgccgggtagttgttcgtgtggttgtggaagccgacccagattttgtgcttctcggcgaagggcgcgagtttctcggccagcgcctcgttgcgctcggtggtgatgccgatgcagccgagcgccttcgcgatttggaaattgaactcgatgtcctcatccgactttccaaacggggtcttgtgaatgtggatgttcaccccggcgtcgttgtacatcttgcgaagctcgcggcattttgccagttgcgcctcgcgctgggcatcggtcggcttttccgccgccggggcaggggcgcccttggcaggcttcgcgccgccggagatgccggcataggcctggatggtgttgcccatcagttccacctcgctgatgccatcctgcacgagggcgctgaggatgtcctccgccgaactgaactggctgcggtagctgtaagtgatgcacccgacgcgcacgccattgaagacggagctgggcttgcccgccgccgctgatgttgcggctgcggccgcgtggagcgagcggggcatgacggccgaagccgcaaggatggccgcgcgcccgagaaactcgcgccgcgtctggatgttgcctgtgctgatggatgccgggatgttcatggtggggaggaaagggtctggtgaaggcgcggtcaaacagggaagtgcggaggactcggaaaggaaaggtacggagttggcggaggagcgccgcaacggggaggaggagaagcgcgagggaagggggcgaggaaaatattcccgcggtgacgtcggaggaagagaggaagcggggagactgggaatggagcggagcgacatagcctgccgaaggcagtccgaagggcagcgccggagggcgatggcaaactgggagactgggagatgggtcgtgcgttgacgctgcgatcggagccgggcatcctgaacggcgatgagcctgccgcgtctctacctcgaaacgaccatcccgagctacctcactgcgaaggcggagccgggatttacgaatggcggcgcatcaggaggtgagggaagagtggtggaacgatcaccggcacgaatacgatctctacacgtcggcatttgcccgtgaggaggccgcggagggaaacccggagctggcggcagcccggctcgcgttgctcgacagcattccggtgctcccgaccacggaggaggtggatgacatcgcgggcaatctgttggagggcggattgattccggccaaggcggcgacggatgcctttcacatcgccgtgtccgcggtgcatgggatggactttctgctgacgtggaactgcacccacatccacaatctcagcatcatccgtcgcgtggagcgcatctgcgcagccgcggggtatgcctgcccggtgatttgcagcccggacgatcttctgccacctttcaagccatgaacgacaacgatctgctccaggaaatccatcgcgtccgcgagaaggtcgcgagggagtgcgattacgacgtgcataagatcggcgagcggatgcgccagcgtgaacgcgaggagatggcgcgtggggtgcgctatgtcccgtctccgcagaccgcagtggtgagggagccgccggagaagtaggcgttcgcttttcaaaggaatccgcagggctgaggggccagacgggaagcgatgaaacgaacctccgtgcagcgtggcgtccctcaacccttgcgagcggcggctcactttgaatttcactacaaagggcacaaagggcacgaaggcgatgcacagggatttcctttcatccaatgcctgttcatcgtgtccttcgtgttcttcgtagttcaaattgaaccattacccggtcgccgcaccgctttacgttattccaatatgcgagaaccaaccctcatgagagccctcagcatttccacgctttgcctcgcttttgccgcatggctcccgtgcatgcgcgcacaggacactccttcacccggtgctgcggtatcggagatgcagaagtggatcgcgacgacggacgagcagtggcaggcggcgttcaagcgcgacgtgatggatgtgcatctcatggaactcgaaaagctgaagcagcagtacgtggccgcgcttgatgccgccgtcacaaaggccagcagtgcgggagatctggatggtgcgctcgcgttgcgcgaggaggagaagcggttcgctggcacgaacctgctcccggagcaggacgaggcgacggatggcgcgaccgtgaagcagatccgtgctgcggtccgcgcgctgattgcaaagcttgagaaggacaccgccgcccgcacgaaggcgctgcacgcgaagtatgatcaattgcttgcggatgcgcaggcacagctcaccagggcccagcgcctcgatgatgcgctactggtgaaggccaagcgcgagcaggtcgcagcggcgtggggcaccccattggccggcggaggcgtcgtcttcacaccgcccgccgcgcagccgaccgtgtcatcgtccacgccgaagccgacaccgggcacccctgctgcggcgaccaaaccgcaggttccgttcggagccaagccgccgggagaagtggtgattgaggcgctgattgatggaaatactacgctgcatgtgaagtccgatgcgattttctgggaaacgcaaggtgcatcgaagccaggtctctgggacaagcataatgaaccgacgtacgtcaacgggcagtcttgggtgccgcgctggcgtcccaagccgcgttccggccctgagactagctttccgacaccggtatcgctgggcacgattgatctcgaatgcgaacttctcgcagttaccgatcaaaggggacaaaccggaattcagaataggacgccgattgaggcaaccattgcggctcacgaattcattgtccgaattccagacaaggagaaaggggcgaagtggtacaagtttgcgcttcgcccaaagaaaaaatagccgggcaccgtacaatccgcaaggcagggaagtccttgggtatcgggaaagggaattgacggctgtgaacggacggcaggttgcggaatgcttgcggcgtgggcgaagcttggcatcattgcaccgatgatcacgagcccccggttcattttctcactgctgctggtatccggcagcctccttgtggcgcaggacagcgcaactcccgctgccgcggatgcacccgctgccgcgccgcagagcgaaatgcaaaagtggatcgccaccacggacgagggatggcaggcggcgttcaagcgcgatgtgacagacgcgcacgaggcggaggtgaacaagctgaagctccagtatctgaacctgctggaggaggcagtcgccaaggcgagcaaggcgagcgatctcgacggtgcggtggcgcttcgcaatgagcagaagcgattcagcgacacggaatttttcccggaaacggacgaggcgggggatgccgcggtcgtgaagcagacccgcgccgcacttcgcgcgctgctgatgcaggcggagaaaaaccgcactgcccgcgcgaaggcgctgctcgcaaaatacgacgcgtttctcgcggacgcacaggcccggctcacgaaggctcagcggctcgacgatgcgctgctggtgaagggcaagcgcgaggaggtcgcgaaattctggagcgggcctggggttgccaccgcggggaatgccgccccgcctgcgcccgcgaacccggcgacagcgcaatccggcttcccgcccaggacggcgacgacgaagcctgctgctcctgcaaaaccggcggtatcgccgaacatcgcagcgacaggcggcgatccgaagtcagcaatcgtgggcatttggcgtttcagttgggacaagaacggatggaacgaggcgcgcgattttaaggcggatggcacattcacgatccccgagaatggaaaggaaaagggcgggggaaaatgggaggtggcagggaacaagatcatcgtgacctactctggcgggggcaaagatgagatggttctgccgctggatccgagtggcaccaaggtgctcgggaaacggggcagggagatgaaggctgtgaaggaaaaatagcgaggggctgtttctcttcatgggcgtttccgtgcctccgtggatcggacagcgaacggatgtgacggaagtgtagcacgccggacgccgtttccgcttttcttccgcaggcaactgcctaagccctgcgcgctccatgcaaaccatgaaacaccccgggaacgccctttcatgcagcgcggtgcgcgcggccaccgcgttgcattccttggcgtgcggcggcgtgccgcatgcggagccccgaaggaacttcgcgacaagagaacgcgcagatgttgacagaagcatagcaagagataactaaattagcggtgcctaattttatgatcttcggaaaacttgctgtgccagcccgcctcgccgccgcattcgccgccgccgcaatcggcggcgcgctgtttgcagagaatcctgcgacggatggaaaagccgccactcccgcggccgcggagcaaaagtggaacatccacatgcagaacaccgacatcatccagggagacctgaacgtcccggccaaatactccggcccgaacagcctctcgaccgcgggcgagacgaacgagaccgtgtcgctcgacatttcgctcgggctgcggctctggcgcggtgccgaggcgcatctcgacgggctgatgtggcagggcttcggcctgagcaagacgctcggtgtcgcgggttttccgaacggcgaggcgttccgcgtcggtgtgaatgtgccgaacttcaacatcccgcgcgcattcatccgccaggtgatcggcttcggcgggccgcaggatgatgtggccgacgacgcgctgcacctcgcgggcaggcaggatgtttcgcgcctcacgctcacgctcgggaaaatgagcgcgaaggacatcttcgacaacaattcctacgcgaacgatccgcgcacgcagttcatgaactggagcctcatggcgaacggtgcgtgggattatcccggcgacgcgctcggcttcatcaccggcttcgccgccgagctgaaccagccgaagtgggcgctgcgccacggctttttccaagtcccgcgagtctcgaacggtgtcgcgattgacggccactttttcaacgcgtggtccatgatcacggagttcgagcaccgccacacgatccgcgaacatcccggcgtcgtccgcgt

SEQ ID NO: 2537 - DNA, 14751 bp, synthetic construct
  misc_feature 1..14751: note = Synthetic
  source 1..14751: mol_type = other DNA
gggatagacgatcaatgcaatgttgatctcgcccgccgcgggcctcgaacgatagtgaaacgtgtcttcctcgggcagattgtggcgaaggtagggaacgatggcgacggtcggaacgcgggtgcgctcttgcagccaatccatcgcgttgccgagcaaggcgggatcgccgcggaacttgttcagcacaaacccgcggatgagagcctgttcttcgggtggcaggcacatccaggtgccaagcaggtgcgcgaacgcgccgccccggtcaatgtccgccaccagatagacgtcggcgcggcactccagcgcgacgcgcatgttgacgaggtcgccgtcgtgcaggttgacctcggccgggctgcctgcgccctcgatcaccacgagctcgtggtcgcgcaacaggctgtggagcgcgtcgcgaaccacgggccacaggtgcggctttcgctgcccccatggcatctcagtgatcttcgggtcgaagcgccccatgacgatcacctggctgtaggtgtcggcgctcggcttgagcaggatcgggttcatccgcgcctgcgggacggttcgggcggccaaggcttggagatactgggcgcgtccgatctcaagtccatcgggcgtgacggcggcgttgttgctcatgttctgggccttgaacggcgcgacgcgcaggccgcggttcgagaaatgacggcagagcgcggtgacgaggaacgatttgcccgcgtcgctgctgcagcctaggatcataatcggagcgcgtggcatgacgggcgacatgtgaacgttagcgggggcggtgaccaacataattactctcccgaaatccattgcgtgggcggacggcgcaacgaacgttccgtgaacacgtcctccgtcagcccgacgttgtatctgacctgcttgaagacgacttctgtgcgatggccgctcttgacgtttttcatcgtgcgcttggtgatggtgggcacgccattcacgtcgcggatttcgtcggcggtgaagactttgaacagatctttctgcgcgtcgtagtattcttctttgagcggcaggaaactcgtgcggtcaatccaggcgagcttgcgcgtgaagctggcgcggcttttcgggacgctctcaatgacgtagcacggtttgccgtccagcgtttcttcgcgcagcagtttgtgggtgtccaaggtcagaaggcggccggaaatgtcttcgtaactgaagtccgagccgacgaaactggactcagcgtcgcgggcggcgatgcgctggacgaggttcagcgccggaaggaacagccagcggtcggcatcgcggcccggttctttgttgacgaggaaggccgtgctgcgcacatcggcggggctgtggaaatagaggaagtatttctggcggccagcgtcgccgttgcggcggagcatggtcatgtcgcggacgcgctgttcgccgcccgccgtcaccagcgtcatcaccacgcgcgccgtcatgtcccgcccggcgtaataaaaggcttgttgtgatttctcggcgatttcgtcggcggaaggtgtttgggcgagcagtggtgtggcgagaaccagcagccagagaaaagtgagtcggattttcatgggcgagttcctcggttaatcagtgaccttgagtttcaccttccgttcaaagtagctgccaatcatcccctccttgggttttcctttgaccgactcacccttggtcagcatcacttgcaacaccagttccgcatcctgggcggcatcggtcgggcgaatggtcatgggcagaaccgtcagcgtcgcgcctgcgtattggtcgagcgtgtcgccgacgatgcggcaagacatgggcaggttcacgtcccagccgggcgcgaacttcgacagcgtcgcgctgccgatggttttgggatcaaggtagagccacgcgttgcggtaaggcgcttccgccgtatcgcccttggcccgcccaatcacggtgagcaacgttttggacgcgccgcgcttcgtctcgataaggaagctgccgtcggcttgcttgagcgacttcatcgtgtccttgtcgaggatgtcaacgatggtgcgctggtcgtccttccacgggccgttgttcgcgtggcactccaggcagttctttttgttgctcagaatgccgacgccgggcggataggcgagcgccgtgggcagggctgctgcaaaactcagcaacagggccgcagccagccaggcagcagcgggcgtcgcaaacaagaatgatttcgttttcatattccaattctcttttcaatccgtcggttgtttctccggtttgggtttgggcgcaagcggcagccagcggccaaacaccacaatcagcgcgggcaaatacagaagcgtcgccaccgcgctgagcagcatcatcgccgccatgaacgcgcccactgtgatgtagggcgtcaggctggcgaacagcatcacaaaaaagcctgacgcgaacaggacggcgttgcggatgacgccccggccgggccgggccacggtccacaaaagcgcgtccgccagcgccgacggattcgcgccgctcgccgtcgcgttgaagcccgtctcggccagccgctggcggaatcggctcacgaaatgaatcgcgaaatcaatcgccatgccgagcgacaacgtgctgagcaccgagatcggcatgtcgaaatccttgccgatcaggccgaccgcgccgtagatgagcgccaccgtgaacaacagcggcacgaaactgatcacgccccagcgcagggagcggtattcgatcaccagcaacaccagcaccagcaccagcgatgagatgaatcccgtcaacattccccaaagcacgtcgtgattccaagccaggttgaagtaggcaatccccgccggcttgactcccacgcttgcctgccccgcggtcgcgacaggcaggtccgccagcggatgcgcccgcgtgaacgcttcggcgcacgccatcgcgcgccgcatcacgtcggcatcccagcttttgagttgcaggatgacgttggccgactggaacggataatccaccaggttgtccaggtcgcgcggtttcaccgccatcgtgaaaacaaacaactgctgggcgaccacctcggtcgagtccggaatcgtctcgaatcgcgcctcgtcaccatgcagcacgcggttgatccgcttgactacgtcggccaccgagacggtcttgccgaccagcgggtctcgctccagttcgcgttgcaacgactcgatccagcgcaacgtttcaggctgcttgatgaaatcggcggaaggcccatgtaccaccaagtagcccgtcgccgtgccgcccagcttctcgttcagcacgcggtcagcctggcgaatctcgctgtgggagcgaaaccaggaaaccatgttgttgttgacgcgaatctggctcatgccgaaggccgccagcgccaacaaccccagccccgccagcaacaccgcgcggctgcgcttcacccccaaccgccccagcgcggccagccagcccgacgcgccagtttggttcgcgtgctgccgctgcgccattgccagcacgcgccgctcgctcatcagcatcaagattgcgggcacaaccgtgaagctcatcagcaaaatgcccagagtgcccacggccacaaaaatgccgaacactttcaccggcacgatcggcccggtcgccagcgaggcaaacgccgccgcggtcgtgaggtccgatagcaccacgggtgggccaaccacgcgcatcgtttccaatatcgccgcgcgtttgtcccgcagttcgtggaagcggaaatagaattcgttgaagatgtgaaccgtgtccgtgctgatggccatgaggaacacgggaatcatcgaactcatgatatgcacggggtagccgcaagcgatcaacgcgcccatcgcccacacgacgctgagcatggccacgcccatgttggccgcgaccagcgccccgctgcggaacatcaaccacagcaccacacacatcaccatgcccgccaccggcgagaacacgcccatttgccggaacatctgcgccccgaacgtgtcgcgcgccaccggatcgcccgccacgtaaaaccgttccggcccgtgatagtccgccacgacgcggcgaatctggtccgcaatctccttcccgttggccgtcggctcaatcggcacgtaaatggcggtggtcgtcgcgtccgccgaaataaatcgccccaccaacagcggattttcaaacagcgccttgcgcaacgccgccacttccgcggcgttcgtcggcacgtccgccagcagcgggcgcacaccgagttggtcgccgttcacggtcacgtcatccaccgtgcgcagtcccagcacgtcacgcgtaatcacgcccggcagcgccatgattttgtcagtgacttctgccacacgccgaagtgactcgggattaagtagcccgtgctcgttgacgacgccgagcgcgatggtatcaggatgcaggctaaactgccgctcgaccgcgccgttatagacccgcaccgctgacgtttccggcagcatgtgcttcgggtcggtgtcaatccgcgccttggcgaactgtgcggcaaagagaaccgtcaccagcagcgccgccaccagcaccgtcttcggaaatcgcaccgaccagttgaccaaacgctcgcgcatcggaatgcttttggccgctacttctttgccgccttcatcaactcatgcccttcggccagttgctccatcaacacctggcgcaggagttcacaggccttgagcatctttggattcgcgcagcggtagaagatgtttagcccttcacgccgcgtcgccacaatgcgccggtgccgcagcacggccagatgttgcgagagattactcttagccagcccgagcgcggcggccagttcgttcactgacttctcccccgcttgcagggctgcgagcaccttcagccgtgtcgggttggccatgcatttgcagacctcggcgtggagctggaaaatccggtcgttcgtcgcgttcatgttagttgcggtgtttctaaactgctaagcttcgcgggaaacaaatactgcaatcagccagacgctgtcaaatggaaagcgccttcggtgaagacggcgattggccgcaattcctcggggcagcgttcagtcatggtggtgaccatgcgccaggcgtttttgcggatcgcccaggacgcgggtcaggtgctcgcgcaattgcagccgggcgcggagcagacggaccttcacgttcgcctcgctcaagcccagcgccgccgccgtttccttcaccgaaagaccctcgacgtcgcgaagcacgaaaacgaggcggtgcttctcgtccagttggacgagcgcctcgtccagcaaacgctgcgtttcgttgcgctcgacgagttcctccggcgattgccgccagtccgcaatgtattccgggtgagggatgccctcgccatcgtcgcgcggctcggtggcttcctccaaggaaacggtgtccagccctttgcgcttgcggatgactttgagcgcagcgtgcgtggcgatgcggtaaagccaggtggcgaaccgcgcctcttcgcggaagccggcgatattctccagcgcactgatgaaggccgtctgcgtcacgtcctcggcgtcgtagacgttttgcacgatgcgcaacgctagcgtgtaaacccgccgttcgtgccgttccaccaactcctcgaaaccgccgaggtcgcctgccttcgcgcggcggacgagttcggcgtcgctgacttgggatgtgtttggtgctgccgacactgggttcacaactgcgaccatgctgccggctggcgaacgcgatgtccatcccttccgcgtcggtcttgccgcaagttaacgcttgccggtgtgcgccggcggcctgaatcattgcgccggtatgggcacgcaaccaactggcacctctctcaccgcacacgaactgaaactcgcccgcgaactcagcccgcgccgctcgacttccgtcgcgacggacctggacggtttggtggccgagcatctggcgcatttctcgattgacccagcctccgaactcggggcgacgctggcccgcctcacaacccacatctactgcacgaacgttgagttgcatcagctctgggaactcacggtgcgtcaactgcagcgtctcgaccgccgcgatcgcatcgcgtatttcaacgccaaacgtttcctctgcttccagctcgccaagctgctcgacacgctgcaaaatccgttccgccattcctatcagacgctggttgaacaccaggccgtccgtctcgcgaaaggtccgtatccgatcttcgacaacgtcgccgccgtcttctccgccacgccggtcatcgcgcggacggcgacgtatctctatgcctgcaccgagtggattgacgacgcgttccacgggcgcgagatgctgctggaagtttattcgcggctgctgaacccgacttcgatttcgctcgccaaccacatcgtggacgtcgagtgcggcccactggcgcacgaatacatggcgtggaatttcaactccggcatggcggcgatcgacgggacgctgagccacctcgtcggccatcgcgacatcatcctcagctcgcgcaacatttacggcggcgccttccaactgctgcacgactggtttcagaagccgagcaacctcgacgtggcggttcaattctttgacggctacacggtcgaggcgtttcgcgcggcgctggccgatgcaaggctgcgccacgcggcgcggctggcggagggccgtgaggtttacgtctatctcgaatcgccgtgcaacccgcacggttacgtgctcgacgtgccggcgatttgcgacgcggcgcaccgagaaggactgaccgtgatcctggacgcaaccatttccacgccctttctcgctcaaccactgcgccgcgaggtgcccgccgagcggccggactttctgatctacagctacacgaaggacatcaccggcagcggcacgacgaccgcgggcgtggtcattgcccgcaacgagcggatgttcatcccgaagaatgaatcggtcacgacgacggaccttgcgggccgaccggtgaagtatccttgggacgagacgttgttctggaatgtgttttacgtgaagggcgcgttcctcgacgcggacaaggcgtttgaagtcatcaacggctcgcgcacgctggacctgcggatgttgcgcaaggcgatcagcacgacggtgctcgcgcggtttctggccagtcatcccggcatcaccgtcaactcgtgcgcccttgacacgaacgaaaacgccgccgtatgccgacgcatcctgcggctgggcctgccgccgccgctgttcacgattgatttcgagaagtcgggtcttgaccggctgaccttcgtgcggttcttcgattcgctcgaaccggcattcggtcatcaggtcacgctcggtcagttcaacaccgtcgtgctttgccccgcgctgacgagccattcggaaatgagcgagccggaactgcgcgccgcgggaattgcgcccacgaccgtccgcatcgccatcggcgacgaagacccgcgccatctcatcgcgcactttgtgcggctggcggaactggtgattgatcctgtgcagccgggcttttcggcgcgcttgatgcagccggcggaagtggacgagctttaccgccgcacgtatttggatgtgcattcacgctgggcggcgtcgcagccgaccactgcggagttgatgcggtgacgcggcgcggccgggtgaagagataatactggagggtgcgctcagtctgccggctttgcaggtttccgcctcacttccggctccggcgcgtacgtgggaaaccagacgaagtcctcgatggccgccttcaactcctggtcctccagcgaacggccgcagccctcgtcgcgcgcggtttgcgcgactttgaaaccaatggcctggctgatctgccgcagatgccggaggctgggatacagcgcgccgttccaggaatcctgcgccacggtgaagtcggcgagcgtgtttgcggcggcgaggaacaacgagtcgctcacgcggctggcttcgctgagcagcacgcccagaccgacgcccggaaagacgaacgcgttgttgcactggccgatgacgtgggtgcgcccgttgagcgtgaccggctcgaagggcgaaccggtggccaccaacgcgcgtccgtcggaatgctccagcgcctgcgccggcgtgcactcggctttgctggtgggattgctgagcgggaaaatcaggggccgctcgcaatgcgtggccattgcgcggatcgcggcgggtgtgaagtcgccgggctgaccggtcgtgccgatgaggactgtgggcttgaagacttcgatgacttcgtgcagccccgcaggaagcggctcgcggaaccccgccgccgccagcgctcccgctgaccactcgacctcgcgtttgtgtttctccaaatcgctgcgaccgacatggacgatgccgcgcgagtccatgaagagttgccgctgtcgcgccgtggccgcgtcgagtccggcttgtttcagggccgtgctgagcaacgcgccggtgccgacgccggccgcaccggcgccgacgaagagaaaccgttcctcgcgcaactgacggcccgtgagtttcagtccagcgagcacgcccgccagcgtgacgcctgccgtgccctgaatgtcatcgttgaagctcggcagccgttcgcggtagcgcgcgagcaggcggaaggcattcgccttcttgaaatcctcccactgcaagagcgcgtgcggaaacacagccttcacggcgcgcacgaattcctcaatcagtgcgtcgtactccgcgccgcgcaaacgccggccccgatagcccagataaaacgggtcgtcgagcaaagcctgattgtccgtgccgacatcgaggctcaccggcaagcagagcgatggatgaatgcccgcgccggcggagtagaggatgagcttgcccaccgggatggccatgccgcccgcgccctggtcgccaaggccaagaatgcgttcgttgtcggtgacgacgatgaggcggacgttgtggtggctgtagttccggaggcgcgcggcaatgtggccgcggtcgcccgggcaaatgaagacgccgcggggccgccggaagatgtggctgaatttctggcaggcgagaccgacggtgggagtgtagatgatgggcgcaaggcgctccaggttctcggtgagcagccggtagaaaagcgtttcgttgcggtccagcagcgcggccaggccgatgtattgttcgagcgggtcctcctttgagaggacgtgctcgagttccatcgcaacctgctgttcaagggtgagcatgtgcggcggcaggaggccttcgaggccgaggtgttttcgttccgcgccggtaaacgcggcgtccttgttcagcagcgggtcgcgcaacacctgttcgccccgcgaccaacggacgcggggattggatcgagtgctcatcttaaatctacgttcatgctgtcaggtccgctggggcgcgccactccacgtttggcattcgccgcccttcttttgccgcgcccaaggaccaagtgcaagctcagctttcgccgaagcgactttgctccgcgaaccccgttgttcacgaacagtgctttctgccttgcgccctagagccaccgggaacactctccgcaactgtgcaagaggagtaacacatgaaagcagaaggttgcgtttgggcgtttgatctcggcaaaggctcgattggcgaagccgtccgaaacggcaacgtgtttcttcacaaggcgtccctggtacccgcccgtgccccgtttcacactcagcaaaacaaaaccggcgaggattgccctcgccggctttgtttgagaaacgctttggtcactttcgtaacgaactggtgtaaacgcctagcgcttagattttccagcctgcgttatctaactttgtcttgattccgaagaacgactaccaacccaaaccatgaatgccaagggaaaaatgtcctccgcaacagcagccgatttggaactggacgatttggaactggatttcgatgtgggccacagttccatcggttgggccgtccttaaaacacacacaggccaaacgccaacattgctcggctgcggctctgtcattttccccgcggacgattgcctcgcctcggcacggcgcggcttccgccggcagcgacgccacatccgcgccacccgtctccgcatcgcgcggatgcggcgcttgcttgcgcatctcggcgtgctcacgacggagcaactcgaaacgccgggttgtgcgtggccgtggctgctcgccgcgcgcgtgctgcgtggcggagacaggctttcatggaccgaactttgggacgtgctccgctggtatgcgcacaatcgcggttacgacggcaacaagggttggagcaagcatgacacggcgagcgatgaggactcggataaagaaaagcgtgcgggcgaattgctcacgtcgtttgaaaagaaacatggccgggccggcaccatggcggaggtcttctgcgacgtgctgaaggtggatccgctcggcgcggtgaaatcctccatgcagcgagtacgcaatctcgccgcggctttcccgcgcgaaggcgtcgaatgcgaggtcgagcgcatcctgcgggcgcatgtgggcctgctcaccaacctggatgatcggctcatcaacgcgctgatgcgggaccacacagcactgcccggccctgatctgcgcctgcctgcgcgctatggccagcggctcaatgacggctcgctcagtcccggcggtctgctcttcggccagctcgtgccgcgttttgacaaccgtatcatcgcccactgtcccatcaccttcgagcgcgtctatcaggctgtgaaagcggacaccggcaacgacgagcaggcgaaacacgaagcggaaaagcaggcgaaggtccccggcgtgggttgcgtcgagttccaccggttccgctgggcgacggaattggcgaagatcaagatcgccaccagcgatggccgtccgccgcgcaacctcaccgctgccgaacgacaggcggtaaatgtggaaatggaaaagagaggcttcctcacgccgaaacaactccgggatgccgtgcgcgcgcaaaccggcggtgctccagacaatctcgaacaaatcctcacgcatcccgacgccgagcgcgcactcgttctggaccccgtgcggcgatacctccacagcgatcaactcgtctccacgctctggcaggtcttgccggagcacctgcaaaagcgcttgcgtggtcaatggcgccgcggccatgccatcaccgttgcggaattgctcgacgccagtggcgactttcgcgccgctgccgagaccctgtgccaacggcacctcgacgcgcagaacacaaagaagcgcaagaaagacgaaccgctgacgcgcgaagccctgctgcacacaaaactgcacgtccaaccaccaaatgggcgcgcaccgcacacgcgcaaggtaatgcgcgaagtcgtggaattcgttttcgctaccgaccggcacccggcggaggaaggcggcccgctttatcgcagcgaagccatccgccaagcgcaactacagcgcgctctcgatgagcagaccaacaaccatctcgtccgccaccggctcaagctcctcgaacgccttcacgcggacctgctgaaaacgtatgccggcgacgactgcgcacgcatcgcgcgcatcaccatcgaagtgaaccgcgatgtgcgcgagctgtccggaaagacggcgcaagagcaggcgaaattgcaaggccagcaactcgcccacttcaaaggagtggcgaagaaactcgccgaagcctacgaagggctgggcgttcacgtcggccccggcctgatccgcaagggccgcatcgctgaagacctcggctggacttgtccttacaccggcaaggcctacgacgcgcttgatctgctccaccggcgtgtggacaaagaccatatcattccgcgaactgaccgcgcgagcgacagtctcgactcgctggtcatcaccttctccgagatcaacaacatgaagggcaagcgcaccgctgcccgcttcgtggaggagtttcaagggcagcccgttcagggtttgccacaagtaatgatcaaacctctgtccgcctatctcaaagatgtggcagcgctggaaaccttcaaaggccacgatgatgaccagcggcggaagaagaatcgcaagcggtggctgctgatgcgggattacgtggagaaggagtttacgccccgcgatctcacgcagacttcccaactcgtgcggctcggcgcgcaggcgcttcaaaaacattatgttggtgtggacaagcaacccgtaatcacatcgctccccggcagcgtcaccggcgcggtgcgcaaatcttggaacctcaccggctgcctcgccgccgccaatccgctggtcctcaatcccgatgacctcgatgaaggcggccggccgaaagtccgcacgaagacggaaatccgaggcatcacccacctgcaccacgcgctcgatgcgtgtgtgctcgccttcgcctcgcactttctcccgcgggacggcggcgcgtgggaactactcgtcaaacgacgcctgaacgccgacgagcagcgccgcgcccgcacacttttcggctcgcatatcgaaatcacccaggacggagaactccgcctcgcagacttgtcgcccgcgctgaaagcgcaaatttgcgagcgacttaaagagcgacgcgtcgttcaacatcttcccgccgatctctctggcctgcgttgcaaggaaaccgtctggcgcgtcttcgaccccgccgacccgcatccgaattccaagcgcatggcgcgctggctcgcgcagaaaaaggtcgcccttcccgcgcccgatgccaagacggcgctcatcatctgccgcaagcggcgcgctgccggcgtggcaggcgaagagagcgcgggtggcaaagtctttcgcgagaccaaaacgtggcgctgggtctatgacatcaaagacaaatccgctctgctcggcctcgcgccggaaggcgacgcggcggctgccaagctcaagcggatcaaagcggtgaaagtgctcggcgataatttcggcctcgcgctggacccggagccgacgctcatccgcccgcacaaggtatggcaccaactcgacgcgctgcggaaagccaacggagggaagcccgcccgtgtggtgcgcaaagggtcgctcatccgcgtgctgcgcgcaaagtcagcaaaggtggactaccacggcgtatggatggtgcggggcacgacgctcaaccagcgcgccggctttctcctggacctcagcccagccgaccagatcctctatcgcggccagccagagtgtttccagaatgtctccgttgccaccctcatgaagtgtgggttggaggttgtgaggtctcctctgtgtggcgtaacgcctagccagtgaactcacggcgcggagcgccatgtcctaccacatcgtcagcatagactcgccgcaatgctcgcttagctgcaaagacggccagttgacctgcaagacggcggaaggcgaaaggaagcttccgctggaggacgtggcgtccatcatcatcaccagcttctcggccagcattcacagcaatctcttcctggaagccgccaagcacggggtggcgctgatcatttgcgaagcgttcaagccggtgagccttgtgcttccggccaatcgttcgacggacacgttgctttcccgcgccctgctcacgctcacgccgcgcacccgcgcgcatctctggcagaagacgattgacgccaagtgtcagaatcaattcgcgctggcggaacacgtcgcccccaaaggcaaggggctggaagaactgcgcgccaccgcgttcggcaagaagccgcacaaggaatccatctgcgccaggacgttctggcagatctttggccgcagcctgaacgacgaggaattcgtccgcgaccgtgcgcggggcggcttgaatcatctgttgaactatgggtatgccgtcttgctctcgaccgtgctgcaaaagctgtttggcgtggggctggaccccacgtttggcatttcgcacgtcacgcgcgaacggagcacgccgctggcttatgatttgatggagccgttccgtccatgcgtggattggcgcgtcgtccagtgggtgaggcaacacccggaggtcaaggaatgggaagtcacgaaggaattccgcaaatgggtcacgggctttccgctggagcgcatggattacctggacctgacactggagattcagggcgtcattgagggcgtggtgcgcggcttccgtcgggccgtggtgcagaaccagccgcgccattacaagccgtggacaccgaaaaatacaaaatgggctggctagtggtggcatttgatctgccggtgggaacgaagaagcagcggaaagcggcgacggacttccgcaactacctcctggatgacggctaccagatgatgcagttcagcgtttatgtgcgggcctgcgtttcctttgcccgccaggaaacccacatcgaacggctcaaaaaaaatctcccgccggaaggcagcgtgcgcgccgtgttcgtgacccgcgcgcaatgggaacgctcctacgtcattcaaggcgcacccgcgaaagaagctgagccggaagagatgccggagcaaatccagctttggtagcaggcggctcgtcaaaccgacgc

SEQ ID NO: 2538 - DNA, 5732 bp, synthetic construct
  source 1..5732: mol_type = other DNA
  misc_feature 1..5732: note = Synthetic
ggattagccattttgtatttacgtttggtggtgggtttgggtttcggaaaagacgccgaagtgggatccgcgacataccccgcatcgcccggctccagcagataggctgaaggctcgccccaatacagattcggatcgtcgtagtgcaggccgggcatatcccaggtgacaagtttcatgcgggtggtggaatggggccatcaagtcgtttcgtggcggcagattttgtgcatcggccgccggttctcaagttgggtaaactctgtaaaattcgacccggttcggagtgtgggaaacccctccgcgagcgccccgcgaggcagggcccagtctccactcgccccatcgagcgccccgcggggcgtggaggagtctcaacccaccccatcgggcgcgccacggggcgtgcgggagtctcaaatcgccccatcgggcaccccgcggggcaggggacagtctcaacccgccccatcgggcgcccgtcgaggcgggcacgactctccaaccaccccatcgagcgcccgcgcgatagtcccctacatgcaaaccggacggattccggcccctttcagaaggaacgcgtgccaagcccgtgattccggcccggatgtaggcttgccaacgcggcgaacttctccccaacctgcgtctggaagagtcgaacacgcgccacccaatgaacaacggcatctctcgctcagaaagcaaacgagcggagcctttcggctccgctcgcttaaaagagaacgcttttgaaccggtgtgtccgcctggcgaacagggaaacggtctgcgctatctaactttgtcttgaatccgaggaagcaatacccgcccgcccatgaacaccgcaacaaaaaaatctaccgccgatctccaactcgcgtttgatgtcgggcacagctccatcggttgggcggtattggaagcgcacagcgggcaagcgcccgcgttgctctcctgtggctcggttatctttccagcggatgattgcctcgcgtctgagcgacgtggttttcgtcggcagcgccggcacattcgggccacacggctgcgcatcgcgcggctgcggcgcttgctgactcaccttggtgtgctcaccgccgaggaggtcgcagcgaatggatgcgcgtggccgtggctgctcgcggcgcgcgtgctgcgcggcgggaagaagctgacctggagcgagctgtgggacgtgctccgctggtatgcgcacaatcgtggttacgacggcaacaagggctggagccggcacgacgcggcaagcgcagaggatacggaaaaggagcaacgtgcgaatgaactgctcgatggcttccaaaagaaacacggacgcgcgggcacgatggcggaagtcttctgcgacgtgctcggcatcgatccgctcggtgcggtgaagtcctcgatggtgcgggtgcgcaatctcggcgcggcctttccacgtgagggcgtcgaggcggaagtcgagcgcatcctgcgcgcgcacctcggcacgcttccgcatgctgataagcggttgatcgaagcgatcatgcgcgatcacaccgcgctgcccggcccggactaccgcttgccttcgcgctatggccagcggcttgccgacggttcgctcagtcccggcggcttgctcttcggccagcttgtcccgcgtttcgacaatcgcatcatcgctagatgcccgatcactttcgagcgcgtctatcagcacgagctggcggaaggaaccgaggagcaggacgcgaaacacgaggcggaaaggcaggccaaggtgccgggcgtcgattgcgtggagttccaccgctttcgctgggcgatgcaactcgcgaacgtgcaggtggcgacgggcgaggcgcgcaagacgcgccgcctcaccgcgctggaacgcagcacggtccacgcggagatggaaaagcacggctcccttaccccgggcgatttcaagaaagccgtgcgcgcactcacgaacaaagcgccggacaatctcgaccaactcctctcccacccggacgccgatcgcgccctcgtgctcgatccggtgcggcgctacatccacacacacgcgctcgtctctgcgttgtggccgaccctcacggagcgctggcaaaagcggctcgcggggcaatggcgtcgcgggaaggcgatcaccgtcggcgaattgctcgcgcagtgccccgagatcgagccgcacgtcgcgcggtatctcgacgccgcgaacaccaagcaccgcgagaaagacaaaccgcttacacgcgaagcgctgctacgcacgccgctccacgtcccgctgccaaatgggcgcgcgccgcatacccgcgaggtgatgcgcgaggtcgtggactttgttttcaagaccgaccggcatccagcggaaggcaccgaaggtgcgctcgataacgggccgctcttccgcggcgaagcgatccgcaatgcgcagctccagcgcgcgctcgacgagcagacgaacaatcatctcgtgcgccatcgcctcaagctgctcgaacgcctgcacacagacctcattgccgatccgaaattcggtgccggcgaccgctcgcggatcgggcgcatcaccatcgaggtgaatcgggacgtgaaggaaatgtccggcaagaccgcgcaggagcaggcgaagatcaccggccagcagctagcgcacttcaaaggcgtcgcgaagaaacttgaagccgcctacgagggcttggacgtccatgtcggtcccggcctcatccgcaagggccgcatcgccgaagacctcgcttggacttgcccctacaccggcgcgagttacgacgcgctcgacctgctccatcgtcgcgtggacaaggatcacatcatcccgcgcagcgagcgcgcgagcgacagtctcgactcgctcatcatcacctttgccgaggtgaacaagatgaagggcaaacggaccgctgtgcggttcattgaggagtttcaagggaagcccgtggacggtaggccgaacatcacgatcaagacactggcccgctatctcgccgacgtgaaggcgctcaaaaccttcggcggccacgatgacgacaaacggcgcaaggagcgtcgtaagcggctgctcgctctgcccgattacgtggagaaggaattcacgcccggcgatctcacgaagacttcgcaactcgtgcggctcggcgcgcaggcgttgcagaagcattacctcggcgcggagaagcaacccgtcatcacctcgctccccggcagcgtgacgggggcggtgcgcaagtcgtggaacctcatcggctgcctcgccaccgccaatccacaggtgctcgatcccgatggcaaagtccgcaccaagacggaaatccgcggcattactcatctgcaccatgcgcttgatgcctgcgtgctcgccttcgccgcgctcttcctgccgcgagatggcggcgcatgggaactcctcgtgaagcgccggctgaacgccgacgagcagcgccgcgctcgtgagctgttcgggatgcaaatcgaaatcactcaggacggcgaactgcacctcgccgatctacccaacgtgctgaagacacaaatctgcgagcggctgaaagagcgccgcgtggtgcagcatctccccgccgatctctccggcctgcgctgcaaggaaacggtgtggcgggtcttcgatccggtggacccgcatcgcaactcacgccgcctcgcgcgctggctggcgcaggcgaaagtcccagtgcctgcgcccgacgcgaagacggcgctcatcatctgccggaaacgcaagaatgccgatgccgcgagtgaggagagtgtcggaggaaaagtctttcacgacgacggcaagacgtggcgctgggtgtatgacatcaaagacaagtccgcgctgcttggcctcgcgccggaaggcgacgtggcgcaagcgaagctcaaacggatcaaggcggtgaaagtgtttggggataactttggactggctcttgatccggagcctttgattctgcgagcacacaaagtttggcaccgactcaacgcgcttcgacggagcaacggaggcaagaagccgcgtgtgttgcgtaatgggatgctcattcacgtgccccgcggtatctacataggaacgtggcggctcttttccgtgaagaacaatgcctctgggctcgcagtggacatggcgcgccctgatgtcgtggtccttaagaacaagacggaaggccacaaaatcaatgtgctcctctcgacactgattaagaacgacctcgaagttctcaagacgccactttgcggcattgcgcccgccccgtaatcgaatgcgcacaaagggtggaccatgtcctttcacatcgtcagcatcgactcaccgcagtgctcgctcagttgtcgtgatgggcaactgacgtgcaagacggcggagggggagaagaagctgccgctggaggatgtggcgtcgatcatcatcaccagtttctcggcgacgattcacagcaatcttttcctcgaagcggcgaagcatggggtggcgctgatcatttgcgaggacttcaagccgacgtgtctcgtgctgccggcgaatcgttcgaccgatacgttactcacgcgggcgctgctgaagctggaggaaaagaccatcgggcggctctggcagcagaccgtggatgcgaagtgccggaatcaattcgcgctcgcggagcatctcgcgccggatgacccggcgctgcctgcgctccgcgctgcggcgtggggacgcaagccgcataaggaagcgatctgcgcgaagatgttctggcaggtcttcgggcgcagtcagggtcagccggagttttcccgcgaccgcgcctccggcgggttgaacagcttgctcaactacggctacgcggtgctgctctccacgattctacaaaagctcttcggcgtgggactggacccgacctggggtgtctcgcacgcgccgcgcgaacgctccacgccgctggcctatgatctcatggagccgttccgcccgtgtgtggactggcgggtggtgcagtgggtgcggcagcatccgcaggcggagagctgggaggtgacgccggagttccgcaagtgggtgacgggctttccgctggaacgggtggagtatctcgacctcacgctggatgtgcgcgggtgcatcgagggagtggtgcgcgggttccgccgggcggtgatcggcggcgacacgaagttttaccggccatggacaccgagaaattcaaaatgggttggttgatcgtcgccttcgatctgcccgtcggcagcaagcagcagcggaagacggcgcacgatttccgcgagtggctgaaggacgacggctaccagatgctccaatggagcgtgtatgcgcgggcttgtgtgaccttcgcgaggcaggagacacacatcgatcgcgtgaagaagaatctaccgcccgaggggagcgtgcgcgcgattttcgtgacgcgtgcgcagtggcagagaagcttcgtgctccacggttcccccgccgccgaagtggcggcggaggagcttccggagcagattcaactgtggtaaggcgctctatgcgagcgccctgccgacagcgagtctgccggcctgaagagtggattcaaggcaaagcgcgggcaccgcgtggcatcttggcccatgaagtctgccggcctgaagagtggattcaaggcaaagcatgcgctgcgcgccggtgcgcgcgctcgcgagtctgccggcctgaagagtggattcaaggcaaagccaac

SEQ ID NO: 2539 - DNA, 5519 bp, synthetic construct
  source 1..5519: mol_type = other DNA
  misc_feature 1..5519: note = Synthetic
cggcagtaatgggttgtcccctcaccctagccgccccccgggaaaaagccaagggctttcgccgcccggccccggaaaacaggcttgcccgccgccgcctttccggccaacctctccgcgttgcggacccacctcacaaccgaacgtccgcgccgggagcagcgtccggcgcgggagcgcggcgcgcgcggaacgccggcgcccgcccgtcccgctcacgcaaaaccggcggggatggcccccgccggttttgaatgcagaaacgctttcgcctcaagggcaactggtgtatccgccgggcggatagggaaccagcttgcgttatctaactttgtcttgattccacgtccaatctaaccccccctgattatgagtgccaagcaaaatatttcctctccccaccccgacctgcacctcgccttcgatgtgggccacagctcgattggctgggcggtcctgcaaacgcccgcggcgccctccccggagcccgcggcggagctgctgggatgcggcgccgtcgtcttcgcgccggatgactgcctggcctcgacgcggcgcggattccggcggcagcggcggcatatccgcgccacccggcagcgcatcgcgcggatgcggcgcctgctggcgcatctcggggtgctgaccccggcgcaactggccgcgcccggcggcgcgtggccgtggctgctggcggcccgcgtgctgggcggcggcgcgccgctcacctggcccgagctgtgggacgtgctgcgctggtatgcccataaccgcggctacgacgccaaccgggcctggagccggcaggagaagcccgacacggaggattccgagaaagcccagcgcgcccacgaattgctgcgggagttcaagcgccgccacggccgccccgggaccatggccgaggtcttctgcgatcatttgggtgtggacccgcggggcccggtcaaatcctcccgccagcgcgtgcgccacctgggcgcggccttcccgcgcgagggggtggaagccgaggtcgagcgcatcctccaggcccacaagggcatcctgcccggggtggatgacccgctcatccacgccctcctgtgcgaccacaccgcgcggcccgttcccggcctccggctgcccgcgcgctacggccagcggcagcccgacggcacgctccgccccggcggcctgctcttcggccagttgctgccccgcttcgacaaccgcatcatcgcccgctgcccgatcgcttacgaacgcgtctaccagcaagtcctggccgaaaccggcgaccgggaaaaggcccgccgcgaagcggagaaacgcgccaaggtgcccgccgcccacgacgccgatttccaccgcttccgctgggccatggtgctggcccaaatcaacatcgccgtgcccggcgcgccccagccccgcaatctctccgcccccgagcgcaacagcctccacgcggtgatggagcaaaaaggcggcctgacgaaaagcgaactcacgcaggccgtgcggcaactgaccggccgcgcgccggacaacctcgaccggctcctcgccctccccgacgccgagcgcgccctggtcctcgacccggtgcggctatactgccaccgcgacccgctgctgtccgtcctctggccggcgctgcccgcccgcctgcaacggcggctgcgcggccagtggcgccgcggccgggccctcaccgtcgcggacgtgctggcggcctgcggcgacgcccgccccgccgccgaagccgccctcgcgcaatacctcgaagcggaagccgcgaagaaaaagcgcgccccggacgccccccgcatccccgacacgccggcgggccgggtcctgcgcgtggaaagagcccggggccgggcgccgcacacccgcgagatcatgcgcgaagccgtggccttcgtcctggccaccgaccgccacccggcggaggagggcgggccgctctaccggagcgacgccatccgggaagcccagctccggcgcgccctggatgagcagaccaacaaccacctgatccgccaccgcctcaagctgctcgcgggcgacgacgccgcgggcccgcgcgcgctcaacgggctgttccgcgacctggccaacacctacgccggcggcgacctcgggcgcctcgggcgcatcaccatcgaggtgaaccgcgacctgcgcgagctgtccggcaaaaccgcgcaggagcaggcccagttgatcggccagcaactggccaacttcaaaagcgtggaaaaaaagctcaccgaagcctacgcgggcctgggcgtgcgcgtcgacccggggctgatccgcaaaggccgcatcgccgaagacctgggctggacctgcccctacaccggccagccctacgacgccctggacctcctccaccgccgggtggataaagaccacatcatcccccgctccgagcgcgcgagcgacagcctcgattccctggtgattaccttcgccgaggtcaacaagtggaaaggccagcgcaccgcccggcgctttatcgaggaggaacagggcaaacccgtgccgggcctgccccaactgagcctccgaaccccggccgcctaccagcaggcggtcgaaaagctggaatgcttcaaaggccatgaaaacgaccagcgccgcaagcgcaaccgcaaacgactgctcctcctgcgccattacgtcgaaaaggagttcacccccgccgatctgacccagacctcgcagctcgtccgcctgtgcgcgcaggcgctccagcggctctgcctgggccgcgcccgccccccggtcgtgaccgccctgcccggcgccgtcaccgccgccgtccgcaaggcctggaacctcaccggctgcctggccctggccaatcccctggccctcaacccggacgaccccgacgaccacggccggccccttcctcacaaaaaaaccgagctgcgcaaaatcacccacctccatcacgccctggacgcctgcgtcctcgccctggccgcgcacctcctgccccgggacggcgaagcgtggaggctcctcctcaagcgccgtctggctcccgacgagcaacgccgcgcccgccaactgctggggcgcgtggcggccatcaccccccagggcgaactgcgcctcaacgatctgccgcccgcgctcaaagagcaggtcagccggcgcctgcgggagcggcgcgtcgtccagcacatccccgccgacctctccggcctgcgctgcgaggaaaccgtctggcgcgtcttcgaccccgcggacccccaccccaacgcccgccgcctcgcccgctggctggcaaataaaaacatccccatccccgccccggacgcccccaccgtcctcatcatcagccgcaaacggaacggcgcggacgccgcccccgccgccggcaaagtcttccaccaaaccccgacctggcgctgggtctatgagatcaaagacaaaaccgccctgctggggctggccccggaaggcgaccccgccgccgccaaactcaaacgcctcaaagcggtaaaagtgctcggcgacaacttcggcctggcgctggacccggagccggccctcatccggccccacaaaatctggcaccagctcgcggccctgcgcgcgcgcaatggcggcaaacccccgcgcgtcttgcgcaaaggcaccctgatccgggtgaaccaaaaatccgcccgctccgactaccgcggaacctggagggtgcgcggcgttcaactcaatcagcgagccggttatcttgtggacctgagtcccccagaccagattcattatgtcaggcagcgcgggagcttccggaatgtttccgttgccaccctcctcaagtgtggcttggaaatcctaaaaacccccttatccggcgtggccgcgccgccgtagggcgcggcttcagccccggccgggcgcgcgccgggcggcccggccgcccgttttggcacagaactggctcttttgccatgccggacgggtcgcatgtcgtaccatattgtcagcatccacagtccgcaatgcgtcttgagctgccgggacgggcaactgacgtgccaggcggcggacggcgagcggaaactcccgctggaggacatcgccgccatcctcatcacgagcttcgcggcgcaaatccacagcgagctgctgctggccgccgcccggcacggcgtggccctgatcctctgcgaggcgttcaagcccgccagcctggtgctgcccgccaaccgctccaccgacaccaccctctcccgggcgctggtacgcttgagccccagcgcgcgccgccagctttgggagcggacgctggacgccaaatgccgcaatcagcacgcgctggccgcccggatcgcccccgccgacccccaaacagcggcgctggcgcgggccgcccggagccgccgcccgcaccgcgaggccgccggcgccaaagccctctggcgggtgttcggccgggcgctgggggagccgcggttcacccgcgcgcgcggcggcggcgggctgaacgacctgctcaactacggctacgccgtcctgctttccaccgtgctgcaaaaactgttcgccgtggggctggaccccaccttcggcgtctcccacctgccgcgcgagcgctgcacccccctggcctacgacttgatggagccgttccgcccctgcgtggacgggcgcgtgtttcagtgggcccgcgagcacccccgccgcgcggactggaccgtcagcccggaataccggaaatgggcggcccgcctccccctcgagccggtgccttaccggggcggctccctcgccatccaaaactgcatcgaggccgtcgtgcgcagcttccgccgcgccgtcctcgcgggccgcccggcgctttaccacccgtggacacctggaaattcaagatgggatggctgatcgtcgcctttgacctccccgtcggcacccgcccgcagcgcgcgcgggccgcccgcttccgcaagttcctgctcgacgacggctttctgatgatccagctcagcgtgtacgcccgcgcctgcgtctccttcgcccggcaggaaacccacctggcccgcgtcaaaaacaacctccccccggagggcagcgtccgcgccgtctatgtcacccgcgcccaatgggaacgctccttcgtaatccagggcgcccccgccaaaacccagaaggccgaagacctgcccgaacaaatacaactgtggtaacccgctctccacgagcgggttaccaccacctagtatgccccccccggttttggaatcaaggcaaagcttgcaactgcgatggagcatctgctgggatagtatgccccccccggttttggaatcaaggcaaagctctggacgattattctgctgcgacttggaagtatgcccccccccggttttggaatcaaggcaaagcgtgaagcggcagtttttgcatcaggcgtacagtatgccccccccggttttggaatcaaggcaaagcggttgttaaataatatttccctgttaataagtatgccccccccggttttggaatcaaggcaaagc

SEQ ID NO: 2540 - DNA, 23495 bp, synthetic construct
  source 1..23495: mol_type = other DNA
  misc_feature 1..23495: note = Synthetic
caattccgccacgaatcggcgcatcccggaggtccgcaccggtcgtgagcgtgccacggcaccagcgtagcggagatatctcggccaccgagctatttgttgggctagcgtgagggcgtgcgcacggagacatcgagcgacgcgcggcacccgagccgccgcggactgacgtccccggcggagagccgccgggactgcgaacggtcgtcgcccgggccggatgaccacgacgtacggcgtggtgacgacgtcgtacggcgtatcgccgccctgcttgacgccagtggaacgctccggcgggtcctgcgggcccggatgcgcagtgcgtggccgtacgacgacctgcccgtcggtcagctggacctgcttcggttgctcgttgagtcacccggcttgtcggtcaatcaggcggccgaacggctcgctcttgcgccaaacagcgtgagcacgatggtccgaggcatgatcgccgccggtctggtcgaacgacgcagcgaccctgcggacgcccgtgccgcgcggctctatccctccgcccacgccgcagcccggctgcgccgctggcgggcacgccgcgcccaagtgctggcggcagcgcttccccgactggacggtgaccacgactggctcgatgcggccgttgcggcggttgagcggctgaccgcgatcctcgctggtgacgacgaaaccggcgtgcccgatccggcagacgcgacggccgtcgctcggcgtccggcggatcgccacggccgtcgctcggcgtccggcggcggcaaagccctgccgggcggcgcagatgagccgcggccggcatccggttcgacgtccggccgtgggaaaacacacaaaatcggtagaggtactagactcatcgaccgtgatctgccagaatgacgccatgactccgaccacgcgccgcggacttcggctgacccgacgtcgtcatgtcgatcatcttcgcgtctgcagcgccatctgtcgggaagactgagacctcggttcgctcgcggcgacggcttcgccaaaccgacgtgcacggctgtgcctaccggcacggcatgtgagccgctcgcgatgcggacagggccacggcggcgccatccgtaggcatgggcgcagcgtcgcgcgactccaatggcgtgagcctgccggcggagtgagcctgccggcggcgccggatggtctgcccgaacacccagcatttcccggtggcttggtattgccgccggacgcggtgagcctcaatccggaggctgacgtagtagccacgacgcaatcggtcgtgacacaacgggagtccacgaaagcaaacgaaattaccacggatctcaagcgacgaagggattgttgctgtgcatatcgcccctgatttatcaatcgccggcgcattagtcggttttctcatcggcctgaccggtatgggcggcggcgcgttgatgaccccgatcctcatcatgttttttggcgtcgcaccgctggcggcggtctccagtgacctggtggcgtcgctgttcatgaaacccgtcggtgcggccgtccactggcgccggggtacggttcaccatcgacttgcgctctggctgatcgtcagctcggtacccgcggcgttcggtggtgtgctgctcatccgtgcgttaggcgggtcgcacgtgcagagcacggtcaaggtgctgctgggcgtcgtcctgttgctgaccattgcgtcgatgctggtacgcaaccgattgacccggcacgtccctgttgtcgctgtctcccaggtcaaagtccgtccgctgctgaccgtcgccatcggcgtcttcggcggtcttgcggtgggaatgacgtcggttggttcgggaacgctggtcatcgctctcctgctgctcgcctatccgcagcttcgagcaggtcagctcgtcgggaccgacctggtgcaggcgataccgctggtcggggccgccgcgttgggtcacgcgctcttcggggacgtcaaaatctcggtgaccctgtcgctgttggtcggtgcaattcccggcgtttatctgggcgcgcggctctccgcgggtcgcgcggtcgggtgggtacggccgatcctcaccgtcgtcctgctcgcatcggcggtgaaactcgtcggcgcgccgacacccctgacgctcagcgtgacagggatctgggtggtcctgcagatcggtgccgcatttgccccgcggatcagccggcgcctggtgattcggcgcattctgcggcaggctgcggcggagacgccgtcccgtacccccgacgcggtgggctgaccggcggcgctgccgccgggaaggttcggatcttccggcggcgtgccgttgtcgccctcaccggcgtggtaaccggacgttcgcctggtgcggccggcgatctgtggcgtgcatcacggagcccgccggttcagtgctcttccgattgcgtcgtaggctggccgcaggcggacgtaccaggaggacggcgatggctattgccacggtaaatccagcaaccggtgaggttgtcaaaaccttcgatccgatgaccccggcggaaatcgatgcgaagctgactgctgctttgcagggctttcaaactctcgccgcgtggagtttcgagcgacgtgctgccgcaatgcgggaggccgcgcgcattctggatgaggagcgcgaggagatcgcccgcattttgaccattgagatgggcaaaaccatccgttcggcgcgggcggaagtctcgaagtgtgcgcgggcgctccgcttttatgcagaacatgccgaggaattccttgccgatgagcccgctgacgccgcggctatcggcgcgagccgggcgttcgtgcgttaccagccgatcggcccggtgctggcggtcatgccgtggaattacccgctctggcaggtgatccgattcgccgcgcccgctctgatggccggcaacagcggggtgctgaagcacgcgagcaacgtgccgcaggccgcgctcttcttggaagagctctttcggcgggccggatttcccgacggcgccttcgtcaccgttctcgtgggttccgatgcggtcgaaaaaataatcgcggatccgcggatccgcgccgtgacgctgaccggcagcgaatacgcgggccggcaggtcgccgcaatcgccggccgggaactgaagaagaccgtgctcgaattgggcggcagcgacccgttcattgtcttgccgtctgcggatatcgagcgtgccgccgaggtcgccaccaccacccggtgccagaacaacggccagtcgtgcattgccgcgaagcggttcattgtgcacgcggaggtctacgaggcgttcgccgaggcgttcgtcgcgaaaatgtccgcgctgaaagtcggcgatccgctcgacgacgcgaccgagatcggcccgctcgccaccgagcagggacgcgccgacgtggaagagctggtggaggacgcgcgggcgaagggtgcgcagattctgtgcggcggacggcgaccggaggggccgggatggtggtatccaccgacggtcgtcgccggcgtgacaccgcagatgcggatgttcgacgaggaagttttcggtccggtggcgggcctgtaccgggtcacctcggcggatgaggcgctgcgcctcgccaacgcaacgccgttcggcctcggctccaatgtgtggacacgcgatctggcggaggcggagcacttcgtcaatggactcgaggcgggcatggttttcgtcaatgggatgacgacgtcgtacccggaggtgccgttcggcggcatcaagaactccgggtacggccgggaactgtccgcccacggaatccgggaattctgcaacatcaagaccgtctggatcggctgaacactccggcagcggacggtggcggcgtcggcgtccgcgtggctagtcgaccgtgtggttgcgggtgagcctgaggtccgcatgccgatgactgaggcggggacggcgtcgcagtaaggcctgttccagctggcggaaattctgtgacgtgccgaccagaaccactccggcgacgattgcggccaggccgcaggcttcgccggcaagaggcagggtgtccagccgtacgcgctcgccgaaaacaatgacgcccatcgcgatcccggctaacggctcggccgcggcgatgacgggcagcgtggtgcgcaggcgtccggtctcgaaggcgctctgcgcgagcagcatggcgacaatgccgatggcgatgagcgtgtacggcgcccagtgcaggaaaatctttgcgattccggcatgccacgccgcggtcgcccgtcgggtgagcccgtcttggaccccgaagagcagaccggcggcggccgcgagcagcatcggccggacctcgccgccacgccgacgtgcctcgacgacgcagagttgggcgaggagaagcacgccgatagccagaacccagcggagcagtgaatcggtgtccggatcaccgccgcgtgggtcgccagcccagagaaaaactcccacacccgcgctcagcacaagggaaccagaccactcgcgaagtcccaggggctggtggtaaagcagccgggccagaatcagcgcgaacaatacgttggcgctgagcaacggttcgacgagggagacgtctgcggtcgcaagggccatggccgagagcacctgccccgcaatcatcgacagcacaccaacaatccagatcggcttgtgcagcaggtcaatgaggaggcgtatccgtaggaaatcgctggcaggcgcggaagcggcggcgtgctgctgcagggtgaatcccaggccaagaaagatggcagcggcgacgccgaggaggtaggtcatgagagcctcttcggcggacggtcaggcgagtcaaggaccggccgctggcttgcggggtgctcaggtcctcggatgacccgttcacacactcggcgcagcggcgcaccgaagatccgcgttgccagatgatcggcacgcaatgccgcccgcgccgcattggcgccgcaggcgccgtgcacacccggacccggatgggcggaggaggacgccagatacaggccgggaatgggcgtttccgggcgggcaacacccggaaggggccggaaaatcagttgttggtgcagggccgccgtgccttgcccgaatgcgccgttgtgcaagccgggatggtcggcgtccatggccgccgggccgcgcacgacgcgggtcttgatgcactcccggaatcccggcgcgtagcgctcgatgtggtcttcaatgcgccggacgaatgcctcgatctccgtctccgtccacgctccggagatcccatccggtccggcgtcaccgcgaatctgctgcggaatgtgggtgtatccccagagggattcggtgccggcgggtgaccggcttggatccaccgtcgacagctggccgaggacgacgaacggccgggccggaaccaatcccatcgccaggtcggcggcatatcgggtcaggtcgtccatcgacgcgccgatgtgcacggtcccggcgcgtcggacaaggtcgttggtccacggtatcggctcgtgcagcgcccagtcgatttttaccgtcccgaaatcccactgaaaattccgcaggtcgcggcgcacattctccggcacatgctcgggtggtatcaattcgccgtacaaggatggggctgggacggcggccagcacagcccggcgggcggcaatctcgtccccgtcggcgagacggaccccaacggcccgcccgctccggatgaggattccggtcacgcgccggccgcagagcaattcgccgtcccggtcgcgcaaccgggcgagcagcgcatcagtgacgcgctgcgctcccccttggggaacgggaaatccgacgtcaccggcgagcatggcgagcagccagccgtacaagccgctcatcgtggattccggtgcgaagtctgcgtgcagagcgttgccggcgaaaagaaggccggtgggttcgcggacccattcctcggcaaaccgccgcaccggaagaagcgccatccgggcgaaccgcccaagaccgctgcggtacagcgcccgggcgagtcgtactccggcgcgcaccggcgggaacggcgtacagagcgcgtccatcaacgcaggcgcggcgcgtttccagagcgcggcgagctccatccagccggctccggatccgggggcgacatcatccagcaatgcagcggtttccgtgacgtcccgggagacggcgagcgcccggccgtccggaagcggatgcgcaaacgcgaaatcagcgtggcgccatctcacgccgtaccgttcgagctgcatggcctgcatcgccggtgaggcgatcgcgagcggatagaaggcgctgcaggcgtcagagatgaagtccggatcgacgtaacggccggagcgcaccccgccgccgggttgctgcgctgcttcgacgaccagcaccgaccatccggcgtccgcgagcagatttgcggcgaccaggccgttcggcccgctccctatgacgatcgcgtcggtttccacgaccagagcccggtgaactcggcgagatctgtgagctgaaagtccagccacttcgtcacgttgttggcccgcacaatttccgccgccgcttccaggcgttcccggcgttcctcctccggcatcatgagcgcaatgtacagcgcatccgcctgctgttggatgtcgaaggggtagagcgtgacggcgaaggcacctaattcttcgtacgcgccggtgttctccgagagagcgagcacggcgttgcgccgggagacgcagacggcttccttcgcgacgaggttcatcccatcggcgattgaattgaccatgacgacgtcgcagatgctgtacgccgccaccgcggtgaggaagtcctcatgcagacggaggtcgatcggcgcttcaccgccgcgggtgtacttcgcgttgatgcgcgcgacgacagagccgatgcggccaatgtattcgacgtactcggggacatcgagacggcttggctgcaggaaggcgaggaagcgcactttcccgaccagttcaggatggtcgtcaaggagccgttcgaacgcaaggaagccgcgaacgatgttctttgacggatccgttcggtccactcggacgatgagcttgcctccttctgcggcgagccaggtctccaggtcgtccaggcgggtgcggacagccttgctcctcgcgacttcctcgagggcgtcgacgtcaatggaaatcggatacgtctttgcagcgatggtccgcggcccgtactgtacggtcattttgtcgagattgatgggaaggccgaggagttcctgcgcgcagagcaggaaattgcgggcgaaccgctcggtgtggaacgcgacaatgtcgttgccgagcagcccggcgaaaatctggtcgcgcatgtgcggcgggaggacccgccacgcgtccggtccgggccagggaatgtggacgaaatgcgagagtacgacgtcggggcagcgttcccggaccatggcggcgacgaggtagaagtggtagtcgtggagcatgacgagggcgcggccgcctcggctctccacttcttccgcgatggtgtcggcgaaggcgcggttgaccgcgacgtagccgtgttcgaatgcctcgtgttcaacctcgtcgatgttcggtgcgcgggtcaagtcgtagagcccgtgctgaacgaaccagagcatggggttggagatgaccgagtagaagtcctcccgggctgcgggatcaatttccaccatgcggatcgcggcgactggttcgtcatgggcgtccgggtcggcgatgcgcggcaatggcccgacggcgatgggaatcgccttgccgcggtgttccgcgacgaccgcagcgtcctcctcggtgctcgccgcgcagacccatacggcgtccgggatctcgcggacgagaccgagcagcgcggtgacgagcccaccggccccgcggcgggcgatccggcggccgccttcgcggcggaactggacgggggcccggtgcgaagcgacgatcacgggaacaccaagctgccaccgtccgcccgctcgttccgccacgcctgactccctcctgtgctgcggtgcgcgccgtcgccttctgcccgtaggttatgcccatgacggttgcgtccacccctgagccggcggccgactttgaacgtttcgcctcggaggcggtcgaccagctgcttgcgtaccagccctcactcgccaccgcaatcggcgatcaccggtttgatgaccggctcgaggacctgcggcccgcagcggtcaacgacgagatccgggcgctgcgcgccgtcctcacccgtctggagcggtacccgctcgaccgactgcccgtcggccaccgcgtcgacgcggagatcctccgcaacaaggttgcggaacggcttttcgagttggagacgctacgggaacacgagtggaatccgctgcaggccaaccccggcacggcgctgtatctgctccttgcccgggatttcgctccactcgatgaccggcttcgcgccttggccggccggctcgccgcggttccggaacagctggcggcggcgcgcgcgtcgtcccgtgacatgccgcgcgtgcacgtggagacggccatcgaccagttcagcggaacgctgcggctgttggaggacgaaattcccgcgcacgcacagggaagtccgtacgccggcctggttgccgagcggttggcgccggcggtcgaagcggtccgcacccacctggcgtggctgtgtgagcagctcgaccaagcggacggcgatccacggctcggaccggagctgtacacggcgaaactcgcgctggtgttggatgtcgcgcggcgcccggaagacgtcgccgccgctgcgtgggcggaggttcagcgggttgagcaggcaatggtggagacagcgggccggctcggcggttcaccacaagagattttcgcccgattggccgagcaggctcccaatgacgagacggtcatcaccgaagcacgctccgcgttggctgaggcgacggagttcgtccaaggacgcgagttggtcacatactacgccgatccgctcgacatcatcgtcatgccggagattcaccgcggggtcgccgtggcgtattgcgaaccgccgggaccgctggatccaccggatacgcctacttttttcgcgatttccccggctcctgcttcgtggccctcggaacgggttgcgtcgttttaccgggagtacaacgtgcatgcgctgcgcaatctcgtcgtgcatgaagccatgcccggccacatgctccaattagcgcacgcccggcggtcggaaactccgaccttggtacgccgggcgttctggagcgggccgtttgtcgaagggtgggcggtgtacgccgaagaggtgatggcgcggtacgggttcggcggccttgccgtggcgatgcaacagctgaaaatgcggttgcggacggcgttgaacgcggtgcttgacgtaggggtgcattgcgaggggctgacggaggaggaagcgctgcggttgctgcgcgaccgcgggtaccaagaggagggggaggcggtcggcaagtggcgacgcgcactgctcacgagcgcgcagttgtcgacctaccacgtcggagttctcgaggtgagcgaggtggcggcgcagcttcgcgccgcccacccggagtggagcgaccgtcgtctgcacgacacgctgctgagttttgggaatccgccgccccggcacttgccccggctgctcggcctggcgtgagctggctcggcgtcggtgtcgccggtgcgttcggcgatcccgcgggcgtgcgtgagagtgattcgctgggcgttagtgtcacggtccctgaggctgcggacgagacgccgcggacgagtctctgacgctgcgggcgggtggcatccgtgatcataaacgaaccccctcgctgctgcgagggggtgaagaatgcgaccccacgaaggggtcttgctaggtagcctgtctcgctgcgagtatacatcgcgccgctctgatcgcaaggtattgcgtctcaaaaaatccgtgcattatgtcggtccatgtcgctatcgtgagcttgcaactgatcatcaaaggcgttgagtacggacgaggagctgatccgaccatgggtggttctgaggtggggacggtgcctgtcacctggcggctgggcgtcgacgtaggcgagcggtcaatcggcctcgcggcggtttcctatgaggaagacaagccgaaagagatcttggccgcagtgtcgtggatacatgacggcggcgtcggggatgaaagatcgggagcgagtcggctggctctgagaggcatggcgcgccgtgctcgccggctgcgacgctttcgtcgcgcacgcctacgtgatctcgacatgcttctttcggagctcggctggacgccgttgccggacaagaacgtgtcgccagtcgacgcttggcttgctcgtaagcggctcgccgaggaatacgtcgtcgatgagaccgagcggcgccgcctgcttggatacgcggtgagccacatggcacgtcaccggggatggcggaacccgtggacgaccattaaagacctcaaaaatctaccgcagcctagcgactcgtgggagcgcactcgggagagtctggaagcccggtactccgtgtcgctcgagccggggacggttggtcagtgggccggctacctgcttcagcgcgcaccggggattcggctgaatccaacgcaacagtccgccggacgccgcgccgagttaagtaacgcaactgcctttgaaacgcgtcttcgccaggaggatgtgctctgggaattgcggtgcattgccgatgtgcaggggctgccggaggatgtcgtgtcaaacgtcatcgacgcggtgttctgtcagaagcggccaagtgtcccggcagagcgcatcggccgcgatccccttgaccccagtcagcttcgcgcgtcacgcgcgtgtctggagtttcaggagtatcgcatcgttgcggcggtggctaacctgcggatacgtgatggctctggttcacggccgctttcccttgaagagcgcaacgcggtgatcgaagcgttgcttgctcaaaccgagcgtagcctcacgtggtcagatattgcgctggagattcttaagttgccgaatgaaagcgacctgacgagcgtgccggaagaagacgggccgtcgtcgctcgcatattcacagttcgctccgttcgacgagacgtcggcccgtattgctgagtttatcgctaaaaaccggcgtaagattccaaccttcgctcaatggtggcaggagcaggatcgcacgtcgcgttcagatcttgtggccgccttggccgacaactctattgccggcgaggaagagcaagagctccttgtgcacctaccggacgcggagctcgaggcgcttgagggcctggctctaccaagcggccgcgtcgcgtatagtcggctgaccttgtctggtttgacacgggttatgcgggatgacggtgttgacgtgcataatgctcgaaaaacgtgtttcggggttgacgacaactggcgcccgccgctaccggcgttgcacgaagcgactggacatccggtggtggaccgcaatctcgcgattctgaggaagtttctttcgtcagccacgatgcgctggggtccaccccagagtatcgtcgttgagttggcacggggagccagcgagtcaagggaacgacaggcggaagaagaagcggcccgtcgtgcccatcggaaagcaaacgatcgaatccgcgctgaacttcgcgcctccggccttagtgatccgtctccagctgatttggtccgtgcgcggctgctcgaactctacgactgccattgcatgtactgcggcgcgcccattagctgggagaattcggagcttgaccacattgtcccgcgtacggacggcggctcgaacagacatgagaatctcgcgattacctgcggagcgtgcaacaaggaaaaaggtcgacgtccctttgcgtcgtgggctgagacaagtaatagagtacagcttcgcgacgtgatcgatcgtgtccaaaagctgaaatactcaggcaacatgtactggactcgcgacgagttctctcggtacaagaagtctgtcgtcgcccgcctcaaaaggcgcacctccgatcccgaagtgattcaaagcattgaatccaccggctacgcagctgtcgcgctaagggaccgcctgctcagttacggcgaaaagaacggagtagctcaggtagcggttttccgcggtggcgtgaccgccgaagcgagacgctggctcgatatctcgatcgagaggctcttctcccgtgttgcaatttttgctcagtcaacgagcacgaagcggctcgatcgtcggcaccatgccgtggacgcggttgtgctcacaacgctgactccgggcgtcgcgaagaccttggccgacgcgcggagtcgtcgcgtctcagcggagttctggcgtcggcctagcgatgtgaaccggcattcaacagaggagcctcagtcgccagcttatcgtcaatggaaggagtcctgctcgggtctaggcgacttactcattagtaccgccgcccgtgacagtatcgccgtggccgcaccgttgcgactgaggccgaccggcgcgctgcatgaggaaacacttcgcgccttctcggagcacacggtgggagctgcgtggaaaggagcagagctacgacgcatcgtcgagcctgaggtttatgccgccttcctcgcccttaccgatcctggtggtcgattcctcaaggtgagccctagtgaagacgtgctacccgctgacgagaaccggcatatcgtcctttctgatagggtcttgggtcctcgcgatcgggtaaagctgttcccggatgatcgaggctcgatacgggtgcgcggcggtgcggcgtacattgcatcttttcaccacgcccgcgtcttccgctggggcagcagtcattccccgtcctttgctctgctgcgtgtttcacttgcggacttggctgttgctggccttcttcgtgacggcgtggacgtctttactgctgagttgccgccgtggacgccggcatggcgctatgccagcatcgcgttagtgaaggcggtggagtctggcgatgcgaaacaggttggctggcttgtccccggagacgagttggatttcggcccggaaggtgtgacaacggcagccggggatttaagtatgttcctgaagtacttcccggagcggcattgggtcgtcacaggctttgaggatgataaaaggatcaatcttaagccggcgtttctctccgcggaacaagctgaggttctccgcacggagagaagcgatcgtcccgacaccttgactgaagccggggagattctcgcacaattcttcccgcggtgttggcgggcgaccgtcgcaaaggtcttgtgccaccctggccttacggtgatccgacgaactgcgcttggtcaacctcggtggcgccggggtcatctcccgtactcgtggcggccttggagcgcagatccctggagcggcggtacaccatgacaggaccgtggcgtgtcgtggatctgtccgaactgtccggtgaggtgcatgcggctcaaggggcacttcttgtcggtgacgagcgggtgccgctggttgacgtcgcgatgatgcttacggggccgtacgtctccctgcacggcagcgttattgaccgcgctgcggcgttcggggtaggcgtggtgcactgcgactggcggggtgttccggtagccgctacattgccgtggtcgactcacaaccgggtggcggctcgtcatcgcgcgcaggcggagctttcgttgcctaggcaaaagaacgcatggatgaatatcgtgaagacaaagatccgcaatcaggccgctgtgctacgggcgcttcgccgagacggtgtggcgcaactggagcgactcgcggcgcaggttcgatcaggtgatgcaagcaatgctgaaggggctgccgcgcgcgtgtattgggctcgcttgtttcaggacaagcactttcgtcgcgttccgcgagcacgtgacgttgtcaacggcctcctagactacggctatgcgatcttacgtggttgttgccttcgcgcggtggtcggtgcgggactcgcgccgtccctcggcctttggcaccggcgccacgataatccgtttacgctggttgacgatcttatcgaaccattccgacctgcggtggacaagacggtcatagagatcgtcactgcgggcgcatcgggtcttgaccgtcccactaagcgccttcttgtagcggtgcttgatcaccaatttgatgcgagcggagcgaccgtgggaacagccgtggagcggtttgcccagcaggtcggtcggtacgtcgagggcgagatacgaagtctgagaccacccgccatggagctgtcgcatgcttaaggacgaaccggtgtgggccatcgcagctttcgatctacctacccagaccagggagcagcggcgggacgcgaaccgctaccgacatcatctcctggaacttggcttcagccgagttcagctcagtgtctacgcgaagtacatgatcaatggggcagggttccgatgggtgggatccgcagccggagcggtcgtcccgccggggggcgtcttgcgggtgatccccgtctcagatcacgaatgggcccgcgcactctgctacgttggcgaaaggctcgttccgccggaagatccaccgcagcaactagcgatttttccatgatcaacaaggctgagatcccaggtcaacccagggatctcagccgtcctccattttagccgggggattgagacaggctccccagctccgctggtcgcgggttcaagtcccgctccattttagccgggggattgagacaggctccccagccgcaccggggaatatcgcacgccatcaaccattttagccgggggattgagacaggctccccagctctcgcaccgggcgttttcgctcggtcggccattttagccgggggattgagacaggctccccagcaggtcggccaccactgaattgacatggaccattttagccggggatgagacaggctccccagcctccgccgcgcgctacggtggccgggtggccattttagccgggggattgagacaggctccccagccgcgcgttctggtgcggggtgtgggatcccattttagccggggattgagacagggctccccagcagacacagctgctaccggtgctcgagcaccattttagccgggggattgagacaggctccccagcaattcgaccagctcaggcggcgcgggcgccattttagccgggggattgagacaggctccccagcgcggcaccggcacgcactcaaggatctccattttagccggggattgagacaggctccccagcctgcaggcgtacgaagtccggaatagcggtgcggaccattttagccgggggattgagacaggctccccagcaaaacccgccggtccgcaccaagccgatccattttagccgggggattgagacaggctccccagccgtggggtgcgcagccgtgggatgattgccattttagccgggggattgagacaggctccccagctatcatatcggcgatcttccgttggtcgccattttagccgggggattgagacaggctccccagcgtcgtgaccacgagcactcggccagatccattttagccgggggattgagacaggctccccagcgtacggtaatcgtgccgcggctgacgcgccattttagccgggggattgagacaggctccccagcgggtgaggccggcagcccgccgtgctttccattttagccgggggattgagacaggctccccagcttcccgcgagcagagcccgtcaagcctgccattttagccgggggattgagacaggctccccagcatgcgcgatagctgtttccgcggtacgcccattttagccgggggattgagacaggctttaaacaaagagctgtcttcttcgcgcaaaacgaccaggaaataccgcttgggagccagtggaagaggccgataacgattcggccggctcgtaacggcataggctgcgtaatatccaaatctctcgccttgacggaacgtgtggcgggtcatctcaatgtcggacccgcggcatctcaaccagccggttgagtctgtgtcagtcgttgcggcgatggcaggtcaagcgccaccgatccgccgccccggcacttgccccggctgctcggcctgagtgatccggtcggcctggagtgatccggctcggcgtcggtgtcgccggtgcgttcggcgatcccgcgggcgtgcgtgagagtgattcgctgggcgttagtgtcacggtccctgaggctgcggacgagacgccgcggacgagtcgctgacgctgcgggcgggatcaatcagcacggccatatgcgagatcgggaatgcaagggccgccggcgccgttcccggcagtgagtctcgtcgtggaggacaccatgcccgctgtcaccgttgacaacattcttgcgctgccccggcttcgccacgtcgatccggcggtcgagcgcgaccgtccggtggtttcgatcacaacagcgccgtccgggcttgagggcgaaggcttcccggtccgtcgggcgtttgcgggcgtgagcctcgccgcgcttgatcccttcgtccacatggaccagatgggcgaagtcgaatacgcgccgggtgaaccgaaaggtacgccgtggcacccgcaccgcggattcgagaccgtcacatacatgattgacggcatttttgagcaccacgattccaacggcggcggcggacttatcacgaacggtgatacgcaatggatgacagccggtcgcgggatcctgcatatcgaacggccgccggaatacctggtcgcgagcggcggcctgttccacggttttcagctctgggtcaatctgccgcgccggttgaaattcgctccaccgcgctaccaagacatccgggccagtgcggtgtcgctcgtcgcgtcgccggacggcggtgcgctccttcgtatcatcgcgggcgaggttgacggatttcgaggcccgggaatcacccacacaccgatcgccttgctccacgtgacgcttgccgcaggcgcgtcggtgacaattccgtggccgcggcatttcaacgccctcgtgtacgccctcggcggtttcggcgccgtcggcgcgggccggcatccgttgcgctacggtcaattggccgtcttcggcgctggggacgccattacggtatcggccagcaaacagcaagagagccgcagtccgaactttgacgtccttgtcctcggcggcgaaccgattcgcgagccggtggcaatgtacggaccgttcgtcatgaacacgaaagccgaagtgctgcaagcattcgaggattaccagaaggggatcctcggcacgattccggctgagcatgccgtggttccgcacggatcggttcgcggtcaagcgagcgcggacgaaatgaccgcgggcggaaccgatcagcccgccgcggggtgacgatcgccgcgacgaggtccgacagcgcccagggaccggcgtccgaaacacttccggcggcgcgctgacccgcgccaggaacgcttccggcgtgaccggcgtccgaatggccgcgccggagcagggacttcgcgcaagtctctccgtgcatccactgtccgcaggtcatgctgcgccgccgcgcgcgggcgggtaggttttacctgcggtcacggcacatccgcgatcgtcttcccgggtcgtctaagggcaggacagtgggttttggtcccattaatgggggttcgaatcctcccccgggagcaggcagcggcgcgggcggcgacatcccggcacagtgtcaccgaccaggacccggcggctgagtggtcagacgcgggcgcagggtcggtcgtgtgcccgactcgaccgtgcgccagggccggtcgtgttcccgaccgcgggcgcccgggccgggcggtaccggggtcgcagccgtgcggcaacgccggcggccctgcgataccgccgctgcgcaagccgccgggccgaaggccaggaaacgctaatcaggcgggaggagtgaggcgcggatgagcgaaacctcccgcccggccgcggcgatcgtgctggccgccggtgaaggcacccggatgcgctcgactcggcccaaggcgctcttcccgatccttggccgcagccttctcggccacgtgctcgccgccgtccgagccctcgatccggaggaactcgtcgtcgtcaccggtcaccggcgcgcggaggtcgaagcccacctcgccgagatcgaccctgccgcgaagccggtctaccagaccgagcagcgcggcaccggtcacgccgtccgggcggcccttgaggcgctcgacgctgaacggcgcgccgccggccgtcccaccctcaccggcacggtcctcgtcaccgcggccgacaccccgctgctcaccccccgctccctcgccgcgatggttgcgcatcgggagcagaccggggtcgccggcgtgctccttaccgcgacaatgcccgatcccaccggctacggcagagtcctgcgcgacgactccggccgggtccggggcatcgtcgaagaaagggacgccgatccggcgcaccgggagatacgtgaagtcaacgctggcgtctacgcctttgacgcagcaaaagtacgggccgcgctggcccgcctcaccaccgacaacgcgcaaggcgaggagtacctcacggacgtcgttcggatctttggcaccgagggcgagccgattgccgccgccgtcctcgatgactggcgcgaaatcctcggcgtcaacgatcgagcacaacttgctgtcgccgccgcactccttcgcgatcggaaaaacaccgcgttgatgcgtgccggggtgaccatcatggacccggcgaccacctggatcgacgtcgacgtcgatgtcgcgccggacgccgaaatctggccgaatacgatcctggccgggacgacgcgggttgcggcgtccgctcggatcggccccaactgccatctgatcgacaccgaggtcggggaacgggcccgagttcgggacgccacctgcgaaaacgcgcagatcggtccggacgccgaggtcgggccgtacacctatttgcgcccaggcacgcgactggggcgcggcgcgaaagccggcggattcgtggagatgaagaacgctgtcgtcggcgcggaatcgaaggtgccgcatttgtcgtacgtgggcgacgcgacgatcggtgagcggaccaacgtaggcgcggcgacggtttttgtgaattacgacggggtcgccaagcatcattccgtcgtcgggaacgacgtccgaatcggcagcgacacgatgatcgtcgctccggtgacgatcggcgacggggcgtacaccgccgcgggttccgtgatcgtcgaggatgtgccgccgggtgcgctcgcgatcgcccgctcccggcaacagaacatcgaaggatgggtggtccggaagcggccgggtacccgcgcggcggaggcagcgaagcaggcttcggcagcgggcggaccgccggcggcgggcggtacgtccggccgggacgcaggcgacgatgcatcgcgctagccctgcgtgacaatgaacgggtacaggctctcgacgtagacaggacaggcgaggcggcgtgaccggtatcaggcggcagggtcagaagacgctcatgctcttctcggggcgcgcccaccccgagcttgctgccgaagtggccgcgtgcctgggcatcgagccgacgccgacgtccgcctatgaattcgccaacggcgaaatcttcgtccgcttcgacgagtccgtgcgcggcagtgacgcgttcgtgatccaaagccactgcgcccccatcaacaagtggatcatggagcagctgattatggtcgatgcgctcaaacgcgcgtcggccaagcgcatcacggtcgtcgtcccgttctacggatacgcgcgtcaagacaagaaacaccgcggtcgcgagccgatctcagcccggttgatggcggatctcttcaaagccgccggagccgaccggttgatggccgtcgacctccacaccgcgcagatccaaggcttctttgacgggcctgtcgaccatctcttcgcactgccgatcctcgccgattacatcgagagcaagctggacacctcgcgtatcacggtggtcgcaccggacgccgggcgggtgcgggtcgcggaacggtggaccgatcggctgaactgtcccctcgccatcattcacaagcggcgcgatccgctggtcgccaacgaggtgaaaattcacgaggtggtcggcgcggtcgaggggcgcatctgcgtcatcgtcgatgacatgatcgacacagccggaacaatcaccaaagcggctgacgcattgatggagaacggtgccgccgacgtggtggcaaccgcaacccacgcagtgctctccggtcccgccgtcgatcggttgaagaattcaccgatcagcgaagtggtggtgaccaatacgctgccggtgccctcggagcggcgcatcgacaaactcacggtgctgaccatcgcgccgatgctggcccgagcgatccaggaagtcttcgaggacggctcggtgaccagcctcttcaatggcgcaagctgatctgggccaccgcggtcggtgcatgcggttggatcagcgttcggcaggggaccgctcacgcgggccggtcagcgacggctgcgggacggtcggcgtctgggtgggtagcgtgatcacgttcgcagcccgcggggccgtgacacggtgtgccgggcgtccggctaaactggcggaccgctgccccttgcaggtgcaggcggtgtgatccgctcattgagattccgacgagccgcgaggagtgttacgccgtgtccgaggtacgcatcaaggccgagccgcggaccgagttcggcaagggtgccgcgcgtcgggtgcgccgtgccggcaaagttcccgccgtgctgtacggtcacggcaccccgccccggcacatcagcctccccgggcatgagttgatgcttgcgctgaagacgcccaacgttctgctccggctcgaggggctggagggtccggacgacggtgagctcgcgctgcccaaggccgtgcagcgcaacgtcgtgaccggatttctcgagcacgtcgatttgctgctggtacgccgcggggagcaggtcgaggtcgatgtgccgctgcgattcgtggggacgcatgctcccggcggggttctcgaggagcatctggtggctctcccggtgcgcgccgacgccacccgcatcccggaggaaatcgaagtttcccttgacgggctggagatcggcggttcgatctacgtgcgtgacgtgcgtctgccggacggggtgaccgccgcggcggagccggatgaggtcgtcgtccacctgttgccggcgctgacggcgtccgaactggccgaggcggttgagggcgcgaccgaaaccggtgccggcgcggccgccggctgaccgtagcgatgtgacatgccggacgagccgtggctcgttgtcgggttgggcaacccgggaccggcctacgccaagaatcggcacaatgtcggattcatggtcgtcgacctgctcgccgagcgggccggaatgcggttcacggtgcatcgcacccgcacccagctggccaatggccgactggccggtcagccggcgatgctcgccaagccgctttcgtacatgaaccaatccggcggcccggtcgccggcctgctgcactacttccgcattccacgggagcggctgatcgtcgtccacgatgagctcgacctgcccttcggcgtgttgcgggtcaaacgcggcggaggggacgccggtcacaacggtctccggtcgatcaccgctgcgctgcgcggcgccgattacctgcgcgtccggttcgggatcggccgcccaccgccgcacctggatcccgcggagtacgttctgcgggatttctccgcggcggaacgcgccgagctcggcgtacatctcgaagaggcggcagacgtcgtcgaaagcctgctcagcgtcggattagcggcgacgcagaacgccgtgcacgggcggggtcgtcagcggccgtaatgcgtcaccgtggtgagggagaccccgaaccggtcagcgggaacccgaatcggtgacggagacctcgaaccccggcgcgtcgatggtcaaccggacggtgatatcggcctccggctccgctagaccgccggtgcgtccgcgtggcaggccgacagcgatggcgccgaggaaatcgcggggaacggcggtgtcaccggccggctcgcaggccgccggggtgtgccggacgtcgaggtcgagcaaacgccaggcccagccctgtgccggcgctggtaattgccgaaggtccgggatatcgccaagaccgagatgcacgtggcgcatcggcgtcgtcaggccggtgccgagggctttgaggaacgcctcctttctcgtccaggcacggagaaaagcgttgcgcttctcgtcgtcccgtaatgtgtcgaattccgtccgttcatcggtggtaagacagcggcgggccatgcgcgccacggcatcgtctgtccacggttttactcggccgcgccattccaggtcgatcccgagggcgagcctgcctgtcgttgcgataattgcgccgacgtgcgcggtgtgtgtcacgctgaactcgacacggcgtctggcgacggcgcgcggcctgccatgcgcgtcgttttctatcacgatgcccccaggttccgtacggaggaggctgctgagaacctgtcggagtgtcgcgcgggtgacgacggcattctcgcggccgtgatgctgcgagaaccgcgctcgttcggattcggagaacatggtgaggaggcgtggaatttctgcctcgcggccaagggccgagaagatcgtgagaagaataggctccggatcgtcccgggcccggctcatgacagtttcgcgattcatcggtgcgtgcacgacttagtatgacctctgatcggaaaggacggcatggcggagcccgcagcaaccattgtcatggcggcgcacaacgaagcggcggtcatcgagcggaccttgcgtgctttcctgccgcagagtgcgccgggcgaattccaggttctcgtggtgtgcaatggttgctcggacggcaccgccgaggcggcgcgctcaaccggagagcagaccggcaggccggtcgaggttcgggaaattccggtggcgtccaagatagccgccctgcggaaagcggaggacgagccgctggttgagcgtgcggatgtgcgcatttatctggacgccgatgtgctcgtcgacgtgacaacgctccggaacgtgcgggatgctgtggcgggtgacatgccgcggctcggcgtcgtgtgcggcgaggtcgatgcagccggctcgtcccggctggtgcgcgcgtattacgccgtctggtcggcacggcagcatgccgcccctgatgggtcgggtgcgggaattttcgcggtgaaccgcgc

SEQ ID NO: 2541 - DNA, 15511 bp, synthetic construct
  source 1..15511: mol_type = other DNA
  misc_feature 1..15511: note = Synthetic
gccaccggcaccggccatattggaaacctgaataggtttgtccaccgccccgatgtcatacatgattttgctgatttgacgacaagtgaaatcccaaccgccgccgggattcgctggagcgatgcattcggcggcaatagcgctaccaggtaagctcaccgccagtaaagtggctgcgcaaagtgaatttgtgattagttttttcatttcttcctccaaagaaacagcggtcgagtcaatatcgctcgaattgtcattgttgactaacgttatattattgtcaacaaagtaagtaattcacatcattttctatggatatatcaattaaatatcactagtattgtgggcaatatgatcgattcatcaactcaagatagctcggagagattggccgcagaaatttgcgaggaaattgttgacgggaaattgaacccgggccagaagctcaatgaggtagagcttgccacccgattgaacgttggtcgtggaccagttcgtgaggccctgaaacgacttgctgaaagaaaacttgtcgtctattcacccaatgccggtgcgcgtgtcgttgagcacagcctgaagcacatcgttcacttgtttgaggtgcgcgaacacctggaaggggcggctgcacgtctggcagcgataaaaatcacaccggatcaaaaatcagagctgcacacgctgttcgaattacatgcgcacgatgttcgtaaagatcctgatggcgcatatatccggcttgcgcaggatctcaattttcactatgtgatcgtaaaggcgtctaacaatccgatcttgttcagcattctttgcgaagacctgtatccgcacatgaggatgtttcacaagcagcataaacacatttccggtcgagggaatagagctctggaggaacatcgcagaattctcaatgctattgatgatggggacgctgagctggctgagttactgatgagaaggcatattgtcgcagcgggagagagccttaagagcatggcaggattgcatgcttgaattgtagtggtcgcgcgcgaaaacggattgttgcagctgtttggtaacacaaaaaaaagccgcccccaagaattgggagcggcccgtacataacaaccgtttttcgcagtttgttggatcaagcagccatcagatgcgtcttgatctttttcattgcggccttttcgatctgacgaattctctctgcagatacgccgtattcgtcggcaagctcatgcaaagtagacttgtcttcctctaaccagcgacgttgcaggatagtccggctgcgatcgtcaaggatatccatgcctgcagccaatccatcgtgcgagttgctgcgaccgtcttcacgctccagaatcatggaggggtcgtcctgttcctgatacaaggtatctgatggtgccaggcttgtacgatcttcgctggaacccaagggtgcatcgaaagcactgtcgtgcccatgcattcttgactccatctcaaccacaactttcttgtcaacacccaagtcttctgctactgccgcaacctcatcctggctaaaccagttgagctgcttcttggcgcttcttagcttgaagaacagtttgcgctgagactttgtcgttgcgaccttaacgatgcgccagtttttaatgacgaactcgtgaatttccgcgcgaatccagtggacagcgaatgaaatcaatcgtacaccgacgtcagggtcaaatcgcttgaccgctttcatcaggccgatattgccttcctggatcaggtctgccattggcaagccatagcctttgtaagtcttggcgatatgcaccacgaagcgaagctgcgacattaccagttggcgggctgcatccagatcctcgttatttcgaagtttgcgcgcaagactttgctcttcctctacagacagcaagtcgatgctcgcgatttttgacatatagctgttcaggtcatcagcgataaccgggattgccatagcgttactattcattgtcaaggcgttactcatatattttctccaacagaagtcggcatatctgtattttagcactcacatggtgagagtgctaactagcggcaaagttcccgccaacattactgacgaatatactggtttttttaaattttgatatctaataaccgttacgaaaacaaggacttgtcggattttaggtatctttacccattgtatgttaacagtcgtgaaggatggttaagagtgctgacggccccaatcaggcccagaattatggacactcctaataccagcaggatttgcgagggttcaggcatcgtcagggtgaatgtactctgatatagcgaagacagttcatcggcgggggtgctgatcgcgtttagtgtaatcagcgctataatgcatgataaaagcccccctagaaatccataaagtgcgccggtatacaaaatcggacgattcataaagtgagtggatgcgccaagcaagctggcaacctccatttctgctcgccttcttgataattccagtctaatggtgtttgcaatgaccagtagcgcagtaagcgtcagaaacgcagccaatagtccaccgatccatttaaccagagacaccactgcctccagccgcctgacccagcgtagatcgagttgaacacgagcaacctcaggtaaatctccaaaggatcgggccatggattcgatatcgccagcgtttatattattggtctgcggatacaagacaattgcgcccggaagaggattaacgccgagaacatcaatggccgcgcgaatgtcgtcatcttcgctgagcatggctaatgcttgctcgcgggagatgtattctgcgcgctctatgccgggttgtgcacgccaggttttagcaagctgggcaccgtccagatcgctgattgccgtatcaagataggccgtcagactctcgccctgcagactgcgttggctcagtgtattgagcgttgcgctggcaaaatacaagatgaatggcagggatagggttattcccagcactagtagcgtgccaaggcttgcaagcttgaatcgcttcagttgccgcaggctctgtgcaagggcataaccccggcggctgtaagtccaacgtggaccatgtacctcaggaatgttctggtttccgactttttgtttttcactaaccacttgcgtgcaccttgcgtgtattcgcattcgccgccctgcctttaaaagcgggagcgcgttcaataacgcttcgaccagcaacatccagctcacctttagccagtttcaaacgcggataggcaaatgcactcaagagtgtctcgtcgtgtgtggcaaacagcacggtgacgcccgaggcgttgaaatgcataagcagttgcatgatttctgcgctgatctcgctatcaagattgccggtgggctcatcagccaataacagtttaggtctggcgacaacggctcgcgctatgccaacccgctgttgttctccaccggataacgtgatgggttgttcgcgcgctttgtcgctaaggcccactttcgaaagtgccgcatttacgcgtactttgatgtcatcaaagcggtaacccccgatgatcagcggaaaggctacgttatcgaacactgatcgatcgtgcagcaactgattgtcttgaaagacaatacccatttgttgtcttaacgccgcttcctgtcgctttccaagccgactgtaaacaatattgccaacctggatatcaccgttagtgggtattgctaaacgtgcggtaagtctcaataaagagctcttgccagcaccggaatgaccggtaagaaaagtaaatgagcctgagtcgagtttgaacgagacatctttaagagcgtaacgtccgggtcgatactcaaggctgacgtgttcaaaggcaatcactaggcgatattagtagcggcgatccgaaataggaacatccacgcaatagtatagaagcttactggcaactatgccttaacttgattgcgctccggagagcaaggcgttcacatagcgttgggcttcaaacacttcaagatcttccactttctcgcccacaccgataaagcgaattggcagcccgagtttctcggcaatagcaaagataacgccacctttcgccgtaccgtccagcttggttacgacaagtccggtaagtttcatcgcttcatggaactgtatggcctgattgagggcgttctgcccggtacccccgtcaatgacgagcagtgtttcctgaggagcgcttgtgtccactttgccaatcacccgcttgaccttgcgcagctcttccatgagattcgactgtgtgtgaagtctgcctgcggtgtctgcaataatgacatcgacgccgcgagaggttgccgattgcaccgcatcaaaaatgactgaggctgaatctgcaccgctaccttgcgagactacgggtacgccattgcgttcaccccaggtttgcagctgctctaccgccgccgcccgaaaggtatcaccggctgccagcatgacgctcttaccgccttcttgcagctgcttggccaatttgccgatagtggtagttttgccggacccattgaccccgacaacgaggatgacgaatggagtatcggcatccggaatttccagtgcttgctcaaccgggatcagtaaattggctagctcgacctccagtgccatcctgagtgcatccgaatcattcacttcagagcggccaacctggcggttcagtgcattcataacccgtgctgtggcatcaatgccaacatcggccatgatgagctggctttccagttcctccatgagctcggcgtcaatcggcttgttgcccaacatgaaatcaagcaggttgtcgcggaaacgcgagcgcgtgcgggcaagcttcttatccagcgttggggttttttccgaagcattggagctttgatctttctgccgatttagaaaactgaaaatacccatgaattgttgtgtacagacctgtaatttttaaaaagcggtggatttgacgttgtgtttttgtggagtgtcttgaacaagtacggaacacaacagtgtaccgcctcgttatgatgcagggacttctagcaaagactcgatatcgtaacatcgtggcaggctctttcaggcatccgcaaaaaggaccaggctcatcagcatcgcgaggtggtggagccgctcgcgggcaggtgcggatcattgctggccgctggcgtggccgaaaactgagtgtgccggatgtggcggggcttcgtcccaccggtgatcgggtgcgtgaaactgtattcaactggttgcagggtagtgtcgctggcgcgcagtgtctggatctgtttgcaggctccggtgctttaggctttgaagccttgtcgcgatatgcgcagagttgtacttttgtggaaatcgatgctgcggctcgtcgcaatctcgttcactcctgtcagctactggatgttgtggtgactgaacagcctgttgtcagcaactctcccagtggcgaagtattgcctgatggcgacgtatcgccgcctgtcgccatcgttcatgccgggaccgctcaaagctccattgcagactggttgcaacacgctgaagcgctgcgatacgacctggtttttatcgatccgccatttcagctggcatgtcagtgggaagtgctgggggatctggcatcggtgttacttgctgatcaggccttggtgtatgtggaatcaccccttgctcagccagttccgacacttctgccaaggggctgtgacattatccgtgaaaaacaattcggtgaagtgatggcacgtttagtgggatactcagtagcgtgagtaggcgcgcgattcttcgataatttttttcatgcgtgtctattgcgttgcaaaataatatcatttgctccacactcgaacgctgaaccagcgggggctagttaatgcgcgttactgccatctatccgggcacattcgatccactgacggtcggacatattgacgtggctcgacgagctgccagtatgtttgacgatcttattgtggcagttgctgcaagcacgaataaagggccattcttctctttagaagaacgtgttgatatggcaacgcaaattcttggcgatctggaaaacgttaccgtccaatcgtttggaggcctgctgatggattacgctcacgatgttgacagccgggttatcgtacgtggactacgtgctatttctgattttgagtacgaagtgcagattgccggcgtaaatcgacatctggcacccgatgtggaaaccgtatttatcgcagcgtctcaggaatacacctttttgtcgtccagcatcgtaagagagattgcgagaatgcatggcgatgtcagtgaatttgtacatcctgttgtcatcaaagcgtttgaaaagcgtcaccaacgtgccttgactaaaggcaacgagcaataatcatgttgttggaactttgacatggctcttcttataactgatgaatgcatcaactgcgatgtgtgcgaacccgaatgccccaatgatgctatctacatgggcgaagagatttatgagattcatcctcacctttgcaccgaatgtgttggtcaccacgacgaaagtcaatgtgtggtggtatgcccggtggaatgtattattcttgatcttgacaataccgaaacgcaaggtcagcttcgtttgaagtacgaagcactcatgaaggcaaatcctgattagacacgacccgcactgcacttgttttaagctatcaggtgttgcatcaatctaattgcttgtgctgcaagaacgtttcgatattgaccatggcttcatcaaactgtttgtcagtaaaaaagctgtgataagcatcggtgtatactttgagcgatgcatcaacaccgagttttgtcagtgtaaagacaaaccgttcagctgttgtgatcggcacgtaggtatcctttgcgcctattaaaaacagggttctgggaaagcgctcatccagattgtgcaatggggagaagccttgcccgaagtgcttgacgcgttcgtacccatagccctgtacgctgttgtcgataacggcgccaagcaggatgaccccgtcaggataaacgcgattgatattaaattgcgggtactccgcggtaacaagtgaagctgccagatgtgcaccagcggatgcccccgctgcatacaaactcgtggcgccaagaccaagcatctgtcgattatcccggacataagtaaaagcatcttgcgcgtcctcgacagcgtgcaaaggtgaggtgtcgtgtgtgcttgctgtgcggtattgcaccgatatgcattcaataccttttgctgccagccatgtgcaatgagggaataattgactggcatcgccaagtgtccagcctccgccgtgaaagaagacaaccgctatgcggttttgttgaatagtttggccagcattatcattgttgggatagaaaacatagagcttaagtggcgctccctctgctggctgcttgtactcgtgaacgatatcaggggctcgctgtactagcttgtagccggccggggatgtaagggtggttaaaagctttgcgggcaattgccatacctgggcgatgcacaggcttaatgcgagtacaagcgtgcaggctgtgattacggtgagcgtgggttttcgcgccatagtagtagtttaccgctgacaagaaataaatccacttttgggccgttgatcgccttgaatgagcagagacagggatcgtttagtgagtcctgttgacaagacacccatggcgatatctgaggtgtatgtcgctggtcaggattcactgtttcaagtgagctctgttgagactcagttcgatagttctgcacaaacgcagtggagtctagttcagcgcgatgccgcgatggaggcggccaagcgctatgcgggcaaggcacgttcggaaaacacctggcgcggttatcgcgccgcctggccgcccgccaagctccttgcgcacggctgccagggtggggcgctgtccggtctgggtgatacggtcggctatggcgtgaatatcggtggtggtggtcatggtgaagcctcaggtatatagtagatttgtatgctgcaatatattacgtattgattcaattatttctatctccgtctccgttgataggcgtcgaagcacggtggagcgactggaggagggcagggcggcctgttaccggccgcctacgacgggttaagtctctgtgggcattggccgataggagtatttgcctattgactatagtcactagtcaatatcataattaccgatgataaaaagttttcgtcatcggggattgaaacgattgtatgagcgcggtgatcgcagcaagatcaacgcacagcaagtcgacaaggtggaaagcattcttgccaatctcgatgcggccactgagccgtctaatatggatttgccaggctacaagctgcatgcccttaaaggtgatatgaagggtatgtactcggtttgggttacagggaattggcgcatcgtgtaccgctttattgatgaacccgaagacgttgactttaccgactaccactgaattgaaaggaaagacctatgaccatgaagaatcccccacatcctgggcgcaccatccgcgaggattgtattaaggcctcaggcctatcggttaccgatgcggctgacaaactgggcgtgattcgtcagacattaagcaacctggtcaatgaaaaatcggcgatctcgccggagatggcgttgcgcctggagaagtttggttgggctaaagctgatcattggctacgcttgcagatgaattacgacctggcacaggtgcgcgcccgcgccgatgaaatccatgtgcaatcaccagagctgtagagcgggtcgacacgtgagaagttggtggagcggtttactcatgaacagaaacagggaacggttgcccgagcaattgcagaacgggtagccaagcattgtgaaatcctggagcaggcgcgtacgtttatcgcgtagtcggtcgatgggaaggggtttggagttatggctatagttcattctaagcactgaaaggggtggcttttggtgcagtgcaggtactctcacaaacgatcgttttcgtcaggtcaggtgtttcaaatgggcctgactgcacgtgttcctgtggagagtggaacaggctgctctagagttatttagatttacttcaaggacgtttccgtaaaatcatttttcgacaatgccgtctttgtttgatggaattgtcaggaatttgggcagagacaagatccattttacagccgttctctgacagccattttttgcagtcatgaaggctgcgaataattctcatgttgcactctttcttttcttcttcggaaggctggccacaagagagataccctctcttcatcgatggggaattcgatttcgtcactagcttcaaatgatcggagttctactagaagatcagcgaaaaagttcttagttgctatttcatcccactcgggttgatctgtcataattaggtgtcctgttcttctgttttcagcagattgttactggtgcactggatatctctatggctcgacgcgtagcgttatatgaacacgttgcgtaattctgtgttcaaattaaggatcggtggttccagtcaagtgccccgaaagggttggctttcagtgcggcaaaatgttggcatagggcgtcctgataaatacagatcattcgattgatgtaagaagcacttgcatagaaatttactgttgaaaattgcctgctagttcggggttgtcagcagcgctgattggatgtgtatgaagggtgtttcaataaccttattgatcacatcgtctgcaatcgaattgcaagtcaacgaacgacacacaaggatcagtgagataagggtggggcaagccgcagcttgccccgacgatgtgagaattctctcttgttaccggagagactacaccgctttcgctgctaagcatctagaagatagtctatatcttgattccatgtcaacatgtagttttggtgtatttcagcaactgaatggagaccgctttggaactacgttttgcgtttgatttaggtacgaactcaattgggtgggcggtctaccaactgggagaacgaacaaacagtcttggccagaaagaaacagatgtgccggtgcagttggttgatctgggggcgaatctcttttctgatggtcgagctcccaatactggagagtctttagcagcgttgagacgagttcctcgcggcgccagacgccgtcgggatcgatatctgcaacggcgaaaacatgtgttgaatctgctacagcagcatcaatttctacctaccgatgaaaatgagctcgcgcgaatacttcgagcagatccttatccgattcgagcgacggctgcagagcgggaagtttccttgtacgaactcggacgagcattgtttcatcttagccaacgtcgagggttcaaaagtaataggaaagcacctgctggtgatgaggaaaccagtggcaagatcgccacggcggcccaaaaccttcaggagcgattacacaagaatggttatctcacactgggtcaatttcttgccgcccgtcagtccaatcccaatgctcgacttagacaaacgacaagagttcgtcttagtggggcaggtgtgcaatcgaactatgaattttatccattacgagagatggtagaggccgagtttaacgtgctgtggaacacgcaatctgcattccatgcggcgttaacagacgaagtacaggatgtgctgcggcacgctatattttttcaaagaccacttgcgccggtcgagccaggtcggtgcaccttctttcctgatgaactcaggttgtctgatgctacagaggcagcacaagaatttcgtatttatcagatggtcaataatttgaggatcatttatcagcgtagcgaaaggtgtttgagtctggaggagcgggatcggatagcagacgtactggtggctggagaaacactaacttggacgaaagtcagaaaactactgggaatcgattcaagtcatttactaaacctacaagaaggtggtgaaaaagaactcaagggaaaccgagtggcaaatctgatgcaggggacaaagaagaagcctggtccgtttcgcgacgagtggcatactctgtcggaaatagagcgtcgagaggtcatagcatgcctgaaagaggctgataacgatgaggaggtcgttgcatgggcgcagactcatctgtgttgcgatgaggataaggcaagactacttgctgctgtgcgattgccagatgattaccgtaggttgtctgaaaaagcggtagatatgatccttgaccggttgaagacagaggtaatcacctatgcggaagctgttgaacaatgtgggcttcatcattcggatttgggtggtggcgaacattatcagcgcttgcctccatacaataaaatcccttcattacaacggtttcttggtcgatctactggcgatccggatgatccgcctgacctgcgttttggtcgtatcgcgaatcctaccgttcacattggactgaatcaactgcgtcgtacatgtaatgcattgatagaccgttatggcacgccatcgcagattgtagttgagttggcacgtgagcttaaacagtctgaaaagcagaagaaagtaacccagaatagaataaaagagaatcgggaaaaaaacgacgaacgacgagaacgactggttgagctgaagcaaatagaaccagatcagaaacgaattggcgaaacattgctgaggctacagttatgggacgagctaggtgatctgccgaggttgtgtccttacaccggacagccgatctctatcacgtcgctgttcagttcgaatattgagatagagcacatactgccgttttcgcgcacccttgataatagtccagctaacaaaacggtagcgtttcgcaaagcaaaccgtctaaaagctaatctgagtccttcagaagccgccacacgtcatccggatgtaatcgatcgaaaggctatgcaggatcgagtcagattgtcaggcatgccagccaataagcgttggcgatttgaggatgatgcgatggaacgatatgaaaatgaggagcagttcttggcaaggcagctaaatgagactcaatatctgagtcgattagctagagcctttctatctaccctctttgcatctaaggatgaaactggacatggtaggcaaaatgtgtgggtagtgcctggtcgaatgacctcactacttaggaatcgatatgccgttaatctcgggacgagcaatagaaagagtcgagatgatcatcggcatcatgcgattgatgcagcagtcattggagtattagatcgtagcttgattcagcgcatagcatcaatctctgcaaaacgtgaagctgatggcgtggataggctgctggcagatttggagccaccgtatcctgcgtttcgcgaacagattctaaaccgggtaaatactattcatgtcagcaaccgtgcgcgacatctcaatgaatctcctgacagtcatcacaccagtggcaagcttcacgaggaaacatattatgggattgtcaaagacttgccggaaaacgaggaagcgttgtcattgggtaacgtagttagaagaaagtcagttgttagtttaacggttccagagatcagccagatacgtgatggaaaactaaggggtgagcttcaaaaggtggctgagattgaccctgagactcgtaaaacggagctaacaaaaaaagctgttgaacagaagttagtggtgtggtcggaacaaagaggtatatatcgtattcgcgtgatgaaaaagaaatctacagtgatcccgattgcctcgcgaaagacaggggagccatacaaagctgtagttccagatgaaaatgcctattttgatatatataaagataatgcgggcaaatggtatggaattgctgttaactcctttcatgcgaatcagaaaggggttgattctgaactaactgaaggtgtcttcataatgcgtgtatataaaggcgattacctgcaactgcgagatcttgaaactggatttaacgcgataaagcgagttactcagattaaagcagcaagcaatttgctagttttggttggagccaatgaagccggtaatattcaacagagacatgacgatgacgacgatgaattgagaaaagattttgccaatattgcgaagttaaagagcagggcagcgaggagggttaggtttaccaatgctggtcgcatgaaaacagtgccacacggtaaaatctgacaatttctgagatggttatgacgtgcggagggcatggtagttgcccgctttacttccaggaggcgtcatatgactggtcaaattctggatatctctaccaatgggctgagttttcatctagatcgcggatttgtttctgttcgcgagaagggaaagaccttggccaaggttcccattgctgatgtagattcgttaattgtgtctgcgcagggagcgatgtggtcaaccaaattggtatctgcgctagtcgctcagggttctactgcggtatttgttgatgaatacttcgcgccttctatgttgatggtgccgtgcaatggtcaccatgctcaaggggggcgaatgcgttgtcaggctagagcctcaaagcctctatgtaaaaggctgtgggctcaaattgtgaaggcgaaaatacagggacaagcagctgctcttgaacggcaagggaagccttgtgagcgactttcgcggcttgcaagcgaggtccgcagtggcgatccggataaccgtgaggccgtagcagcacaatactattggcgtaaactttttggagatgatttcaggcgaaatcgcacattgaatggcgcgaatgccatgcttaactacggatatgccgtagtcaggtctgctgctgcacggggcatcgttgctgcgggattgcatccttctctatctgttcatcacgtcagtaaccatgatgcttattgtttggccgatgacctaatggaaccctttcgtcctgcagtggacttgatggtgtctagtttgattgaacaagaggttgacatggcgaacgcaaccacccgggctgctttggctggtgtgctgaatgctgattacctgactgtaaacggccacacacctatgtcggtggcattagtaaaattggcgcaaagtctagctggtgtttttgaggggaaatgtaataaattggaaatgcccatatcgtgcttgcctgtggctggtgtagaaggttgagcacccgatattcgactctctcggggtataggataatgtggatttgggccgtattcgatttgccggtactgagcaaggaggagcggaaagaagctagagattttcgtaattctttgctggactatggatttgaaatggtccagttctctgtgtattcacgctataccgtaagcaaggagcgagcagagtcactcgctgagaaaatagctcgtctagtgccagaaaacggaaaagtggatttgttattcttcactgacaagcagtatgagcaaatcaagagcttccgtagcaattcgggcaatgaacttgcggaaaaacccagccaattcttacttttttaactgaaatcgataataaaattggaatctataaggtataaaaagcatgccgtatcagtaacatacggcatgtttatcttagcagtgaaagcggtgcagccaaaccggaactgcataattttgatgaaaaatggtcaggtaatcttagcagtgaaagcggtgcagccaaaccggaactaatccgatggtgtcaggcaaagtgcccggatcttagcagtgaaagcggtgcagccaaaccggaacgaaataaaggactggctaatccagcactctatcttagcagtgaaagcggtgcagccaaaccggaaccaacaggcggcgtgggacaatcagacaggcatcttagcagtgaaagcggtgcagccaaaccggaactattgtattcggaaggatgactgggtgcacatcttagcagtgaaagcggtgcagccaaaccggaacccatcatgtcgttaaactcaatagttgataatcttagcagtgaaagcggtgcagccaaaccggaacttaccatggttgttaccctcgtttattgtatcttagcagtgaaagcggtgcagccaaaccggaaccaactacgtgatcgccacctttcgccttttatcttagcagtgaaagcggtgcagccaaaccggaaccaacgagggacaacccttgagagagtattaatcttagcagtgaaagcggtgcagccaaaccggaactccttaattcggattcattaccttgtaattatcttagcagtgaaagcggtgcagccaaaccggaaccacctaggtgtactcccctgtatcttcgtcatcttagcagtgaaagcggtgcagccaaaccggaacaatcctcgtaacagcatgtcaagtcctcctatcttagcagtgaaagcggtgcagccaaaccggaactttttcgagcgcgagcccgcttaatgtctcatcttagcagt

SEQ ID NO: 2542 - DNA, 16584 bp, synthetic construct
  source 1..16584: mol_type = other DNA
  misc_feature 1..16584: note = Synthetic
gatttgtagcacaattttcagtacgaatctccacagaaactgccagccgggaggatggcgcgtctaacaaccgatcaggggtataatctccttgggtctatcgagatgaaactgggcgctatcgggcttgtggcggttacgctgatcggcgtgttgctgactgcttttgcctttgtcaatcacgctacgcccaatgtctccatcgagactgccgtcagcaagacgcgctactgcaatgtgccggtacagcccgtgcctggcagcatcgactacgatgcgaaaagcctgacccttcgctttgtcggcaaggacgcgactggagagatgcccgtcgtcttccgcaaaggcaagccgaacaatttcgagcacgccaccagcgttattgtaacgggccaatttcaagacggcgctttcgaagcgcgagagatgctggtgaagtgccccagcaaatatcaaggccagccggaaaagacctacaaataagcaatgggttacgctttcgtctggatcggctttgtcggagccgcgctttctgccctgctctactggcgcaatcaggtcaaattggccaggctgacctttattgtcagcgtcatcgccgcgtttggcgccgaggccgtgctccagtacttgttgcacacaggccgatacgacatcctctacgtcttcagctttagcgatcgatcgctctcgctgtggttcaagactgcgggcgcatgggccggacaagagggcagtttcctgctctggctgctttggatctgcgtctacggcctcattctgatacgaacgacgggcggctacgagcggcacgtaatgggcgtctacagcctcatcatgctgtttctcttcggaatcttagcctaccaaagcccgttcgatccgatcccatccgacaagattccgcccggcatgcgcatcaccgacggccagggactcaacccctcgctcgaaaatatctggatgaccatccacccgcccattatcttcgcgggatttggcggcttggccgttcctttcgcctggggagtggcatcgctgattaggggcgaatacagcgagtgggcggcgcgttgtcggccttgggcgatctatgttacgaccgtgcttgggttcggtctcacgctcggcggtttttgggcttacgagacgttgggctggggcggattttgggcttgggacccggtcgagaactgctcctactttccttggctcggcatggcggcgctgttgcacgggctgatgctccaggtctctcgcggcgtcatggcgcgatggaatcccttcctggccgctctgcccttttcgatgttcgtctatggcacttatctcacgcgcagcggcgccttggcggacgtttctgtgcactccttcgatggcatgggcaagagcgccttgtggatattgatcgtaatgatgggtctaggcgtggccgcgccgctcggcctttggctgtggcgatttcggtcgatttcgaacccaaaaccgttagacgcgaccagcggcccctcgcgccaatcgatggtaaccgcaggtctcgcgctgttgctcatctcggcatgggttacgctgattgccacctcttaccccttgatcaccgtctggctcgggcgagaaaagcagacgctccccatcgagttctatcacgattttcacgcgccatggatgattgtaacggcgattttgatggccgccgcgcctgcagccatttggcgcgggatgaccgcggacgacctgctcaaacgcctgctggccccttggtgggttacgattgcgtttacgcttgtcgccatcctgttgggcgtgcgcaatgtttggatattgatggtcgcggctatgcttgttttcgcctttgcgtccaatgccaagagcctctttcagcgcggcaaacgcaccctaggaagcgtaggcggctttcttacccatgccggtctgactacgaccgtgctcggccttcttatctcgaacggatatgaaaaaaaggaggaggtcatcctgaatgaaaccgcttcggccaaggcacacggctacgactggcgatttatgggtatgaccagtgatccggacgaggacaagtcgaaccgagttcgaatccaagtcaagaacgaccgcgagagtttcatcgccgaacccaagtattacaacgattggaagtcgggcgaaccgcgccccgtgctatggccttggatcaagcgcggattgacgcacgatctctatgtatctttcctttcgcgccccgagcctcagcccgaggccgctctggacgccaccattacgacggacaagagcgtcgaagccggcccctacaagatgaaactgcgcaaattcaccagcgagggtcaaatgggacagcccggttttcgtgtcggagcgcagatcgaaatcgagtcggaaggctgggatcgtccagccctggtcgaaccatccgtcgtaacgactgaagagggccagcagaggtttccaagcgtctttcccgatggcgcggtcggcgtgattgtgtcgctcagcgtcgatcaaaagcaggttgtgctgcgaatgatcaacattcccgaccgtcccgagacgcatcttcagcagtttattccgcttcaggttttttataaaccgctgactattttagtctggatcgggcccggcctaaccgtgctgggcggattgttggccatgagacggcgatccaaagacctaaagcacctgcttaagaagctctctgcccccagcgaaccggccaaagccgatgccgagagagtagaatctgccgtatgaagctggtttgcagactaaaaagcaaaatccacctcgccacgatcaccgatgcgagggaggactacataggaagcctggccatcgatcaagacgcgatgcaggcttcgggcatcgagccgggcgagtatattcatgtttgggtggttgagagcggcgagcgattctcgacctatgccattcccgcgccgtccggatcgggcgccttcgctgtctatggcgccgcggctcacaaagcgcgccggggtcaaaaagtcatcatcgccgcctttacttggaccgatgagaaggtcgatcctcaaatgattctgatggacgacgataacaagatcgcccagcgactgccctttatcgcacaacccgtgccatcgcgctaatcccatgagcgtccgcaatcgcccagccgccctgaccgtcgcgggatccgattcgggcggcggcgcgggaatacaagcggacctcaagacctttgccgcgcacggcgtctacggcgcgagcgcgattacggctctcaccgcgcagaacacgacaggcgtgcaagccgtttaccctgtttcgccagattttgtagtcgcgcagatacgatctgtgctggaggacattggcgccgacgcgatcaagacgggcatgttggccagcgaggtgatcatcgaggccgtcgcgcgagagctcgagggccaaacgctggtggtcgatcccgtgatggtctccaaaagcggccatcggttgttggaagaggccgccatcgatgccctccgctttcgactcatgcccattgcgacgattgtaacgccaaacttggccgaggccgaagctctggtcaactttgcggttcggaacaaagagggcatgttggccgccgcgcaggcgattgaggcgttcggaccaaagtgggttctggtcaagggcgggcatttggaaggcgccccggacgatctgctgtgggacggcgaaagagcgatctggctcgaaggcgagcggatcgattcgggcttcactcacggcacaggttgcgcattgtccgctgccatcgctgccaatcttgccctaggcgcagagatgatcgaagcctgcaagcaagcaaaacttttcctgaccgccgccataaaggccggtttcaaagtcggttcgggcgtcaacccgcccaactggttctacgggatgggccactgaccgatggccgtcgaaatgcgcggcatcacgaagcgctttggccgatttgtcgctaacgactccgttgatctaaaggtcgaaaccggttcgacgcacgccatcgtcggcgaaaacggcgcgggcaagacaaccctgatgcgcgtgctttacggctaccaccagccggacgcgggcacaatgctgctggatggacaaacgattaagtttcgcaccccggccgatgcgatcgccgccggaatcggcatggtcagccagcactacagcatcattcccgaactgaccgctctggacaacctcttactgggggcggagatgaccggaagcttgggcatcatgaggcgcaaagaggccgagtccagggccgaggccctggctaaggatgtggggttgtcgctcgaatggaaccagcccgccagcgacctgacgcccgccaacgcgcagaagttagagattttgaaactgctgtggcgcaacgcccgcatcctcatcttggacgaaccgaccgccatgctttcgccggccgattcgggcgcgctcttcgagattcttgagcgacttaaggccgaagggcgcaccgtgctgttggttactcacaagatgcgagaggtcctggatcatgccgaccatgtaaccgtgctgcgcgggggcaagaaggtgttcgaagcgcccgtaaaggagatcgaccagaccgaaatcacccagcacatcgtcggcgaggcggacttccatgcgacgactgaggctttgggtcagccggtggaagccaatcctgccttaaagataagcggcctaaaagatcgctccggtcgattgcgcgactttagcttgaccgtacaacaaggcgagatggtgggtattgccggggtggacggcaacggccaggttgagctgatcgagcttttggcggggttgacaacgcccgctgccggctccatagagttgtatggcgcaaaaattgagcgatgggcgacagcgacgagattggcatacggattgcggtttctttacgaagatcgctttcgccgcggcatgatcgccgagtggagcgtggccgataacgcaatcttaggagcgcaacgcgagcccgaaatctcgaagcgcggctggatgagccgacagcgcatcctgtcgcgcgcccaagcagtagttgagcgatttggcgccaagacgccagggctgacggcgcccatgcgcgagctatcgggcggcaatcaacagcgcgtggtcatggcgcgggcattgcacggatcgcctaaggtcgttgcggcttatgcccctactcgcggcctcgatgtgaaggggtctgaggatgccttcaaagcgcttcgacaggcggcggcagacggagcggcctgtttggtcgtctcgctcgacttggacgaactgttccaattttgcgaccgaatagccgtgatctataaaggcgaaaacaggggcgagtttttgcccgatcaatacgatcgcgaacagatcggcgcaaggatggtcggtctgtgaagccttggatgcgctatgcgctcggcgcagcgatcgccttcggcacggtcgctgttctattgcagttgagcggcgtggcgcccttggacggatttagaatcttgtggtccggctcattgggcgacgaactcaatcgagatttcaccctgcaacgattgacgccgctcttgttggcaggtttggcggtcggcgttgccctgttggtcggcctgttcaacattggcgcagagggacaattgctggtgggcgccgcggcgggcgcctatgtcggctttaagttcaatctgccggcgccttggcacctaatcgcgagtctggcggctggctccgcggcaggcgcgatatgggctttggcgcccgcactgctcaaagtctggcgcggcgcgcacgaagtgatcaccacgatcatgttcaactacatcgccatctatctaacccactggttggtggccgatgtgtggcgatcgcccgacaccggagcgccccagacgccggatgtaaaaccgactgcagaactgggcgcatttccgggccttgcggaaacgagctggggcttggggatcgcgctgttagcggccattgcgctctattttttgctctttagaacggtttggggttacgaggcccgcgcggtcggcgctaatcgagaagcggccgaagcggccggggcgccgtatgccaagcgcgtgatcgcggccatgctgatttcgggcggactggcgggcctgggcggcgctatcgaagttgtcggccattatcggtacttcttcgaaggtttttccggcggggtggggttcgacagtatcgccgcggcgctattgggcgccggacatccgctactgatcgttgcctcgtcaacagtctttgccgcccttcaacaaggcgcctacttccttcaggtcgaacgcggcgcggacgagaagatggcaatcatcgtgcagggcgtactgatcctctatgtcgccaccctgcgcgtaaaatggggcaaacgaggcgactgatgaactttttcgacctcgatctgctcaattcgaccctccgcgtctccacgcccttgattttggcggcgctgggcggccttttgtgcgaacgcgcgggcgtcatcaacatcgctctagaaggcaaactgctcatgggcgcgttcgtagcctcgtggatagcgctctcgaccggcaatccctggcttggtgtggcgggagcgatgaccgccgcggctatcctcggcctattgcacggatttatgacccaaaaattgagaatcgaccagattgtcagcggcgtcggcatcaatatgctcgcatttggcggcacgaccttgctctatcgcgccttgatcgagccgttagagcgcgctggcacaggctcggtttcagccggtctcaagggctttgatgcaggctggcttcagtccatgccagtcctagggcgcttgttggccgacctcaactggctgactatcatcgcgatcgcgctgcccttcgtcatccactttggcctctatcgaacgcgatggggtttgcgcgtaacggccacgggcaacgatgcggccaaggcgagatcgatgggcgcgccagtcttgaaactgcgctaccttggcgttgtctacgcaggacttctgaccggactggccggcgccttcctgaccgttggctcggtgccccagtttagagaaaacatgagcgcggggcggggcttcattgcattggcggcgctcatttttggccgttggacgcctatgggagccgcgggcgcagcgctgggattcggcttcttcgaagccttgcagttgcgttggcaggtcaacccgccctttggaaaggaaatcccgaccgatcttctgttcgccctgccctacctgctgaccgtgatcgcgctcatcggactctttggcaagaacaaaccgcccgccgatttggggaatgtctgatgctattatcagtaaacgacttgagcgttgcttttcctacccccaaaggcctcgtgcggcccgtggacggagtctcgttcgaaatcggagagcgagaaatcgtcggtctggtcggcgaatcgggatcgggcaagtcgctgaccggcctctcgctcatgcgcattgcgccgcccaacgcgcagctgggcggcagcgtgctatggaacggcgaggacgttttcaagatgagcccctctcgtctaaggcgacttcgcggcggcgaggcagccatggtctttcaagacccgttcacatcgctcaacccgctaatgaccgttggcgagcaggtgagcgagacgatccgactgcaccaaggattgtctcgcgcacaggcgaagcagcgcgctatcgagatgctggccgaggcgcgcatcccatcgccagaaaccacgtaccgacgataccctcatcagctctccggcggtcaacggcagcgcgcaatgatcgcgattgcattcgcctgccaaccaaagctcctgatagccgacgaaccgaccaccgctctcgacgcaacgcttcaggtacagattctcgagttgattttggcgctccaacgctctcacggaacggcaacgctgctcatatcgcacgatttaggcgtcatcggagccgtttgcgagcgcatgatggtgatgtattcgggccgaatcgtcgaaacgggcgatacgaaggaagttttggccaatccgcgccatccttatacgcaagcgctgctagacagcctgccgggcggcgaaaaacggccaacgcccatccccgatcagccgcccgaccctgcatcccgtccgcccggctgcgcctttcatccaagatgcagccgcgctttcgaccgatgccgcgtcgaacgacctgatctgatcggtagcgcggcctgctggctcagacaggaataaccggcccaaacgtcgaagtgtaagcccatgaagcgatttgcctggctcctctccgttgccctattctcctctgcgattgcccaatatccgggcgctcaacctgtgccgtctgactacaaagcgggctttgacgccatcctaaaagaagacatcaaaaagtggatcgaatacctcgccgggcctgaatgcgaagggcgcggcaccggtcagccgggatacaagaaagcggccgactatgtagccggttacctccagcgttttggcgccaagccccttggcgacaacggctcttacttccaacacgtgccgtttttcgaagcccgagccgacaacgccaagacattcatggcgtttaacaacctgaagctgagcgcagggagagaaatcaatgtcctttcgggcgccggcatgggcgaggaagaggccgagatcgttttcgttcagggaggcggcgatgcgcgattggagccgaacgagggcttctcgggcaagattgtgatcgtgtttggaaagaatgtcaatccccagttgcgccgacagaccacgttcggctcgctcgcctcctttaccgttgtcgagaagttgggcgaaacgacttggacgcttgctcgcgggccgatacccgacaaaccgccgacgggcatcggcgcggtgcgcggcgagatcactctggaagcggcccagcgattggccaaagcgctcggcgttcccgacagcatcgcccaaatgcccgacctctcgaaaggcgcctttgccaaccgcttcgtcgccacagaaaaggtcaagatcacaaccgcctctgagttccgagcagccttcgtcgctaacgtcgttggcatcatagagggcagcgatcctgaacttaaggcggagtttgtcggcgtcggcgcgcatctggatcaccttggaaaacgcgggaacgtcgtattctggggcgcggacgacgacgcctcgggttgcgccgccgttttgggcgtcgccaaaggcctccatgagaacccgaataaacccaagcgcagcgtgatcctgatgttctttgcggccgaggaagccggcctgatcggcagccgctacctcaccgataacccaacgttcgacctgagcaagatgacctcggagtttcaattagacatggtggggcgcaacgaggagaaccgaaccgaaaaagcctccgacaacgaagacaccatccatctggtcggcacgcggcgcgtctcgaacgacattcacgacctgatgcaagaggccaacaagtacgtcaatttcaagtttgagtacgacgaagaggacgtgtacggtcgcagcgatcacatcaactttgcccgcaaaggcatcccgatcgcctttctcttcagcggatttcatccggactaccaccaaccgggcgacaccgtggacaagatcaactttgacaaggcgaccaacgcctccaaactggcctacatcgccgtttcaatgtccgctaaccgcaccgagccgttcaagaaaatagaggggaattaagagaaaacccgaggggcaagccctcgggtatagatgggtatcgtccgaagacggtttaccctcgcaaggtttttggccttcttattggggataagggtcaacctccaccaggtacaaccttgcgactacattataccccaactttaggcgatgtcaagtcgtcgcttggcaggaatgcaacacatcgatgtagaagcaaacgagcatgggaaaaattgtcgggatcgacgcgggcaccaattctctgggctgggtcgtgttcgacgaaccgagcaatcccaatgccgaccgcaagatccttgcggctggagtcaggatatttccttcggtcatcgatcctaagaagaaaactccgctgaatgccgagcgtcgaacgtttcgcggccagcgtcggaacatctatcggcgcggccaacgactgagaaaccttaaaaagcttctggagaaagagctcggcgcaagccccgatcctgcgctcaacccataccagttgcgcaaagacgcgatcgaacggcagttggattctgtcgaactggcaacggcgctcttccacctcggtcatcggcgcggattccaaagcaatcgcaagacccttcagcaaaagtacaaaatcaaatcgaacgaagtagaagaccctgaagccgtattagccgagcaaacggaagacaaagaggaaggcaagaaacttgccaagaaactaaaggaacttagggaaaagtccgccggcaaacttctcggccaatactttcattcgatcttcggacgcgagcgcattcgtggcagcgtcaagcatcgggacgacctgcgcaaagagttcgaacaaatatggatagcacaacggctgaccaatggcaagttcaagcaatgtttagaagacttgctctttggccaaagaccgctcaagtcgcaacgcggactcatcggaaagtgcgccttcgagcccgatcaaacgagatcgcccaagtgcatgcccttgttccaagagttcaacatctggaagacggtcaacaatctgagggcgactcaaaactatcgcgacgtgcccatcatgcccgagcaacgtcagaaactggccgaagaactcatgacaaaacccagcctttcttgggcggccgtccgaaagttgctggggcacccaaaggatacaacatacaaccttgagaagcccaacaaaaacgatctgccgggcaacaaaaccgcggtcgagatgatcaagatcatgggcgaaaagcgatggaatgatctcagtttcttgcaacgcaaccaattggtgcacaaaattcgatcgaccaataacaaaagaaagctcgaaaaaagtttaagattccattggaagttccctcaagagatcgccgggaaactggcgctgcatatcttcccggacggatacggcaacctgagccgcaaagccatggaaaagatgctgccgcatctacagcacggcctgaacgagcacgacgccgcgcaggccgcgggctacaagcgtcgagatcaaatcatcatcgatgcgcaagcccgactgcccatgcctcccgatctccgaaatccaactctcaacaaagcgctggtcgaaaccagaaaactggtcaacgccatcattcgagagcatggcaagcccgacctgatccgaatcgagttcgcccgcgaactcaaattgggtcgcaaggctctcaaggcgatcgacgattcgatcaaaaagaacgaggatgccaataaagaggccgacaagttttatgcggaactagggcaccctattgtcagccgcactgataggatcaagtaccggctgtggaaggaatgcggcgaaaagtgtccctatacgctccgacaaatcaacgccagcgacctcaccaatggcaacgtccatatcgagcacatcattccattcggccggtcgtgggacgactcgtttaacaacaagaccctcgcctttgcagaagtcaaccaactgaaaggcgaccgaacccccttcgaggcttttggcggtaccaataaatggaacgacttgatcgaaaacatgcgacagaaccaaaagttcggcatgaaaaagcacaaagtcaacctgttctgccgggaaacgtttgacgaagagcagtttcagaaccgccagctctccgacactggctacatcgcagtcgccgtaagagagtacttggagcaactgggtgtagaggtgcaaaccgtatcgggcaaggccacggcatggctgaggcacaaatggggactcaacacaatcctcaatccagagggcaaagacgagaagacgcgcgaagatcatcggcaccacatgatcgacgccgccgtcgtcgcactgacaacgccggctatcaccaagcgcatcagcgacatcgcaaaactagagatggaaaaggtcgaatcgatcaacaaactcaacgtgccccagtggccctcattgcgctcatcgttggaacgcctggtcgagaattgcatcgtctcgcacgcgcccaagcgggacatatcaggcggactgcacgacccgaacccgtacgccaaaaagcagtacggagcagaggaaaaatactccattcgcaagcctatctcggctatgtctaagggcgagatcgaggcgcttgctgacgggatgctgaaaaagaagctgattcaggcgatctccaaccaagccggcatcgattgggcaaagttggaaggcgatgcgtacaagaaggcgctgaagtccctattgggcgaggatgagaccttccgatacagagacaagatcgggcaaagggagttgaccgcccggcgagcgcgaatcctgaagtccgaaggcgaggagacctttatcaagatggggcgcaagaaggacgattcgccccgatggtatccgatcggcgattatcaccacgtcgagatattggaatgcctgaacgattgcactgttgacggcaagaagtacaaaaagggacaacggcgcggcgcgttcgtctcgacctgggaggccgtacatcgggtcagacgagacaagaaagcgctggtgcagcgcgaccatggtccgaactggcgatttatcatgagcttgtgcaagggggatttgatcgagatggagggagataaagcgggattatacaaagtcgctgtacttgaacgcactaaccacagaatttgcctgaaagttcacagtgatggaagcctaaagcgaccattcaacattagcatcaaccaactcaaggcttccaaagtcacaatcgacccccttggccgcaagtatcccgccaacgattagccaaaaactcgcaacttagacaggcgctaacgcctcagaatcggcgtatcaattcattcgatgataggtcgagtgatcgaggtcgccacgccggctcggctatcgctggccgaccgccaaatagtcgtagatcggagcgaggccgataccctctcggcgccgctggaagacgtcgccgtgctcatcctcgacaaccccaccatcgccctaacgctgcctctggttaccgcctgcgccgagcagaacatcgcgatcgtcgggtgcgaccagcgccatatgcccgcctccctcacgctgccgatcgaaggcaactcgacgcataccgaaacgctgctcctacagatcgaggcaacggggcccgccaagaaacaggcctggaaacagatcgtacaggccaagatcaacgcccaggccgccctgatcgaaggcgtctgcggtcgcgccgataagcttcgacggcttgcggcgcaggtagcctcgggcgatccgaccaattgcgaaggcaacgccgcccagatctatttccaacggctctttggcgaagattttcggcgagagcggtttggcgattatccgaacaacctgctcaactacggctacgcgatcttgagagcgtgcgtcgcgagggcggtcgtcggcgcaggccttcatccatcattgggcatccaccatcgcaatcggtacaaccccttctgcctggccgacgatctgatggagccgttccggcccttggtcgacgcctttgtctaccggatatggcgcgcttcgcccgacccgattctgttcgaccgaaaggtgaaggccgaactccttcggtttaccgtctccgacgtttcattgcgcggcaagtcgttgccgtttctcgccgccctaaccctctatacggcctctgtgcggaggttcttatgccaagacggaagaaagctgcaaatcccgaacgcattcacgtaagccaattcaagatcatgtggaacgtagtcgcctttgacctgccgatgaacgaccgaaaggagcgtcgggcttacgctcagttccacaagttcctcaagcgggacggctactttatgatgcaggaaagcgtctatgcccgtccctgccccaacgcggacaatctggaaacgcacaagaagcggctattgcggaacttgccgccctatggacaggtgcggattctggcctttaccgatgcccagttcggcaagatggaggtctactatggccgtgtcaaaggcgaaccggagaagccgcccgaccaattgacgctcttctaggattgcagattctggagcgtaacgaaaaaacagaggcctcgatagagcggatttttcgttctaccgaggcccaatttgtactcagattgaggcttcgcgggttatagacattgtacctggtggaggttgacccgctatccccaactttgtccgttgggttgcgcccgtacattaattgtacctggtggaggttgacccgctatccccaaccagcgcaccgacctcgaaagagtgcggcgaattgtacctggtggaggttgacccgctatccccaactatttcaatccgtgagtggtcgcgccttgtattgtacctggtggaggttgacccgctatccccaacttgctcctcgatgaggcgggattgacgtttattgtacctggtggaggttgacccgctatccccaactggacatcaacgacatggagttcgccccgtattgtacctggtggaggttgacccgctatccccaaccatcgcggagagagcatcgacgagggccttattgtacctggtggaggttgacccgctatccccaaccgacctcaagtggctctccatgcgatcgttattgtacctggtggaggttgacccgctatccccaacccaaccaacggggcccctggtcaataattgattgtacctggtggaggttgacccgctatccccaacagggcgtcgatcagatcgaactgccccttgattgtacctggtggaggttgacccgctatccccaacgcgagcgcaggcgttctgccatgcctccgaattgtacctggtggaggttgacccgctatccccaacagcatcgcaagcgccgcgatagttcaacgaattgtacctggtggaggttgacccgctatccccaacacaaggtaataagtatcgtaaagtgagaaaattgtacctggtggaggttgacccgctatccccaacagcacagcaagccgcgagattgaaatagcgattgtacctggtggaggttgacccgctatccccaacaggatctgcgcgaccggcgcctgctcgatcattgtacctggtggaggttgacccgctatccccaaccattgaatctgcgccaagagcgacagagttattgtacctggtggaggttgacccgctatccccaactgggcgcagaaggcgcccttcagcgagcgattgtacctggtggaggttgacccgctatccccaaccagaagcgcacacagaagcctaacgcctgattgtacctggtggaggttgacccgctatccccaaccattcgccttgcgagaggcggcctcgtccattgtacctggtggaggttgacccgctatccccaacctttgggcgaagagccggattgccggacttattgtacctggtggaggttgacccgctatccccaacccaaactgaaaacagattcatcggtcatcaattgtacctggtggaggttgacccgctatccccaacaccccgacgaaactgctcaaaagcagcttcattgtacctggtggaggttgacccgctatccccaacgcggggacgggctcgctcgcgggcgggaaattgtacctggtggaggttgacccgctatccccaacacactcgagcagttagtagtcgtgaaggcaattgtacctggtggaggttgacccgctatccccaacactcaaccacacaggaatacgacccgtgccattgtacctggtggaggttgacccgctatccccaactcagctgaagggtagcctttggcatggtcgattgtacctggtggaggttgacccgctatccccaaccgaacccggcgcctggcttctcatctcgcaattgtacctggtggaggttgacccgctatccccaacggcaacggcaaccatacgaccctgaccgggattgtacctggtggaggttgacccgctatccccaacggtctggcgagcctagcgatctgtcatcgcattgtacctggtggaggttgacccgctatccccaactgcctcgaatttctggacgaacagcagcagattgtacctggtggaggttgacccgctatccccaaccgacggccaggcgcctgcgccctatcagctattgtacctggtggaggttgacccgctatccccaaccgacgcgaacgagcgcatcgtctgtctgtcattgtacctggtggaggttgacccgctatccccaactcgatctgaccactctatgccgtcgatctgattgtacctggtggaggttgacccgctatccccaacttcaaaggagagaagcccaggt

SEQ ID NO: 2543 - DNA, 23084 bp, synthetic construct
  source 1..23084: mol_type = other DNA
  misc_feature 1..23084: note = Synthetic
cgcttctgccaggcgccgcagatgctgccggcgaatgtgatcaagccgcacctgtgtacgatggccggcgcacagttgatccaggatgaatggaacaagcacggctcctgcgcctggccgaatgcgaccgcttatctcgatcaggtggagaagctttacaagaacctcgtgctcccggacttgaagccaggccggacaaccgcaggcgccgtgcgcaaggcgattgtcgatgcgaatcgaagcaagggactgcggccggagcatacggaagtccgcgtgatttctggaaatcgcttctcggagttcatggtctgctatgacaaggacttcaagtttgcagcatgtgcgagttccgggacgccagactcgatcgagatcagcgtcgcggcgaagaagtagaagtcatctcatccacccaaacggcgatatccgatgatgttttggcgagatgagtgctgcacgggacctcagcgatgcccagtcggcgtcgctggatccttggatgctgaagccatttcggtgaaaggatgtcttgcgcaacgaatcaagccggtggcgcggggaatacacccaactgcatcatcaatccaagcatgtccatgatgatgcgcgtgtctttgatgcgcccttcttcaatccgatcgatgacgatgccccaaacccggacttgacggcccgttgcaggcactccgaggaactcgtgctgatgcgtgcccacccactcaaagcggctcaccactttgtcaccttgcgcaatttgttcctcgatcgcaaagttcaaatccgggaaggaagatcgcatgccgcgaagaatgtccttcagcccttccagcccggggccctgacccggaaacggaaccaactcgaccacatcctcccacacaaagcgcgacgccgagtcgatattgccctgtgtgattacttcttccgcgaagcgccgaaccactgcagcattttcctgtgtgctcaattcgatctcctcgatagcaggggcaattctatcactcggtttccgtcatttcgagtgcgatggtttctgccgggcgacggatatgagcggacgcaagccggcttctcgattttccatttcaggaggtgttcatgggcctggcgtcgcagagcccatgctactggtaattcacgagagtggtggagccgctgaagtagccggtgatgcccaggtccagtcctgtcgcactgaagcggctgagacggttgtaatttgtgatctgcaggttgcctgtggggatcgtcgaacctggattgacgaagcttggcaccattgccgagaggaccgcctgcggaatggtgaagtgtccagcgctcaccagttccgtgcagttgaagatggtgaccaccgggtcggtgaccgcggagaggatggagcttcctgtgatgaccacaaagcctcctgttgcgccaccggtccaggtgagatcgaggctctggctacgactgacatttgcgatgctgtcgcggttggtccagttgagagcaggtgaaccattcagcgcgacggcaaaggggcccacatcggttccgcctgtcgcactgatccggtagcttccgcctccctccgcaaggaagagggtgttctcggccttcgatccattcaggaagtaggagttcgttcctttggtgaacgctttggttgtcccgtccggaacttggaggctcactgccccagcgtccagatatttcaggatggtggggccggcgatcgcggaaggccggtagctgctcacaatgcaacttccaaccgagcttgttccaatgcccccatagttggaatagtcgaagggcgagtagcgcagaaggctgacaacagcgttgtccgttaacgtcgtgctcgcggcgatgggcgtgccggcgacggttgcggctggaattctgccatcgtaacgtcccagatagagtgtggcgctattgatgctgccgcttgtcggaagcttgtcgatttcatcagctccaaagccagtgacatcggaacaggttctcccgttctgcgcaaccgggatcgtcacaaaattgctgaccgtggtgccggttctgacaaatgcggagacatagcagcccgacaccccgtccgggatgacgacgttgaactgatcgagcccaggatagctggagcggccatgataggcgactgtcgcgagtttgttcccaatgtagaactcgaagttcccggtggcgctgctcttgggtaatgtgatgaggcgagtctcatcgtttgcatcgggtccgttgccggtgccccagaagatcacggtctggcctgggttggccgcgtttcgaatgccgatgtattgatagtttgcgtcatagacggcggcagctccattgccggcgccattgagggtcagcagtccaacggcgctttgggtgacggtgagcgcgaagggcgcgctcgtggctccgttgtagctgaccgtcatcgtcgcattgccaaccggcgtggcggatggcaggatcgcggcgatctgcgtgggagagacatagtaaggaatcgcctccgtggttgtcgggcccgcagtgattttgatcgagacgccgcccaggttcctgttcagcgcagggtcgaagctctgcgagaggactccggcgggagccatccccgatccgtagatcacgagaatggctccttgcgccacggcataggatggcgtgccgggaaggttgaagctgtagttgttctgccagccggtgatgacgggtgcggcagtggcaccaagcgttgtgatcaggagcaggaagggcaacatttaaggacgtcctatgacgatgttcaggttttggcgattggagattccatcgaccgtcaactcgatgggctgatctccggcgctcacactcgggatgatcacattgaactgatagagcccaatggtgccgccgacaattcctgcaaaggatatttcagccggaactcctccaattttcaattggtagggcaaggtgagcgaggagccctgtgcggcgaccactcctgcgagcgtgggcggactggtggggccgcaaccgagagcgtagatggaaacggtggagccgggttttgcttcgacaaaggggacaccggcgatcatgtttggcctgccgatataggtcgtgaaatccggggtcagcgcaacgacgtactgcttgccgtcgacgttgaataatgggaccgtttggagcgtaggcgagaggcggctgcgattgatcgaaacgggagcgctggtgcctagcggagttttgacttgcaaggtgacggctccggtggccgtatcgtccggcgtgttgatgttgatctgggttggactgatgtagtaaatgaacgcaggcttgccgttgacggtcacgctgacgccatcgagcgcagtgggcgcattggcgccattgaagtccgtgccggtccagaggcgtgtggtggtgctgaggtttgctccatagatctcaagataggtgttggaggagaatcccgcattgccgctgaaggaggtgtagaccgggccgtcggcgcgaatcgtggggaagggaggcgggctgatcttgcggaccttgatgttaccgtaatcggtgatgtagagattgccggagctatcggtggcgagaccatagttgctgcgcaactgcgctttagtggcatcgccgccgtcacctgacgcgcctgcggaacccgttcctacataggtgctgatctttccactggcatccaccttgcggacgcggttgtcgttggtgtcggagatgtagatgttgccgttgcgatcgacggcaacaccacccgccgagcggatctgcgcgctggtggcgggaccgccgtctcccgagaatccggagacgccagtgccggcgattgtggtgactgtgccattcggcaaaatttgacggacgcggggattgccgttgagccgtccgtcgctgtcgtctgtgtagtagaccgtgttgtcaggaccgatggcgacccagccgggtgcaccgtcggcagcggtggccaatccgccgttgccggacagggagagctttccagttcctgcaacggtatggatgaggcctgcagtgttgatccgccgcaggcgaaggttgcccgtgtctgtgaagtagaggtttccgatactgtccaaggccaagctgacaggcgcgttgagttttgccgaggcggcggggcccccgtcgccgctgaagccggctgtcgatcccgcaatcgtcgtgatcgtgccgttcggtgcgatcttgcggatgcggtcgttgcctgagtccgcaatgtacacggtgccatcgggcgcaacggctgtgcctgcaggggagttgacctgggcactactggcggggccaccgtcaccggtgtttcctgcctttccagtgccggcgaggatcgtaaccacaccgaagggatccgtcttatagacatagtgttttgtatagtcggcgttatagatgtttccggcggtatcaacgctcacgttatagatgcggccccaactggtgttgccagccaccgtggtgatggtttgggccgtcgagacgagacaaagggaaagtgccagtacgattcggtttaagagcatgcgatattcctcttctctagcgagaatggtcttttatacttggcattaagcgaaacaagggtcgaacccgtcatggctctcgaaatttcttttacgcccgaggaattggctctcagtggctttgcttcgttcgccacggatcgagccgccttggaccatctgttcagcgtgacctatgaagaactgcgccggcttgcttcgttggtgcggcggcgcgacccgggcgcgacactgagtccaacgaccttggtgaatgaggcgtggatcaaactggctcgcactcctgctgtcgcacagttgagtgacctgcatttcaaacgcattgcagcccgggccatgcggcaggtactgattgccgcagcccgcaagcgcaatgccgggaagcgaagtgcagggcccgggatgagtgtgacctttcatgagaatctctctgccggggtgacttgcgatgaagagttgctcgcgctcgatgtggcgctggaagagctggcgaagatgaatccgcggcaagcgctgctggtggagggacgcttcttcgggggcttggaagttgcggaaatcacgcgcttgctgggtgtgtccgaggcgacggtgctgcgagactggcgtgtcgcgcgggcctggctcgcacagcagctcgatcggcaactccgtggatagcagccgttgggagcaggtacagcaactgttccatgcggtgtcggacttggaggaggagcagcaactggctgcgctgcgcgcactgtgtccagaggaagggctggtggcagaggtgctcgcgatgatcgggcaagaccgcaaggcatcggtactggatgcgccgctcgaagtgattgctgagacggtcttcgaggaagaggccaggcagcagattggcccttatacggttgagcatctgatcggcgagggcggcatgggccgggtgtttctcgcgcaccgagctgatctcaatgtccgcgcggcgatcaagatcctgcgtgatgcctggatctctccagctcgccgcgagcgctttttgcaggagcaacggacgctggcccaactgaaccatcccaacatcgcgcgcctgctcgatgcggataccttgaccgacggcacgccgtactttgtcatggagtatgtcgagggcctcgacctaattcactatggtgcggcgctgggagtacgggaacgtttggcactcttccggcagctttgcctcgcggttcagtttgcacaccagcaggcgattctgcatcgggatatcaagccctcgaacgtccttgtgacggcagagggtacggtcaagctgctggactttggcatcgccaaacaactcgatgtgctcgatgtaacgcgaacaggattgagcctgatgactccggcctatgcctcgccggaacagatccgaggggagagccttggcgtgcggagtgatctgtactcgctcggtgtggtgctctccgaactgttgcagggctgtgagatgactgaggacctgcaggtgcttgttgcgaaggcgcagcattccgacccggagcagcgttatgcatcggctgaggcgttgctgcgcgacatcgatcattatctgcgcggagagccgcttgaggcgcgcccggattccttggtctatcgaacgcggatgttgatccggcggaatcggactgcggtcctggccagtgcggtgatgctggcagggttagtctccttggtgagttttttcttgatgcgcctacagacggaacggaactctgcgctggcagaagcggcacgagcgcaacgcatccaacgctttatgttgaatctgtttgagggtggggatcaggagtctgggccagcgaaggatctgagtgtggcgactctgatggaacgaggccggcagcaggccaaggtgctggaccaggatccccagattcaagctgaactctacgagaccttgggcgatatccaactgaagctggggcagtggaagcaggcggaagagttgttctcggcggctgacgcgaagatcccgaatcgttcgacgaatctggtctcgcgaggactgttgcgggtcgatcaggctcgattggatgaggcggaaggactgattcgtagggggcttgcagaggcgcagcgaacgttgccgccggggcatccgcagattgcagaagcgatggaggcgctcggccgggcgttggaggagaagggtaagtacgacgaggcgattcgagtgttggatgaggcggtccgattgcgtgctgcgggttcgggagcggacttggcgggaagcttgtatgaactggcgaatgttcatttctatgcaggccactatgacgaatcccaggcgttgaatctacgcgtgttggcaatgcggcggaagctctatggggaacggcatccgagcttggctgaggccttggtgaatctaggcgccatcgagcaggagaaggggaactaccagaaagcggaagactaccagcgtcaggctctagctttgactcgtgcgttttatggagaaacgcattaccgcacggggccggtttgacgatggtggcgcgagcgctcgtgtttcagaaacggagtgatgaggcggctgtgttgctggggcaggcgcttgcggtgcaggaacaggtgtttgggcctgttcacccacgtgttgcgtctgcgttgaatgaagtcggaaatgtggcaatgacacggaatcgccatgaagaggcgaggacggcattccggcggatggcttcgatttatgaggaagtccatgcgggcaagcactacctgattgggattgcgaaagcaaatctggcaagtgcttacatggcggacaaagagtatgtgagggcggtggctttgtttcgcgaggcgctggcgatgtatgcgcagacgctaccgccgggtcatctgaatgtaggaattacgagcatcaagctcggccgggcgctactgcggcagaagaagtatgaggaagcggagacggcgaccttgacgggctacgagattctaaagaagctaacctcgccctcgctgaactttttgcagaactcacggtcggacttaggggagatctatacggcactggggcagccggagaaggccgcgcgataccgcgaagagcttgcggcggtcgcggcaaaaagtcagaagccatagatctgagtctgcttgacgcagatctggcctgtttttgcccatttccgtgcattccaactatctgaaagtaatagagatcagtgctccgtaggttcgttccttcatttttggggtagaagtcttggctcttgctttcaaacggaagtggaatgcgcggagacaggtgtggtgtccaacgttctggtaaggattcagttgtcaaagaaccgagggctgggtttgcacccacccgcacatagtttgcgctgtgtgtgaaagaattcggaaagtgtggaggctaagtggcgggaaaggcgggagaaataaagtttagaaatcggtgaccggggtagtaaacatctcgagctaaggacgcgcgaacatgtttatgtgtatttagctgaagatctccggacacgagggcttgtgggcctcggttgagatttggtgagttcatgctgccataggttgcgactcggccagtttttcatgaagcactcccgctgaaggaaaaactcgaacgtgcacgtctcgagttacttgaaattagcggaagatcagcggacacaatgatgggaaacggcgcttaggggaagaggcgaagggagggcgtagcccgactggagccgaagcccctaagcgccccgagcgggtccttacggtgatagatttggaatcttccaaaacaccaaaatcaccccgaaaggacacactcatgagcgacaaccagaagcttatcaaagcgcgcattggactgctccaactcgcccaggaactgggcaacatcaaggccgcttgccagcgagccggcatcagccgcagccacttctacgagatcaaggaagcctacgagaagcacggagccgacgggcttgagccgaggcaacgccggacgcctcggatgccgaatcagactccgcccgagcttgaaaagcagatcctcgagatgacggcgcagtatccgacctacagttacatccgcattgccgaccagcttcgtttggtcggcatcggtgtctctgcccccgccgtccgaggggtctgggtacggcacggcatcactctccggctccagcgcctgctctggctggacaagaagaccgccaccgaaggcggcgtgctgacggagcaagccaagcggctcctgcagaagcatcagggccgaaacgttgacccggaacaacatatcgctgcaccgcattctggctatctgctttgccaggacacttactttgtaggcacgatcaaaggcgtcggcaaggtctacatgcagacggtcattgacgcacactgctcgcaagccttcgccaaggtctatctcagcaagatgccgatcactgcggcagacacactgaatgatcgagtcatccccttctatgacgatgagaaggtggggatcgagcggttgctcaccgacaatggccgcgagtactgtggactcgaagctcgtcatcccttcgagatctatctggcgattaaccagatccgccacaagagaacgcagatcgcttcccctcaatccaacggcttctgtgagcgcttccatcgcacgatcaaggaggagttttacagcatcaagttccggcaaaagatctatcagtctgtggctgaattacaagatgatctggacgcctatctgagcttctacaatcgccagcgaccccatcacggatatcggactcaaggccgaacgccataccaggctttcctcgatgggaaaatcgcccaggcgcaacctatggcagcatgaagtaaccgaatctcaaccgaggcccgtaagccctcgtgtccggagatcttcagctaaatacaagttacttgatctctctgcacgaaacaggctcctcaatatccctcgggccgcgcgcagtgttcggatgatcgaagtggtcgatgatcttcagctaatttcacatcaatgtcaggcagggcactggaaacgctcgctctttatcacttcggtcggtctggtatcgctttcgaatgtcggggaagacgagcccttcagaatctcaaaagttagtgacagcctatagatcaaaaggccatcgggcgatggaagcggtcgtagacaaacgatctattgacgcttgctgaatattgcggatgcagctacatctccgcaggcccggatttgttcgcgatgaagattcctgggcatcctctatattcagcggacctcaatagaaatagaaaacgccccacgttcggggcgttttgcaaaggatgctattgctagcgtagccttgcgtcggacaaagtccgcttactaaaacaagttggacaatgaccgcttcgatatacttgaaagttaatttatactagattattggaaaagtcaagcataagatatcaatcatattatgagcctgcccatgttcatccggaagcccgaaggctactatgtcctcggcattgatttaggtgttgcctctgtcggccttgcattgatcgaaacacgatttggggaaatctgccattccagtgttcgtatcttttcagaagggatgacgggaagcgaaaaagactgggagaacggaaaggaagtctccaatgccactgtacgccgcgaagctcgcgggcaacgtaggcagaccgagcgccggaagcgccgaatcaagaaggtcttccatctacttcgctcgtacgattggcttcctgacgtttccggtcccaacattcaggacgcgctcaatgcacttgatctcgaactggcgaatcggtacggacaacatcacaacctcccttatttccttcgggctcgtggtctggacgagaagctgagtctcacggaacttggacgcgccatttatcatctcgcccaacgacgcggctttctttctaatcgaaaactggcaccgaagaaagatgacgatatgggcaaagtctatgccggcattgattctctccgtgaggaagtttccagttctggcaagaggacgcttggtgaatactttgcctcccttgatccggaagagcagaaaatccgtggacgctacacataccgtgacatgtacgtccaggagtttcagcatttgtgggcagctcagcagaaccaccatcctgaagagctaacggcagttcgacaggccactctcttccgggcactcttctttcaacgcccgctcaaagatcaatcccatttgattggccattgtgaccttgaggaaaaagagcaacgagccccgatgtatctgctctcggttcagcgctatcgatttctgacggccttgaataatcttcgactggcagggcccggagcggtttcaagggagatctcagctgatgagcggcaggcgattattgaaaagctaggccagtgtgcaaagctcagttttactgagattcgaaagatgctcggagttcccaaaacttttaaattctccatcgaagagggcggcgaaacaaagattcctgggaatctcaccgcatcgcttatttatggagtctgccctgctctttggaccggattggaccaggcctcaagggatcgccttgtggatgtcctcaagcggctcgaaagtgtggagtcccttgatgatcgggccttagctctcaggaaccattgggatgtcagcgacgacgagatcgacaagcttttgagtttgaaactgccttccgagtacgcctcaatctcgttacgagccatcaatcgcctcttgccgcttctggaagaagggctcacctttgctgctgccaagcatcagctctacccggaaaccgacaattgtcaggtggaatcgttcttacctcaggtcaaggatgtcttccgggagattcgcaacccagctgtcttgcgcagcctctctgagatgcgcaagtgtgtgaatgcctatatccgtcacttcggaaagccggacgagattcacattgaacttgcccgggacctgcgtcgatcgaagggggaccgggctgcgatgacaaaagagattagacagaatgaactggcacgaaagaaggcgtacgccgcactcatagagaatggaattccaaacccatcgcgatgggaggtggagaagtttctgctctgggaagaatgccgacgtgaatgtccgtactcaggtaaggcaatttccttccactcgctctttgtggagcagcagtttgaagtggagcacatcattccatactctcgatgtctcgacgatagtcgcgcaaatcggacccttgcgcatgtggagtacaaccgaatcaaaggaaaccggactccagtagaggcgttttgcgggcgagaggattggcccgaaatgaaagggcgcttcgcccgatttgctcggactgcaaagctgaggcgcttcctgatgacggagacggacgccgcagagttgctcaaagattttacggagcggcaattgaacgacaccaagtacgcctcaaaactggcggcgaaatatctggcccgcctctatggcggcaagagtgatgagactggaatgcgagtgctctcctgcgctgggaaagtgacatccgctctccgccgcgtgtgggatatgaatcgggttctgaatgtcgttcctgagaagtcacgcgacgatcatcgccatcatgcggtggatgcggtcgcgatcgcgctttgtagttcgaaatggatcaaggctctgagtgatgcgagtgcaaagacactgcatcgtcgaccgctgagaagtgccttgctggcggatccgtggccgggattccgagacgacctaaatcagaagatccacgagcaaacacccgttagtcatcggccgaagcggaagcttagtgcggcactccacggagacacgatctatagccggccgcaaatccataacggcaaagccgtgtttcatctgcgcaagccagtcttcaaccttgagtcggaagctgacatcggaaaaatcgtggatccggtgattcgggagtgtgtgcgggaaaagttccttgaagtcgggagagatgccaagcgcttagagcacgatgtccctcgaatgaggagtggcgtgcccattcgaactgtacgtgtgcggcagacctcagtttccgctgtggccctgggaacaggtgcggccaagcgttatgtgaatctgggaggcaatcatcatatggagatgattgcgattctcgatgatgattgcaaagagaccggctatgaggcgtcagtagtttcgtatctggaggcgaatcagaggaagcgacgagccgagcccattgtgaaaagagatcacggactgaatcgccgcttcttgttttcactgagtgcgggggatatcgttcaatacggtagaaatgggcaaacgctgggattctggttggttcgtggcgtcaccacggatcagaaagggcgcctcgatttgtgccggcttactgatgcacgaatcaagtccgaacaagagcgagagagacccaccgcggcggccttcctgaaggctaaggggcgcaaggtcaatattgcacccatcggaacctggacctatgcgaatgactaatcgaattctcgacttctcaaattccgcagcctatcttcatgcacgaggagcaacgctcgaggtggaactgaatggtaaagcttgccattcagttccctttgaggaaattgctgctttggtggtagcgcattctcaagtgaccttttctcagtccgcaatcgcacgtcttgcagaggctggagggatccttgtggtctgcaatgacaggtttatgcctgttgccatgacgatgccaatcgaaagtcactggtatcaggcggaacgattcgtaaaacaggctgctttcacagttccaaagaagaaacgtttatggcagcaaatcgtccgcaagaagatcgagcaccagtcgactgtgttggccggagcgactggaaaagaccatggcttgagtgcaatggttccccgggttttgagcggtgatcctggaaacgtagaagctcaggcctcccggcgatactggtcaaagctcttcagcgacaagcaatttgtgcgagcgaaccctgaagacccgcgtaacgcgcttttaaactacggctatgccgtacttcgggcctctactgcccgagccattgctgcggctggtttacaccccacctttggactgcatcatgcgaacaaactaaatgcctatccacttgccgacgacctgatggagccctttcgtcccatcattgatgcgcaagtgcttcgcattctatcgaacagtgatctttcgctccaactcgtgccgaagacaaagcatgagttgctttcgatcctgacggatcgattctactctgagggagaggggcgaacgctgtttgacatccttgcgaggatggctcaaagcctagctcgagtcatcctggcaagggaatcgaagttcgtaattgggcttgattcgcctctctcgacggatgaggagccttgagcagtgccgctctcggcctataaatccatgtggctctttgctctcttcgacttgcctgtggaatcgaaagagcatcgtcgtcactacgcacagtttcggaagaaacttttggataagggatttacgatgttacagttctctgtttatgcgaagcacttggctagtgaggaggctgctgcctcgctgcgcaccacgattgtttcggcccttccgcccaaaggacaagtgaggattcttggaatcacagaccatcagttcggaaaaatggaaatttatagcggtcgtcagcgcgagaaacgagaagacccaccgatgcaaatctccttattttgagccggccgatcgccgcactcatgcctcagcagctccaaaattgggttccgggacgggaaagccctgcaaaatgaatcatttgcagggcacctagtatatcgaagcggtcattcccaactagccatagctcaccggagaaggttctccacaaagggagaagtatatcgaagcggtcattcccaactagccatagcatgagtacgcggatatcgcgccgtgggcgtagtatatcgaagcggtcattcccaactagccatagcgtatcgcgcgaagatggcgaactgtcatgcagtatatcgaagcggtcattcccaactagccatagcgcggggagacgttaccctgttctcctcggtagtatatcgaagcggtcattcccaactagccatagccgtagccagaagacccatcgcttcggaccagtatatcgaagcggtcattcccaactagccatagcgccaatggctcgttctgcatcatccctgaagtatatcgaagcggtcattcccaactagccatagcttcgagttctctgttgattggtgttctaagagtatatcgaagcggtcattcccaactagccatagctttctggcggggaggtagtacgaacaaatgagtatatcgaagcggtcattcccaactagccatagcagctttgacgctgatagtaagattgcaacagtatatcgaagcggtcattcccaactagccatagccaaggagatctagttcctatcgacgacgtaagtatatcgaagcggtcattcccaactagccatagctgcatacgtcatttctcgcccttcgacgaagtatatcgaagcggtcattcccaactagccatagcatagaagagttcgcctcgaacgtcagcttcagtatatcgaagcggtcattcccaactagccatagccgttgtagccggtatttgtatttagctgaagatctccggacacgagggcttacgggcctcggttgagattcggttacttcatgctgccataggttgcgcctgggcgattttcccatcgaggaaagcctggtatggcgttcggccttgagtccgatatccatgatggggtcgctggcgattgtagaagctcagataggcgtccagatcatcttgtaattcagccacagactgatagatcttttgccggaacttgatgctgtaaaactcctccttgatcgtgcgatggaagcgctcacagaagccgttggattgaggggaagcgatctgcgttctcttgtggcggatctggttaatcgccagatagatctcgaagggatgacgagcttcgagtccacagtactcgcggccattgtcggtgagcaaccgctcgatccccaccttctcatcgtcatagaaggggatgactcgatcattcagtgtgtctgccgcagtgatcggcatcttgctgagatagaccttggcgaaggcttgcgagcagtgtgcgtcaatgaccgtctgcatgtagaccttgccgacgcctttgatcgtgcctacaaagtaagtgtcctggcaaagcagatagccagaatgcggtgcagcgatatgttgttccgggtcaacgtttcggccctgatgcttctgcaggagccgcttggcttgctccgtcagcacgccgccttcggtggcggtcttcttgtccagccagagcaggcgctggagccggagagtgatgccgtgccgtacccagacccctcggacggcgggggcagagacaccgatgccgaccaaacgaagctggtcggcaatgcggatgtaactgtaggtcggatactgcgccgtcatctcgaggatctgcttttcaagctcgggcggagtctgattcggcatccgaggcgtccggcgttgcctcggctcaagcccgtcggctccgtgcttctcgtaggcttccttgatctcgtagaagtggctgcggctgatgccggctcgctggcaggcggccttgatgttgcccagttcctgggcgagttggagcagtccaatgcgcgctttgataagcttctggttgtcgctcatgagtgtgtcctttcggggtgattttggtgttttggaagattccaaatctatcaccgtaaggacccgctcggggcgcttaggggcttcggctccagtcgggctacgccctcccttcgcctcttcccctaagcgccgtttcccatcattgtgtccgctgatcttccgctaatttcacggtattgttggtgtgtttgagtatatcgaagcggtcattcccaactagccatagccgattgagggctaagtgttgctcggttgcaagtatatcgaagcggtcattcccaactagccatagcactctgacattggcaccattcgcagcattagtatatcgaagcggtcattcccaactagccatagccggacgcgtggactcctcgcccagtcgcgagtatatcgaagcggtcattcccaactagccatagcgcttttcgccaaccgctttacggcattccaagtatatcgaagcggtcattcccaactagccatagccagatttgatcctggtaatcacaaccctctagtatatcgaagcggtcattcccaactagccatagcatgccgaacacagaagtattgggaacataaagtatatcgaagcggtcattcccaactagccatagccagatggagcaggcgcagtctgctcggcatagtatatcgaagcggtcattcccaactagccatagcagggtgacaccggcagaagcgggcgaagggagtatatcgaagcggtcattcccaactagccatagccgctcacgtgctggcatggagttgtccaaaagtatatcgaagcggtcattcccaactagccatagcgaagccgctgggggtcccgaaccttgcgaagtatatcaaagcggtcattcccaactagccatagccgcggaggccgaagggggcgccctagcgttgatagatatcgcggcccagaaagcgcctaagccgggtatttttttcaagcgttcttccgcggtcgtacaacttactgtgtggcacatccgagccttgctgctcttcttattctgcagtcggtttcgtagcgtgaatggtgaggcgctctccctggtgcttactactccacgcccctctatcttctcgtaagcacaacatgcgtcgcgtgttccgtggcttggtgctcggtgacagagaaccccagtgccggcaggtcaattccggggaacagtgcctccccttgaccgagggcgaccggggccagtgcaaagtggagcgaatcaatcagtccagcctgcagatactgccgcacggtggaaacaccgcctccgattttgacgtccttgtctcctgctgcttgcttcgcgagccgcaacgcctcttcaattccgccagtgacaaagtagaaggttgtcccgccctccattacgagcggctcacgctcgtagtgtgtcagcacaaaagtcggtgcatggtagggcggattggcgccccaccatcccttccacgaattgtcctgccatgggccacggaccggaccaaacatgttgcggccaaggatgaaagcgccaaagttttccatggcctgctgtgcgaatatctcgtccccatcgaccgatccgccttcctgcccatgcatggcgcggaatgaccgggtatgaaaataccactgaaagatctctggaccacgcttgcccagcggatcctccaggctctgctccatccctgagctgaacccgtccaaagaaacactaaatcccgcgacgcgaacctttgccatggatatcgccctactgtggcgtgtcctgacgccggcgctgctcgcttgcctgaatcatctcgttcagatccgccgcgggacggatttcaaacggtccacacttcactcccggatgttgggaaatgagctgaatggcgtgattcagatctcgtgcctcaatcactagaatcccacccaattgctcctttgtttccgcgtacggaccgtctgtcacagcaaccttgccgttcttccaatacacggtcatcgccgtgctggggggctgaagcgcttcgccagcggcaaagtgtcccttcttccgcagttcgtcgtcgtaggtaaaacactcgtccatcgcggcgttgcgctcgctctccgacatgctctcgagcttgcccggctcgatataccccaaacagatgtatttcatatctggattccctctccctcaatcgttctgctatcagatagtcgttcgggagaccgagaatcgacagcgactctattatttttttagtacaactgccgaagccgctcttcgaggaaggtccgctctggtttctgttgggtgagcgcgagtgccttctgataagaggaccgggcctccgttgtgctgccgagcctgcggcacacatcggcacgcgctgcatgcgccagataataatctgccaattcgccacgtgccaacactgcgtcgatcagcgccagaccggccgctgggccatcccgcattgtaatggctacggcgcgattgagttcgacaaccggcgaaggttgaatttgtaacagccggttgtaaagcgcaacaatctgccgccaatcggtccccgcggccgattccgcctctgcatgaacagcggcaattgcagcctgcagtgtgtaggcgccgaagtggtgggacaccagagctctctccaccagtgccactccttcggcgatctgttcctggttccagagcgagcgatcctggttctccagcaaaatcagctttccgtccggcgatgttctcgcggcgcgacgggagtcctggagcaacatcagggaaagcagcccaaggacttcgggctcgggcagaagtgtgctcagcaagcgccccagccgaatcgcctccctgctgagttcggctcgcgtgagctccgtccccgccgccgctgaataaccctcgttaaagacgagatagataacttgaaggaccgcgtccagccgttgtggcaattcctgcggtgacggcacctcgtagcgaatcggcgtgtctcgaatctttgctttggcgcggacaatgcgctgagccagcgtacgcggcgtgatgaggaaggccttcgcaatctcctcagttgtcagcccgcatacctcacgtaaagtgagcgcaacatgcgcttctggcggtagagagggatgacagcaggtaaagatcaggcggagccgatcatccgcaatgctgctctcttccttggactcttccgccgcactccattgcgcttcgagatgccgcacgaactcgtcttgagacgccacaagacgagcccgtcgacgcaatgtatcaatggctttgaagcgggctgttgaaatcagccagggccgtgggtgatcggggactccatccctcggccactggcacaacgcagccgcaaaggcttcgtgcatcgcttcctcggcaagatcaaaatcaccgagcaaacggatcagagtggccaggatgcatcccgaatccgtgcgataaagagaatcgagcgattcgcgtacctgctccgtagaacgctccgccatgaccacaactttagcaagtcaactatcatgactcagtcggcccgcttgcgactcgctcgctttggctgactcttgagattgagcgccaccgctgcgcggatgagatcctgcaaggccgcctcatggatctggccgttttcgtggacgtcaatggcgcgcctgacattgccttcaaggctggagttgaataggccggaagggtcctccaatgcggctcccttggcaaatgtcagcttgaccaccttcttgtaagtctctcccgtgcagacgatgccgccgtgagaccagacgggagttcccatccacttccactcttcgacgatctcagggtctgccttgtgtatgattgcgcgtacttttgcgagcgtcttcccacgccagtccccaagctgcttgatcttctcgtcgatgcatgcggaggcagattccatcgggatggagcttttcatatggaggtcgaactttcgcacttattctagctgctctttgcgaccaggagcgcatctcattcatggcgcacgcaagatgagagatgggcgtgaggaggtggcggaaacgctgaagtcaggtcatgatccgatggaccttcgcgcggcgtaagcatctagttcgccgcagcggcacaaacaaatgtccgcggaagccatctttctatctgatggattcagtggcgtctctcacgatctgatcgggggcagtgcgcaacagatctttcagagtgctgatgaatctgcgacagctactgatgctcggaacagccgtgctgttgctctctgtgctgcatcgttgccaggactcgtacgcggtatcggtgcagggcaatccctcaccgagaagagagtcaagtctctaaagctgattgagacggaacctatccttctcggtgaaagatcagatcatgatgcggaacccaatcacttgggagtcggttcccgcgcgtttttagaactgcacctgattcataaagtccgtcagatagcgccgccacacgagccaggtatgcgctccttccgtctccacatacttgttggtgatgttctttgtcttcagccattcgacgaaagcctgattgttcttcagcaacccgtcgctggtgccgcaggcgatccagaggagcttgatccgggcgttgtccttgtcacttagagtcgggaaggcctcctccggcttgccgaaaagctgcggggcgctgctcatggcgccgatccaggcgaagcggtcaatgtggcgcaggcccacaaataaagtctccgcaccgcccatcgaaaggccggcaattgcccgttcattcgccttgtcactgaccttgtactgcttctccgcgatgggcagcacttcattcatgaggctcgtctcgaaaccttgcgtatttttgacgaagttgccgccgctgcggactgcgccagcttttagctccttcaccgacattccatagccgagcggcattaccgcgatgaaaggcttcttgccattcgaaatgagacggtcaaagatgagattcgccttgcccaccgtcgtccagccgtcggccagatcgctatagccatggagcaggacgagcagcggatagcgtttggaggcgtcgtagttggggggcgtgtagacgaagaagtcgcgattttctgctgccaccttggagttgaagaagtgatgatggacggtgccgtgtgggatgtcggtgagttcccagggttccggcgtatcgccagggatgaggaacatgtttgaagggttcagcgcgttcgatttcatgtcgccattgattggatcgacggtggagatgccgtcgacccgaaagctatagccatagatatccggacgaagagtgtcgctggttgccgaccagatgcccttctcatccttggtcatggagatgggcttgttgccttcgagggcaacgtcaactttggttgcgttgggggcgcggagattgaaggtgacggtcttgttcgcgtggacgacaggcgagaaaatcggctgcggctggggctgcgcgaggaggaagctggcggtcagggccaacagggttgcgaggcggtgcatggtgcgtaggatatcgaaaagcgcagacgttagggagcggctgagaatacaagggatgacagagcgcaaaaggccattggattctggatctctgctggcccatcggaagcgccgcttggagcggcaaatgccgggtgtcggccgcttcatcccatggtcggatgcgattgctgtggtagatgcgggacgggggacatttcttgctgaagccggagtcttgtctgggttggagcgcctttggtggacagccgagggtattcctgcaacgagtcccgtaccttgctgctccggtagccgatgcgatttgacggcctttcatacgatacagtcgctgcggagcggcaacctctccggcgaaggttttgttcctcactacctgccgcagacgtgcagcatctcggcgcgggtggccaagaatcctgtactcgtcggttcccggaaatttgttgcaagcggtgccgccgagcaggatgccttgcgggactcaagcggcaggacgcgaaattctcccgggtgcccccccaccctcctgcgatccattcattctcgaaatgccagtgcattggggaacgcggcagaccgcttttgagtttgcggttctcgactcgattcgcactgcgatcgaggccgcgctcgcaaaagggcgcatgggcagcagagctcgagcccgggcatcgcctaccagcagttgctcaattctgctgatgatcccgcggcggcgctggtgttgattgtcaacagcatggcgtgcgagaactccggcacttgtctggccatcgtcacagcgattgcggattcgctcgagcggccggcgctctggaagggaatttatgatggatttcgagaaggccggccgacgaagacgggagagctcctcattactggaatcggccgtgtgctacaggaattgcagtttctgaaagctccggggctcgcgatttcgcaatggatcggaaatgagatccggcagcatgcgggagaagcgcagtctgccgaggagtagggcgagatgcttttttttgctgcaagcgtggttgcgatcaagccggggtcagcatcatgaagcggcttcatgtacggcgcattttagctgactgcgatcgagacgcggcgcggctgccagaagcgatctgttacgctgactgcggatgctaaatgttacagttggcccctggacgttggaagttgacgccgaggccac

SEQ ID NO: 2544 - DNA, 13599 bp, synthetic construct
  source 1..13599: mol_type = other DNA
  misc_feature 1..13599: note = Synthetic
tgagtgatttgatggcttgtctgccagagtaagttagtggtaccgatgatcttcggtgagtatgaaaagaaggccaggccttaggaatgcgtctccgtgaaatcatattttgagctttgcagccgatcagctcttcggcattaatgcctcaagggcgattagatagattgtagattgatagcagagattgtacgggagggctggtgggaaaaatgaagtcgctgatcagaaccagcgacttgggaaaaaggaaatacatgattaataaatggatcagtcttgccttagatattggttgagaaatttatagaagacctcttcttcacttaaatcactaccatgcagttgataaacaaactgatgagtagctgcgttgaatacggctacatagttgttgtgagactctgtgtagtacttaattccacggtattcataatgctgtgtcatgagaactccttatggttgatgagtctcttagcttatagaaactataaatttgtcaatttatgggaggagttgagggctacgaaaaggtcaaggaaggaattgcagctgtgttgtccgtttaaaaggtataggctcttatcaaaaaggcctattaggcagtaataggccttggtttaagtgtgttttaggttatgcaatgattggggtaccaagagttggtaactctggcatgcggaggacatgacattgccgttgtaatttacatagtgaggagtcgttatggataaattgactacaactaaaagatgttgtttgggctagtttcaaaatgccgctttttcgtaaatcatgaaatgtgaaatctaaagctaaaccacttttcattcgagcttttctcaacattgtattccattggtaataaaaactgctacgagaatgttgtgcaccacacttacggtgaattaagaagttcgatttaactgtagattcactcagacagtcatgtacgatgttttttagctctattgaccacagtttcaaaaccaagtaactagaattgtaatttgggactgtaaaccctttgtcagtaaggtgtgtttcttggagttcgataatctctttcacccttagtgtaccacgataggctaactctattgctgttctcatttgagtacttgcttcatgataaattacgtcatactcctccttagtaatctctcggtagcgaataggatgagttgtttgttggatcttgttttgaagcataccctgcgaatcaatctttccttttatacggagagcatggaaagaaatatctaactttaaaccacttattttttgggctttctttaaagtttttttccattcgagtaagaagctgaatttattatgcttttcaccattgcctttagtgatcagatagtcagaatttgttgatttgccttgggtacatttatttacagcattccggagttcgtttgaccacagtactatttcataaaaagtacagtaacgacgatagatgtgaatcccttcacttgttagatcaaagagcttgatgttgatcacttcatcgagtcggaataaagcttgagttgccaaaatcatcgcagtttgcatgcttgatgaagcaacactgaaaatcatctcatactcttcattggtgatataataatcatttttcttagcagatttcagatcatatagaagtgtttctcggtcatcagtagcctttgggccataatcccctaaaccttgttgtacgcaatgaagtaaaaagcgcttcttccaattattttcgtaacccatatagtcctcgttggatagttatcatagtcgggaaaagagatgtcttcagcccttgtgtaaaacctatataacggaggtggttgagtgaaaataaggggtaagtaaaaaataggatatatttctttaatttactctcttggtgtttaaattctctaaataggtttctttttttattatgattcgaaataaaattctggataattcgtgttgttttaatgagagttacgacggaaattgaacatcatttcaagcctaagtcgaatgattattcactgagcttaattgaagagtggagttagtcatagcacgtttcccctcccaatgttaaagcaataacagagacattcatcgggccttctgtatagctcaatagagtgatatctgttacacccacggaacccagaagggggagcagttaacactctaggttaagcactcgtgtttgttccagagcacagtaatgtttcgggtagcaaatacgtacctaaagacaaatcggctaatattcatttgtaagcgaaatttgactcatatcaaaaaagtttgcttaatttgaaattaatacatatttagtacgtaaaaatgtttacggggtggcgtactgtgtgtaatattgcttgcagacaaagaaatggggcgtgcagtaggcaggaattttagctctaatcaagtagcttacacacatactctgagcaacttctttgtaattatttaatttaaattcgtacttggtatcttttatgaaaaaactacttctaactcttttaatcgttgcagcagcgccttcaatggctgatgagtacgccgtagcaggtgaacttcacggcacttatctagcatgtgctaaagctgatagcgacaatgcaaaggactttaacaagaaagctgctgctcttaaggtgacgaatatggccaccgcaaataataaacaagaaagcgagtttaatgctgcctcacgtaaagcaagccgttcatctggtttcgctcttaaagctaagtgtaaagcgctgtaaattcgattgggcctgaataggcccatccttcatacatttgagaaaacaacaatgaaaaagctaattctatcttcagcagtcgtggcaactgtactacttactggctgtcaatcaacaggagaacaatacggcgccaatgtgtatgacgcatcagaggtaaatagtactcaggaagctacaacggtaaatatcatcgcagtcatgcctgccaaggtgaaagttgataatactaaggggcagaaaaacgcctctaaagcaggggcacttattggtgcaatcgcaggcggctttattggtgacaatagcggtgaggccggcgtaggtgcagcgattggtggtatcgctggtggtgttactggctcaatggtcgacaaagagattcttattgatggtgtgagccttacttacgcacatgatggtaagacacttaacgctattcaagttgccaaggcatgccaattcaagcctggtattgcggtaatggtttctactgatagtggtgatgcaaggttacagccgaatacgacttgtcctgtggagaagtaagcaatgtggaaaatagtcattgccttagccgttgttctatccgttccggtacaagctctatcgcttgaagagcagatcgccaatgttgctcatgtagaaaaccagcaggaagcccaacgcttatctgagcaacgagctatggagaaggcaaaacgtgaagctgctcaactggctgcaaaaatagaggctgataaacgtcgaagtgcagaagctgtagcacgtaagaaggctgaagagcgtaagagggcccaagctgttgcaaatcagaaaaaagcagaggccgctcagctggaattacttgagcgtatgcgtgctgaagatgagcgtctagctgataagaagcgtgatcaagattacgaagatcttaaacgaatgattgagattgaggaacttcgtgcagagttagctatgaagaaggcaaaggctcaacgtgctgatgagtacattgaccgcgatcttgagcgtcaggacgtttcaattgagggccatagagctcgtaatgacgtgactcagtcagaagctgacgcaacgcgagttctggcggacggtgcttctgagctaatgaaaaaagaaggtgaagcacgagttgaagctaattctggattatttaattgactttattgccgtacttttcacgaagtaccccaaatggtgaaagttgttatatagctgcatgatgcacactaaaatgcagtgtgcaaagccatatgattaaacgttgaactttatatacatagcgttctgaaggttaataatacggagctaaaatgcctgaaactatatttgaaacactacctctaatgcctttggttgctgtagctggtttgctattcattgcactcataattgttattgcaaaactgaactcgacaaagaagcaactttcttccacaaaagaagaggtaaccaatacaaatcaagtactcgctgattatagaaaaaaatatgcgggaataatcaacattgatgaagaagtcaaactaagacaaaagcaactttctgaacgtcaaaaagaagctgaacagaagtatgctttaactgacaaggatatcaaagagcttcaatcccaatataagcaaaagaaaactatctttgactctctcgtctatcaagtgggtatttataacgatgacgttgagttactcgaactaggcttttatgaatcccactttgactttgaaacatcagaagatttcaaagacgaaatccgtgagtgtaaagctgagcaaaaagaactacttcgtgataaggacatgggtggggctatttactgtacgacggagtggacggttggcgactcaaaggctgaaggtcgtaaaatgaccaatcggggtatccggctcacggccagagcgttcaataatgagtgtgaagccgccattgctaactgtacttggaaaaatgtggtcaagatggaagcccgcatagaaaaagcatttcaagctatcaataagctcaatgaatccaataaaatcgttatctcgagagagtacctgaagttaaaactcaaggagctccgtctaactcatgagtacaaagagaaaaaacaacgtgagaaagaggagcaagctgaaatcaaggctcaaatgcgtgaagaagcaagaatagaggcggaaattaagaaagcagagcaagaagctatcaaggaagaagcccgctaccagaaagcactcaatgctgtacagaaacaattagaatctgctagtgaagaggctaaagctaaattggaagctcaaattgcacagcttgagtcagacttggaactagccgagcaaaagcataaacgagcacagagtatggctgagcaaaccaaacaaggtcatgtgtacgtgataagcaatattggctcttttggagaggatgtttataaaattggtatgacacgtcgactagaaccattggatagagtcaaagaacttggcgatgcatctgtaccctttagctttgatgttcatgcgatgatacatacaaaagatgcaccttctttagagaaagaactacaccgtcagttcgacaataaacgactcaatatggttaatcgtcgtaaagagttcttcaatgttggtctaaaagagataaaagaagctgttgaggcatattctgaggagcaggttgaattcattgaaacagctgttgctcaagattaccatgagacgaaggccatgaaaaagcaggctgaagttaaaatggctatgcgttcaggtcaatccgttactgacagtgactctaaagtccctctgttcgcagagtcaatttaaaggttagtttttatgcaacaactcaaattcggaaagatcaaaaattacaaagacgatcgcggcttcggtttcatcttctcggaatgcaaattcattcacgatgttatcatgggttctaaagaagtgttctttcacatcaaacaggctaagcagtttgagtccgtattgaagactactaagcctcaagaagatctatgcttctggttcattacagtgaccactcgtaaaggcgaggctgttaggcagatgtggagcaagctatccgatatccctcaagatattcgtgaaggtaacgtcgagttcattaatcaagtggcggagaacattaagacctatgaagcagctaaagcagaaaaacgtgctcgtgcggctgttcagcaagaggctcttcgtaaagctcgtgagactcgtgattctgaacttaacgctctgatagtagatgctcgtagccaagggttttcaacgagcggacagttgtcagcatggattcgcgctaataagctgtggactacatatccgacactaacaggcgacttgacgatgcacgatggcgaggagtcttggaactttggggcagctattgaccctcagtactacaagcaggtttgccaagctctaggtctacataacgcaggttccaacgcaagggctggaactttccgttcgtatgcaagtatggaaagttaatgtacggaagaacgcgagatcatagcaatgtcacaaacaaattagacagttgttgttgtgatgttaatcacgtggttaaggcgattgaactgaacagggcagcacaacctcatcgatcccagtgcccccactcatttatgccccaaaatcagttagaccaaatgctctatgtaggtcactcagcctttattttccatacttttgctaatgccatcacagctagttgattgacttgaatgtaaagtggcgcatgctgttgtgatacgttaataggcgcatataactttcataacgagagaaatggcgagtatcctgctataggctgcaacaagttactacaaggagtaaataaattggaaattagtgcaactgcatcattctggataggtgctattggtacccttgttggcctcatcagtgcaggaatcgctatttatcagtgtgctgtaatcaacgaaagcaacaaaagaaagagtgaacttcagtaccttcttgctggcattaataacgcggctattcaaaaacaaatggcatggcaaaaccaattaaacactctggcaaaacttgagtcagcccatgattgggaaatggggcgtctttatttaagggcaagggatgatctaggagagatcgctagcctaacagttgcgctagaagggaccattgacacagataactctgcgattgaagcaatgatggataagtcaataagtttggtacaaaaaaataacctgctacaagaagaaggcctcaaaaacccaacggtaaacccaaagtctgaaacagcaaatgggcaccaacaaggcgcttaacggtaaaccaaaacgcttggtattttgcctgaccacaggatagccaaggttttgggtatattaactttgccttaggtataatggagtttagagtaatatgtttgcaattggtcaacttgaagactgctatattcaagtctcaaatcctaggaaatagaaagctgaaggtttctatcaagccgatttccagaaccttcacagctaacagtccgtaacttggatgtgccacttctccgttgagtgcaaatattcatatccttttgatgagagctttcattagttaaagttatctgaattatgcagtgctgtgaagttgcacgctgggttcttaggagagcggcaccaggtaacaggtgacgctcatttgaccatttcttgtttcagacctattgaatcacacttcattaactcgtaattgacgtactataactaatccttgtacccttcaatattatgcgcttatctggggtaaagtcattgaagttaaagaatattgtcaggaacaagtactattcaattgtactcgatgtactaaataaaaagttagccccagaaaccattccaagaactggagaggaagcttaacaagtagattgcgtagcggcatacttcagagcaaaagacggttcctactcactactaattgataaagttttaccgaatggtgtagaaggcaggctttggaaggggagagatgaaggtcgtacagataactctttcgttgactacagtgagtttcccaaagctaacatcgaaataactcacttttacaaaacttataaccttacctacgactcaacaatacagatgatctataaaggttggagtcactattacaaagttctgattttactgggaaaggctcaacaattcctttttaaaaaaaggaagttaacttgctgtgaaaacttgagatcttaagagctattgtagacaaggccgtagaaagctcaggctttagcatatccccagtgatgctaaacgaactaaaggaaagtgtgacatcacaggggcatcaagcaagggcattctcgtccctcaatatccactgattagaaggccctacccaatacaaagcgcaatttacataataaagagaacaaactcgggtttgttcaactctaaataaatctgtcggatgtgcgacagctattcttatttgttataagccaagtctgaaccgtttcaaaagttatatttactcccacccagtactatgaaaattgaaagtaacactatatttttaactttacgttatgcatatgttgtgatgtaagaaaaactacggaatattagtggcttataattcattgcaaagcactaaaaaagggcgtgtaccgaggtgcacacccttaaaaacttccaaagaagttttattttttgctatcaactaattgccgatagtccccaccatcggaataactgctaacaacttatcaacaactataatatagctgactttcgtcaataatctaatagtgcactgtcgcacccggtgagcgctgacagtttacctgcaattgacctggagaagttttttgactgattatgtgttaggtcttgatattggtacgacttcttgctctgcagttgcagttgcggttgacgaggacatgaacccggtagggattctaggtgatcgtacgcgaatattcagcccaccttatacccatgaaaagtcaggctttataagtaaaactgcaacgagacgacaacataagaagcaacgtcggcagattgatcgccgtgcgtaccgcaaactctcattagtgaaatggctagaggcgaataatatcactaccagcaccgatatggccgcagtatgttgtacaccaaaacttcgtgccatggcagcagaagagaaaatctcattaccagagctaggtgttgtcctactacgtatcgctaaacaccgtggatacaaagggacattaagcaatgcagatggagttgtaagtaagcaaaatcaggccttacaaactcatctggacgatttagaaatctctaatccgactatcggacaacttctttatcattttaataagcaaggttgttctactcttttggtgaagcatggccttgcagcacttcgcgagcaatatgaggatgaggtaaggcagataatggctgtgcagtgccgtcattatccccagttgaatgggttaactaaacctctggtaaagcatcttttttttcagaatccacttcaaccaacggaacaacttgttgggcaatgcggcattgatgcactgcaccaaagggcactggttgcgtcatccgaataccaggcttatcgaatatgtaaaacagccagagatttacgttgggtttttggtaaaaacaaggtcaagctctcagctattcagcgtgatgcaatcattcaattactccaaacaccggaagctttgtccgaatctggaaaaatcacttacgcggaaatacggcagcatctcgaccaaagagggctaagcgaaggttttagtggatatcatttctcccatgagcgcagtaaaacaagcgcctgcattggcgataccacgctaaaagcattagacaaactcggattgctaactcaatggcaacacttaagccaaaacaatatgaaccgagtgcttcgtttgctatctgacgatacattccaccaattagcagacgacgctacaaatgttagggattatctcagtaagacgaagccttatgcaaaattagcttataaggatcattcagaatggcaagggttactggactttgtcttgcagctgatagctgtgatacccaacccgactttgcgtaactgcgggcttgaaagtggtcgaggctcctactgtacaaaagtgctctctagcctcacaaattacctactcatgtatcctgatgagccagagcgccatgctgaagcctatctgaaataccagttattcgaatgcagcgagggagttgagcaacaagagatcgaagagcattggcaagagctaaaggcaataaaacaacaagaccacaacgatttactgcgttatgtggaggagttaattgaacaaagtaaaacgaaatggtctacatggaaagattatccgctacctgtccgcactggaaacccagttgtagaccgagcgctgagacaaactgggtatgtcgttagatctatgctagcccagtttggtcaaccgaagcgcatcataatagaaaccgttcgagaacttagtttcagcctgaaacaacgagacgcatgggagcaacgccagcaagcgaatgaaaggctaaataatgcagctagccgagcattgatagaaagaaacgaacaggctagcccaagaaacatcaaacgtttcaaattatggcaagaacagcgttttaactgcccatactgccctcggccaatatcgtttgaagaggcactaaatggcagccaaaccaactttgaacatatccaatcaaaacgtgaaactggtattggtttgcaaatgcatgagctggcactcgctcaccgtgattgtaatcaactcaaaggtgaccggtggcctatgacagcttttgcctctgatgctcaacgaatgaaagcactgcatgacatgatcgagcattttcgggctaacactggaagttggtatagtaaacataaagcagacctacttgcatttgagcctttaggtgacttggttcgcccagaagtgcatgatgacagtgttacttgggccaaggctcaaatgcaggcgacaggttggatagcaagagccctcaaccaatggcttcgtcccagtaaaatacaactgtttttcactaaaggcagcctcaccaacaaattacgtaatgcctgggggctgggtgacgtaattcccaaggtgcgcatctctgaaggtcgagcagtttggaaagtcattaccgacaaaagcggtaataatgtgaatgcacttattactaatgatgagtttgaggaacaccttaaagcaaaacagcgcttgcgatccagcaaactattcaaccatgatggaaatgaaagtaagatccttcggatagataaacgtgtcgatcaccggcaccatgcaattgacgcactagttgtagctctaagttcacctagtctatatcaggcttaccgcaaagcgacactgtttaagaaggcctttaaacctgggctaccctatagcagctttctcgctgatgctgaggagctcgtgataggctgcaatctgcatcatacgcctgataaaaatccaccaaaagaattttttaaggaagagccttgtgccgttgtgggggattaccttgctcatcgtaaaccagtacgattttttgctgacgcgaagaatattcaggacctggaaaaaaaactagaaataatagtttcagaacgcacccgtgagttgttttatcaacatatcgcttcacgctgtcgccaacttaaataccctctagatgctgagacaagattgccagtagggctcaccaaagcacaaatatcttctttgtttactgtcgaagggacagctgaaaacagtcagtatggtgtcgttgacacgagctatggaaatcaaaatctgattaagcatgcacaatgctatcgtatgacgggtgcatataaggctaaagccgccagtgcttacattatccaaaccaaacaaaatgaccagtggcataaacatgcttggcaagtcgacaaaaatgcatgcctacttttcgatagagataacataaaccagagcaaagttcttacttgtattgaatatcactctatgaagacaccacctcatgatcgctgtgtgttcattggagatacggttactttcgatggtcgagatatgctggtgcaccagctatcagcatttgataacaacatgctcgttgttgatactgtagaagcatcatgcatggaagaattgaatcgatgtaaaggaacccggtctgcacctgtgaaagttggcaaaacaaggtttaaggatctggttcgaaaatgagtcataatcaggtgattatcattgagcagcccacctatatacacttaaaggatagctgcataatcttcgagcaatatcgccaaattgttgcgcgggtattaccagaggacatagattgcttgatactgcactataccagcacaattactgctagtgcgctggcagcactggctgaaagcaaagcaactgtcacctttttagacaagcagcaattacccctcgctcattggcatccacccaactccagacataactataaaaagcgactacgtaatttgctaaccttgtcagaatccccattgggagcacggctatggcaacgaatagtaaaggcaaaaattcgttcacaagctgaaaccttaaagcttagcaatatcagagaagcgaaaccgctagctacgatgatactgaaagtaacacccggcgattcgactcacattcaagcacaagcggctcgaatatactggtccgcactgtttggaaaaaaatttcgtcgtcataagcgtgatagcagcgaaccagtcaatcaacaccttaattttggttatgccatcatcagaagcctgcttgctaagtggttatgtgggcgtgctatcgcccttgaatggggtttacatcacgcgaatcaggaaaacccaatgtgcttggtcgatgatttaatggaaccattccgttttgtagttgatcgtgcagtagctcaaaacttgttactttgtgaacgtgagattagccctactagtaagaaagccatgctggcggatatttacaagccgctgcaggtaaggcaaaaacaatttagacttgcaacggctgctgacgccacttgttcatcattaggtcgaatactagatcgaccaagcaaagcagcagcaagttggctaactctaccctatacctaggtactaagctatgactagcagcggatggcgagctatgtggatatttgtagtgtacgactgcccaatgacaaattcagagcggcgtcatggttaccaagtgtttcataattatttgctgaagcgtaattttttacagtggcagaactcactatatgcaaagcatttcgctacaagggagtcagcttatgctgagcgtaaacgtattgagcaggtgatccctgaagacgcaaaagtagcctttatttatcttactgacaaacaatttggaatgatcgatgtattttatggtgaagctaaaacgccaaagccgcaagatgcgccagagcagttccttttgctgtaaggaaaaacctcaccaactcaggtgattggaacgttgatattctaacagtcattccgatggtggggtatcggaacgaagatattcagttggatgtcgatgcgaccattctaacagtcattccgatggtggggtatcggaacccttctggcgctgtaggccgtgctatcaatattctaacagtcattccgatggtggggtatcggaacaggcgggtttgcagctcgatcccacttaacaattctaacagtcattccgatggtggggtatcggaacaggcgatgatatcgtggcgtacatcttaccattctaacagtcattccgatggtggggtatc

SEQ ID NO: 2545 - DNA, 4920 bp, synthetic construct
  source 1..4920: mol_type = other DNA
  misc_feature 1..4920: note = Synthetic
ggtgatactctccggcggcgacgaacgccgcgcccttgccgtacctctgcttcagttgaaaccccaacacgccgcagtagaagtcgagcgcccgcttcagatccgcgaccttcaggtgcacgtggccgatgacgacgtcggggtggatcggttcggatgtcatggcgctatgctactcgggacggggaggcgaacctcaaagaagggagccacggctcattcgtgccgtggctcaagccttctcgtgcagtcacccacacggcttgtcatgcttaccgcaccttgcggtgcgtagcctgcgagatctctgatctcttgtcagagacaacgacaggctcctatcaggtacgatagagatgctacctggagttggcgatggatgtcaagagggtactcgggcttgatctcggggagggttcggtcggttgggctctcctggaaattggggaggacggctggccggtcgcgatacaggctggcgcccggatcttctcgccggtgataaaccccaagaacaaaaccccgctgaatcgggagaggcgggccaagcgcggggcacggcggaaccgggagcgtagaaggcgacgactggcgaagctccacaacaccctggtcggagcgggcctgctgccggcggaccccaaggaacggatgcgcgtgctgggcggtgcggaggcatcggcggacgcgcggtggctggacccatacgccttgcgcgccaaggcgctggacgaacccttagaaccgtttgaactcgggcgcgtcttagctcacttagcccagcgccgagggttcctgagcaacaagaagacacgacttgtagaactgatggaggcggacgggaatcgcaacatccttgcagaggaagagaacgtccaggaggagcaggacgaggcggccaccgccgaagagaggaaggaaacgtccgagacccttcaggccatcagcgacctgcaggcggccattgcggcgaacggctgtcgaaccctcggcgagtatctgcatggggcaaaggaatccggtgagaaggtccgctgccgtcgaaccagccgcagcatgtatgtcgaggaactggacgccatttggagcgcgcaacgcccgtttcacgagggcgccctcacaaacgaactgtacgatgctgtgtacaaagccgtcttccaccagcgaccgctacgcggcgcccgctccaagcaaccccgcaaacagtggccgcgcggggaggaggcgcggaagatgtaccgtcgcttgaggggcaactgcccgcactacccggacaggccggtcgcccgccaggggcactgggtctcgcagcggtttcgcatcttgcaagaccttcgcaacctggagctgctggacaactcgacgggcgaggttcgcaggctcaccgatgaggaagtggcgacgattgcccagaaggcccaggaacgtgagaagatgacgtgggcgggggtgagaaaggagattggctatgggggcagcaagggcaagttcgtcaacttcgaaggccgcgagggcgcgaagaaggagctcaagggaaacagcacagagaggttcctgaagcaagtactcggcgacaagtgggactcgtcgcttgttcttgacccagatgtcgagcgccggcaactcgaccttatgcacgacatcgaaacggcgccaaacaaactgacgctggttaagaacctgcagaagccaaaaccgtccaacccgatctacccgctttcgcgcgagcaggcgatcgcgatagctgggaaaaacttcggagaccgaacggtcgcgtttagcgttcgggcgatgcggcggatgtacaagctcatgctcagtgaaggccgggactactttgcggcgcgcaaggaggcgttcgcccacggtgaagaatcggacgcgcaagttgtgcgtgagacgctcgacgtgccgcccgacgtgccaaatccacgcattcagagggcgctcttcgaaacccgaaaggtcgtcaacgcaatcatcgagcagttcggaaagccagacgaaatcatcgttgaattggcgagggagatgcgcgagtcggaggcagaccgaaagaagcgattgaaggcgatcaagcgcaacgagggcgaaaacgatgccgctcgcgagttctacaagcgccatggaatcgagcacccgaaccgcgagcagattcgccggtacaagctctggaaagaacagaacgagacatgcccttacaccggccggagcatttccgtcgcggaacttctcagcgaggccacagaagtggatcacctccttccgctgcctctttcggcagacgattccttctcgaacctggtgctgacgcaccgggacaccaaccgcgacaaagacaaccggctcctctgcgagtggctgaatgaggaacagtacgccgaggcgatacggcggatcgaagcaagcggaaaccgggcgcgcgcaaagcgggcgaggatgaaggagatcccggaggggttcgccgaaggccagatcgtcaccacggcgtacctctcacgccttgcaggcgagtacctgaagacgctgggtgtgcccgtccaagtaaccaacggtcgggcaacctcaatccttcgccggtggatggggctgaacggcttgctgccacttcgcgagacgaagaagaagctgccggaaagcgagaagaaccgcctggaccatcggcaccacgccgtggatgcggtggtcgtcgccctcaccgaccggagtcggtacatacaagcgctgagggatttccgcaagattgcgtccctcgatgaagccgagcgagcgccggaagcgttgcgccatatggtccaaggtgtcgttgactcgatgatcgcctcgcacgatgtggacaaggggatccggggcgcgttgcatgaagagacctacttcgggcgcgtggaatacaagggagaggagcactacgtcaagcgagcgttcattcgcgatctcgtatcgaaggggagcctcgaggacacgctgaagcaagtccagaagatcgtggacgacgatctgaggcagcgcgtcgagaagcacttcagggcgtttgggaatcgtgtggcagacgcaatcgcagaggacggcacgatcaccgtcgaagatggggccggtaacgacatgcggattgagagcgtgcgcatccgcgagcgccgcaccactaagttgcatgacttcaaggacggccgttacgcagtttacggcaacaaccaccacatcgaaatcgtgagacggaaggacggaacgctgggagcccgcgccgtaacgatgctcgaggcagctcgctacgcccggccgccgaatcgcagaagtccgtacggattgaccgtgagagatggtgaggaattggtgatgtgcctcgctgagaacgagatggtgcgcctcgccgacgggcgtgtgtaccgagtggccggcaccagttctaccagcggcttcgaaatcaccctccgcgatccgaacgatgcccgcacaggcagcgagaagggcagagatcgaatcacctcgccgaggcgcctcacagagatccagggggtggtccgcgtgagcgtgctggggcacattcaggatgggacaccggatcgttgagataggctccgcggcattcttgcggaagagtttggatcggcttgagatccgccgaaacggcgaactgcttgacagcatccccttcgaggacctcgcggtcgtgctgctggatggcgacggcatagccctcacggcggacgtgcttgcagccttttcgcaagccggagccgtgtgcgcggtgtcggacgagcgccaccttccctgcttgctctgcctgccttacgagaacaacgcacggcacgcccggacggttcagcagcaggcagcctgctccgaagcgaagcgcaacggcatttggcgtcagatcgtgcgagccaagatccgcgaacaggccttggccgtcgaggtggacggtaatccgagaggcgcaaccacgcttcggcaaatggcggacagagtcaagagcggcgatccggacaacgtggaagcgcaagccgccatcctctacttcgatctgttctttgggccgggcttctatcgggatcgggcggcgccggggatgaacgcaatgctcaactacagttacgcagtcctccgagcgatgatggctcgcgccctcgtcggcgcggggctgcacccagcgctcggcatccatcaccacgccgcgtacaacgcgttcaaccttgccgacgacgccatggagcctctccgcccgatggcggacctgggtgtcgtggaggtgtccgagcagttcccagccgcgagagaattgacgccggagatcaagaagagcctgttacaaattacggttttgcctgttaggtttgctggaaacacccttccgatcttgaccgctttggagcgttatgcggctacactaagggaggtgatatgcggcgcaaaaagaagactggaaacgcccggcctcagccgataagcccgtacagagagatgtggcttctggttatgtttgatctgcctgtcgtgacccacgagggacgcaaggagtaccgcaagttcagagagcgcctcctccgcggcggctttctgcaattgcaatacagcgtctacgctcgcccatgcccgagcgacgagaacgcgcaggtgcaccgggagcgcgtgaagaagcaccttccgcctgccggcagcgtccgcatggtcatgatgaccgacaagcagttcgagcggatggagaatttcttgggcaaaaccgaggttccgagcgaaaaacagcccgagcaactgacgttcttctgaacttatttgcgcgcgaaccgaactcggttccagccgagttcggttcgacacgttgtacctgataggagcctgtccgccgtctccgaccaagtgcttgtaggcccgctccggcgtccgttgtacctgataggagcctgtccgccgtctccgacgcga

SEQ ID NO: 2546 - DNA, 15479 bp, synthetic construct
  misc_feature 1..15479: note = Synthetic
  source 1..15479: mol_type = other DNA
cttacctgattgtccgtaaccatctggatctccttggcataaggaaaatccagatagcctaccggctctcaaactgaaccggtaattctaattgtcgttgaacggtaagaataattgtcgctgatcagtctaatcaagcaagcgtgcaaagggctattatttactataaatttatagtcatttttgcgaacaaatactacatatatatagtagaaactgacgataactactacatatatgtagttaaatattcgcgttcaagacaaataggtgaaacatgaaatcgaaacagaagaaacttgtcagggcacaacttgatgagactttgagacgttttgagcccctgaaaacagtgggcacccccagaaaagggtggattcgtgccattcgagatgcacttgggatgacaggagaacagcttgcaaaacgtctgaatgtgaatcaaaagcgtgttgctcgtattgagcaggacgaaaagctgggaaaggtcacactcaatacagtgcaaagcacagctaatgctttggattgtatatttgtttatggttttgtgcccagaaccagcttggagcaaacggtaagaaatcaagcgaaattagtagctgaaaaacgcacagctcgcagtaatcaaatgatgcgattggaaaggcaggaacttgggcaaaaggaaaaagaaaaagcactaagagacctaatcacagagatcactgatacaatgcccaaatcattatgggatgaaagatgattgagtttgactatccagaaggagcaacaccattgaatgcccatgaggtagaagggcttttgcctacgcatatcactacacaagctgaactcgacagatgggaacaggacaatatcaatgaggctttggcatggatagaaggacataaacctaaagctctcctgactgagtcctttatgaagctattgcatcagaaaatgttctgtaatgtgtggaaatgggcaggcaagtttagacaaagcgaaaaaaatattggagtctcctggtacaacatatctgtcgagttgaaaactttgtgtgatgatgttaaatactggatagaaaataagactttttcggaggatgaaatagcagctcgttttcatcatcggctggtatcaatacatttatttccgaatggcaatggtagacatgccaggttggcagccgaccttctgtcagaaaatgtcctatacaaacctccttttacatggggaagtgccaatctcgtaagatcgggtgatgatagaaagaaatatattgaatcactcgtcgccgccgatagaggtgaatatgaacaactattagaatttgtaagatcataatctctcacaacattccggttagccgatgacctggcggacaaagaggccagagcacagatcaaggaattgaggaagctctgtgactcgataatcaaaccgtcctgatttatggcagtatcgtgctgcttcccattctactactcgtgcggacacacaaaacactactggggaaaacagaggataactcactcagtccccaaatcttcataaatcctcctgaattactctaatgccacttcgaggttcttgaacggacagacaggtaggtactacagtcctttttatgtaagtggttcgacgtattttggccatgaaacctcatatccggcggtatttgtatttgaagatgtgctgtatcgctgggaggaaggtttgacacaagcccgactatggtgtattctaactctggccctaagaaggaacaccccagcgagcattcttggaacacccgttggggcgttgtccgcgtgttttcacacttgttatgacaagcacgcgaggaacggcacaaaaaaaccgcaggacgtgggttacacgcgctacggtggtcgcccgaaggcggtgcctacgaatttttcatcttacatcttattgtggaaaacccacagacacggatcagttacaatgattgtaattgtagccagaggagaatagaaatcaagagaaaaaatactttggagaggaaaaaatgcacttaaccacactcggattagacatcggaagcaactcggtcggctcagcttggattgatttgaaaaataaacgtatcaaactgggaggtagtgtttttcctgccggggtagaggactcggataccaagcgtggagcaccgaaaaatcaagcaaggcgagggtatcggagtcaggcgagaatcacgaaaaggcgtgcggagcggaaacatcagatgcggcgcttcctgcttgagaggggttggatgcccagtgaaaaggagcaggaggcgaagtggcttgaaaagagtgacccgtggatactcaggaaggaaggattagagcgggaacttactgagcatgagttcggtcgcgtgttactgcacatgtcgcagcgcaggggtgcctatggttttgatattgatgaggagaacgaggatgcgggtaaggtcaaggacgccataaaccagacgcagaaaacgatggagcagtacaaagtgcgaacatttggagagttgatggcaatcaaactcaaagagcgaaggacagaagttggcaggaagcataagaagattgcggcaccaattcggaaccggacaaaggcgtcgggtgaagggacgtatgagttttgtgcggaccgctctatgatttgggaggagttccataagctttgggaaatgcaaaagtcgttcacaggagagttagcaaagcagcttacggatgaagacaggaaagctttagatgattcagagggggatgcgacatggcgatgcaagggaatactgttcggccagcggaagacatactgggatgttgggactatggctcggtgtgatctggagccaacagatatgaaatgcccgaaggcggatatgtatgcacaggattttctggttttggaaacagtgaacaacataaggattacaccgagaggagaactcaaacgcccattagaagaagaagaaaggaaggaggtaattgcggtgctggagaagcagaagaccgcaagtgaggggacagtacgaaaggcgctggggattgacaggggtgtaaagaagaccatgtacacactaagcttggagaaagaccccaagcgaggattgaacaccaattggttcaagagagaaattgttactgcaatcggaagagaagaatgggcaaagtttgacgcgaaaaaacagcagtcaataaacaaagcaatcctgaagtttgatccgcaattgaaaaaggatcagcagcgattgagagaaggttgctttagatggtgggaattcaaagacgagcaaacagagaaattcattgaagcgtggagggaacgccctaaagttgatacccggattaactattcaagaaaggcgataataaatctgctaccttacatgcgtgagggttttaccgtgaatgaggcgaggaaccgatttgctgaggatgcagagaatggggcaagtgatgcacagcgacagcgttattcgtttggcgcgagggcaggaaacaggagagtgcgacattatatgcagaagcatccagaattgctgccaccagcacctgaaaatatcagcaatcccgttgtgcgaagagccattcacgaggttcgccgccacattcaagcatatatccacgagtttggatgtaagccaaaacgggtggtagttgagttggcgcgcgaggcaaggcagagcgagtatgtgcgtaacaggcagttgtccgaaaatcgcaagcgagaggagaaacgtaaggaaattattgagaagttcgatttggcaggagagacaaagacgcaacaggccaaggcggtcaaacgggtgttacttagcagggagcagaagtattggtgtgcatattgcgacaacaacagggatacaataagtgaagagttagcagcgagtggggaaggcgttgagcttgaccatatagttccggaaagtcgtggtggaaacagctacttgagcaatctggtgctatgtcacagcgagtgcaatcggggcaagggcaacagaacgccgaaggaatggttgacagtcgaggagtttgtacggcttgagcaaaggctaaaacatcttgaaagggacaacaaggttaagtgggataatcttcacgaagaggttcccgatttagatggatttgttgaatcgcagttgacagataccgcatacgcagcgcgacaggttgtggcatggttggagaggaccttgtacggagataagaatgacggcaagcggcgtgtttttacgacgaagggacgatacacggccatattgcgtcgtgactgggggctgcttccggacaaaacgggtggaggggataaggagggaaagaatcgtgcagatcatcggcatcatgcgatagatgcggtaataattgcactaagcgggccggagcggctaagccagcttgcgaaggcagcagaagcagttgaaaaggaggaagtagcgaggagagaaccgatagtcgtaccgtgggggaacttcgattcattcagggcggatgtgatgaaagagtggaagaaactggttgtttcacacaggccggagagaaggaagatagcggggtcactgcataaagatactcagtttgggccggtagttgataagaatggacgtctgacaggtgagttcacgatacggaaatttgcgatgagtctaaagccaagtcatctgcgagttccaaagggatgggaagagttgcgggcgaaactggacagatgtacaacaaaaagacagaggagaaaaatccgtgcgaggatgcttgcactaccggacgtaagtggaggcaaatccggccttatacgtgaccggtggttccgtgaagagttgaggaatgctttgaggcgagagggcttaaaccctgacagtttcaccgacacacaaatgaagatgctggtcaagaacaaggggctgatactggatagtggggtaccaattaggcgtgtaacgcttgttagaaggccaacgattgttgagataaaacgtaagcgatggaatccaagtacagggaagatggaatatgttgagaatgtacgatcaagacgatattacgaaccacagaacaatcaccatgtcgagattcgtgagaataacaaaggtagatggattggccaaccagtaactaacttcgatgcctcgaaacgggtgaggccatcaaagatttccggaaacaaaactcagtcggctgtcaatcgtggggatacgaaagatggaaagttcataatgtcactatcaattggtgaaatggtctatatgaagcatccagaaacgggaatagcggactacttcgtagtcttcaaaatagatggaaacggatatatacattttacgccacatacggatgcagggcgagccaaagagacggataaattcccagcaagggaagatattcgcctattggcggcacagttgcagacgcttgatgcacaagagggaaaagggccacagaaggtgtggatcgggccgttgggggaccagaagattctggccagagattagaaaagtaacatcccgaatttgccgatgattattgaataggcggcaggttcgggagagtcagatgattaagcggattgtcgaaatatcgtcggcaaggacgtgtttatcaattcattacggacaattgctgttaaaacaagacggccagcaggtctcaagcattccctgcgaggacatcggggtacttctggtcgatcatcagggcacgtcatattcacacgccgttttcactgaacttctcaagcatggtgcggctgtagtcctgtgcggaggcagtcatcacccagcgggaatgctcttgcccatcgagagcaacaccgttcagacggagagatttcgcctgcaaatagaagcaaaggagccagtaaagaaacggctatggaagcaaatagtgcaagcaaagatcaggcatcaggcggaagttgtgggtagagatagtgatgtgtatgaatctctgatgacgttgaaggcgagggtgcgcagcggtgatcccaacaatatcgaggcgcaagcgagcagaaagttctggcctgtgtatttgcaggatgtcacctttcgcagagatattagcggctcaccaccgaacaacatgctcaactacggatacatggtaatgcgtgcagcagttgcacgggctctatgctctgccggtcttctaccatcattaggcattcatcatcggaaccgctataacgccttttgcttagcggatgatctcgttgagccgttcaggggatttgttgactcgaaagtgagggacatctttcaagatagcgggccggtggatgagcttgaccaggcgaccaaggcaaagctgctggaggtcttgtacgaggaggtgagcatagcgggattcaaaggtccgttaatggtcggcctgcaccggacggcggcatcattgcagcgttgttatgctggcgagcagaggtttgtggatttgcctaagatatgattctgagcgggtacagagcggtgtggatttttgcaatgttcgacttgccgacagatacgaaaaaggcgagaaaagactatacgcattttcgcaaaaacctcttgaaaaacggctttagcatgttacaatactcagtgtatgtcagacattgtgcgagtgaggagaatgccgatgttcaccacggaagaatcaagaatttcctgcctcccgatggggaagttcgactcatcaccatcacagacaaacagttcgggcgaatgcagactttttgggggaaaatgcgcaaacccacgcctccggcccctcgacagctcgaattattttagcgcactccgcccgcaaacccttgaaaatactggacttgcggacaagctattgtaactgatccgtgcctgagtgcaagccacaacttatacgtgcatgtcactactccatccaaattgtaactgatccgtgcctgagtgcaagccacaactttgtttgactctggtcagtatgacttcaaattgtaactgatccgtgcctgagtgcaagccacaacgatgtagctgttgtcaatgccagcaatatattgtaactgatccgtgcctgagtgcaagccacaacttgcgtggtcgaggaacgacaccggggcttaattgtaactgatccgtgcctgagtgcaagccacaacacggacgaacaatctcagaaaggattcatattgtaactgatccgtgcctgagtgcaagccacaacgccaggtgcccggggttgccgtctccacgcattgtaactgatccgtgcctgagtgcaagccacaacttgacacgcgaacaaaaagccgatattgtattgtaactgatccgtgcctgagtgcaagccacaacttgtggactgtccagtcgtcaacaccttttattgtaactgatccgtgcctgagtgcaagccacaacttacgatgatgtggattgataacgaatcgaattgtaactgatccgtgcctgagtgcaagccacaactcattaactatccagtacagattgttcagcattgtaactgatccgtgcctgagtgcaagccacaacatgcgaaagtctctggcgagttctattttcattgtaactgatccgtgcctgagtgcaagccacaacaggtgtgcgacgggtatgctctggaatacaattgtaactgatccgtacctgagtgcaagccacaacggcaaacggtctgcgaagcacacacggcggattgtaactgatccgtgcctgagtgcaagccacaacatgaacgggagaaggggtgttgctaatcttattgtaactgatccgtgcctgagtgcaagccacaaccaacggcaacagacggaaaattccgtgtaattgtaactgatccgtgcctgagtgcaagccacaacacatcgtaacgaaggggcataagtctgactggcttttttctatctttatagagatttggtcgatgatgcctttataatcgccataatcgcagaacggatggcggggggtagttcgggccatgcttctgcaactacggtcaagtccgggtccgtttctggcttgtcgctcagcttgttgtccagcttgtcggaacagcgtacattcattgtgccggggctgtcatcggttggcactttggcaggcttttttgagggtgctgaaccgtccgttggagttgacgtaacctcttgattcttggcagacttagacgtttcttgacccttgttgtcatcggtagtcttagccgccttctctaacacgcccggcaggactcgaacctgcgacctacggattagaaatccgttgctctgtccaactgagctacgggcgcttcactttttaactgcttgaaatataacaagttactacgcatcttgtcaatatgtggcattcatgccgccaagataatacaattacttgcacgaagcaagtttacgtaagttctttaatgacagggtggacgaggttattcgggtggacacctatagaatggctaccccatccgtctattggatttagcgaatttcaggaaactggtaaagttggaggcaaaacgcagccagctatcaggggatttccataacatgctgatatatccgctcaggaccttgggacgtttgtaatgggccttgtaaaattcaataaacaactcttccagacgctttttctccatgccgttgggaacaaagagaaagttcatgcagtccatcttgtcccagtcctcttcgaaggttcccatctcattgatgttttcatatagtggagaaccggggaacggcgtgaatttcgccaggttaaagtcgtctataggcagagagaatacataatccatgctgcgtttgatactctcttccgattccccgggcaggcccatcatcagcaggcctttggtccggatcccggcccttttgatgtttcggatagtatcggccagcatatccaggtccgcattttgccgatgttgcgccaacagttccggatctcccgattcaatacccaggctcatcatccagcacccggcactcttcatcagcttcatcagttcaaaatcgacatgctcggcacgaacggcacagttgaaagtcatgttcagatgattatccatcatcatacggcagaattcttccacccgcttgcgattgaacgtgaactggtcgtcatagaagttgatatgtctgattccaaaccgttccttcaggtacttcatgtgttcataaagatactccgccgaattataacggaagctgcgacgaaacacagatctatcgcagtaactgcaggtatatggacagccgcgactcgagttacagcatgtatttggtgttctgggataattaaaaatcggcagtttataggcatgtggatagccttgaagtttttcataggccgggaacggtaaactgtccagatctattctttcattccgcaatcctgtaaaattgatatcgcctttttctcggtaaatcagccctggtatctcacttagagccttgctgtccgtgccggccttaatcaatgcttcaacacattcttctccctcgcctattacagaaaaatcaacgtccgggtagtcttccagaatcttcttgcgcaatgcagaaatatgcgcacccccaaaaaccgacctgatcccgggcaggattgcctttgccgttttggcgatccggactgaatcgtgaaaggacgaggtggtgcaggtcaaaccgatataaccgggatttttctcttttaagtagttgcgtattttcgggtctgaatccggatgggcataacagtcaataatatcggcagtgattcccttcttctctaaatatgccgcgatactcaacagacccaacggcgacataatatttgccactctggaaatatcccggccggcttcaccggggcagtagcccaaagggtgaatcaataaaattctatcatggtcaagtttcatggtatttactattatcacgactcacgtcagggaacttgaagcattcaacacaatattgtgcacacaggcattagaactgccgaataccaaagattcaaattgaaattgaaaatatttttatggaatgcccaagtcttgagcagggtcgcaaacgtttatctgacagaagggacatcaagccgggacagcaccttgacagccggagcgctcttggctatatagataacttgtggaacacttttaccacgccgtttacgatgaaggatgaagaatgaagaacgaatttgaaacacgttcgcagcaaaatcggtcgaatttatcttcagtttcaccgctgatcttgggtactcaacctcggtatggaaccgaaatgcttttaggatggtctccagcttgtcagaaaagcaatatcattcgtttgctgcggagggattcagggataagcatcaggatagcggttcttccggcgattgtcttgtgtttgttggtgagcgggtgccggacacacccgcgtttccagctcagggaggtgatgtcaccccgtgaaggtggggtccaccggcattacgattctacgggagacggacagccggatttctttatttttgccgacagcagcgggaggatttcgcgcatcgggtatgacaatgacgtcgatgccgcacctgatattattgtcaacctggacgaaatcccggccgcccgatgtcgccatctggttctcatactcgacggttttggttgggacctgctcaaaagatactatgattccgggaaactgcggatgttttaccccccgtcgcgcatcgtgtcgccgtacccttcggtgacggaggtctccatgtcggccatatttggcagcgccccgtgcagggctgtgcagtcacgatatttcgaccgcaaaacaaactctatggttggcggagtgctggattacatgaaaggcagaaatgaaccttttgcggcctcgcttacatatcgtgcaccgcagcacgttgacggcttgagctatcttctggggatgcccatgttcaactcggaactgaacacggtcaagcggctgttcgacaaacgcaaatcacgggaggtgattgcgtacattgtcagttctgcggccgtgagtgtgcgggacggagctgcagggcagatggaatgtctctatcaattggatcgctttgtaactgaggtgctctggcaaagtcgcgggttggtcaaggtgacaatgcttgccgaccacggactcagctacgagaaagtggaatggctggatctggaaaagcatctggccgacagaggctggctcatgaaggatcacattaatggccccagggatgtagtactcagcactcttggcgttgtgacgtatgcctgcctttcaacgcgccgtccatccgctttatcggaggacctaatcacttgcaagggtgtggatctggtcagctacgctcggagagatgcagtagaggttctaacccgagatggtggtcgagcagtaattcgtgcccggggtgggcggtttatctacgagccactacagggggatccgctgttattgacacccgttctggaccgcctcgaagccgatgagcatgggagctatgactcggaagacctgctgcgcgccacggcgacgcacgtctatccggcgcccctgcagcgcttgtgggaagcccatttttgccgggtggagaatccgcccgacgttatcgtctcactgaacgaccattactgtaacggaccgcccccattttccggaatggtgcgcatcaccacaacccacggcagccttaactaccgcaatagcgtcacctttctgatgtccacggccggaacgttcacgccggtcatgagatcatgtgacatccgcaaacagatcgggtctctgcttgacaatccctggcctatgagggaataggagattcgttgatataagagaaggggcggctttattgtgtcggcaccgttggattagatgaagagacaatacggcagtaaacactggagtgaacgaccgaaccgcctgtcaagaggggtaatttacagacaacttcttgtgtggccagacctcaagtgtgaggattttggccttgacaagtgcgaatacctcacttatatgtgagcgcagataggttcggtagtattggtttagggcacgtgagtctgtttctatagttttaggtggttacatgtagaaagtgttaaaaactccagtgtaacccacggggacggagtatgcgcgcctggtagattgtaaagaggttttgtgtgcaaaatgccattttgcgcggagtaataacgatggtcaaagaattccttaagtttccccctgttttcttgttattagtcgtcattccttcctgcaccagccagcctgttaggagatgaccttgaaaaggcttatgattttacgttggatcaaaagaagtatatattccaccataataatgactcacattgttttcggtgtagctgcagaacggaatcctgttcctgtattagaagactttttgatacgcctggaaaaacgacacagcaatacgaagactctggcagtccgattccgacaggaaaagaacttctcttttatggacaagccgctcatttctcagggttttatcctcttcgaatctcccggcaggattcgatttgatattacagaaccatttcagacggcgatgctttccggcgggaaaaaaatagagcgttatgaattggtcgatggccggtggcgttcaatccagtctaatgccggcaagagtattaaacttgtaatggaacagataggtcagtggatgcaaggcaaattttcgaatcagaaacgcctttttgatttatctgtaagtgctgacgatcccaatggttacgtcgcgcttgatttggagcctcgtcacaaacaattccggcagtttatagagaagatacgaattcacgtatccagacctcctgaatatcacattacacggatcgatatttacgagcctgcaggcgaccggttcgcattggaattcctgcaggaaattcttaacaaggaattgcccgagaattgctttggcaacccacaggcagtaaaacaatgcaaagaactattttcgcaggagcaaaatgagactctgaaggaagaaaagaagaaaaaggatggctccgaagattaaatccacatgatccgtaagtaccttgccatactgattttgatcttatttacaatgctttgtggatgtcggtcgttaccggatgccaaattgggcaattgtgaagacttggattatgacatatttgcagagaatttcccgcttgatattccggatcctttacagtaccgttacacgttgcgttggcggagcaagaacttgattgtcaatggtataactcgtaagaccgataagaatggagttaatgtagcaggttttagcaatttaggaattacattgtattcggcccagtggcagggcaatcattttgaaatattgaaaaataacctgggaatgcctgacaaatttcttaaaaggagcattttgtgtgatgcgttgttgttgtaccgtcaattgccggcagcgggaaactgtattcgccgggatgttttggatggatctttgtggttggaaacgaatcgccaattggcgggaggaacgggctattttgtagtccttgacgggcaacccggatggggggcggtccgaaacgggaaaatctgtttcaaagctgtggccgcacagaacgacaagaatgctcccacaaagatcacgatagagaattttaatgaaggctacaaatctgaaatcagatttcttgatgaaggccctgcaaaataagaaacggttatttccaggttgaaaagtagaatacaatgaagaaaacgatagtggagaaattagcattgcctgccgctaatactcattgagataaaacttggtgtatgactacgaagaaagagaagaaaacagcattagtaaccggagcaagcaagggaatcggcgctgctattgctattgatctggcccgcgctggatttgatatctggctcaattatcgcagtgaccatgcggcggcccaggcggtcgccaagacaatcaaagagcttggagtttcgtgcactttgttacaatttgacgttgtgaatgaggatgctgtaaacaaagtattaggtgaagctctggaagagaagactccttttgtgcttgtcaacaatgcaggcattacccgggataatatgctgttctggatggaatcccgagaatggagagatgtgctgggtgtccatttggacggcttttttcatgtcacacgtttggctataggcaaaatgatccgggaacggaaaggcagaatcattaatattgtctccacctcgggagaaaccggcatgccgggacagaccaattatgcggcggcgaaagcaggcctgatcggggcaacaaaatcactggcgagagaagttgcgggtcgtaatatcctggtgaatgcagtctcgcctggatttattgagacagaaatgactaaagaactgcctttagacaaaatcctgccaactattcccctgggacgcatcgggactgttcaggatgttgcatccgtagtgacgtttctatgttctgaggaggccggttatattaccggccaggtactcggtgtaaatggcggcgtttatatgtagttcgagcagagagagcgacgagttcgctaaaatgacaatactgtcacgtacagagtttgtggtgcgataaccttatgtttcgagtggcgattacgggaatcggggcgatatccagtctgggttgcgatccggacagtattgcagagtccttatatcatggacgttcagggattgtctgtgatcccgaaaggaaggagctgggatttcgcagttccctgaccggtgcgatacatgggtttgacccggcccgttacgtaaatcgtaaaatgcgcaaaacaatgactctgtttacagttcagagttatgccgccgctctgcaagcgattgaccaggccggtttagaacccgaagatctgaaaaatgaaaagacaggtttggttatcggttgtgattcaagctgtcttgcgtcgtatgaacaggctgcgattacgaaagatagaaaaaacgccggggaattaggcagcgggcatattttccgttctatgacgtccaatgtcaccatgaatcttaatgttctatttgggaccaggggcgcctgctggacaatcagttcggcttgtagcagcgggggccacgcggtaggtcaggctgccgagctgattcgcagcgggaaacaggagtatgtcatttgtgggggagctcaggagattaactggcattccatgtgtggttttgattcgctggatgcattttctgtgcgtgagcataaaccacaggaggcctcccggccattttcctatgatcgcgacggtcttgtgcccggaggcggagccgctgtgataatcctggaaaattacgatatagccaggcagcgaaatgcaaccatactgggagaaatatgtggttacggattctcctccgatgggtataatgtttctatcccggacaaggatggtatgcggagggcgatggcaatggctgtagaagaggcaaaagtcagtccgggagaaattgattatatt

SEQ ID NO: 2547 - DNA, 6926 bp, synthetic construct
  source 1..6926: mol_type = other DNA
  misc_feature 1..6926: note = Synthetic
tctgtgtggcaggtttatccgcctctgcttgcccgccatccgtgtggcggggcggaaggaatacgaaatgccgcttctaactcaaaacagacccttctatggcggattaaaaaggattcgccccacctgcggttgggaacaccgaggaataatcatcgcagaaaaaagccgcaggacatggtttgcatgtgctgcggtggtctcgcccgaaggcgaaggtacctgtggattttgcagaattgttcattctgctcaccttgttgtggaaaacccacagacgcggatcagttataatctaaaagataatatacatcaggagacaataattgtcaaaagaaaaatccatagattatacaaaatattcatttgaaggttaggagaggcaatatgaagttattagggcttgatatcgggtcaaattcagttgggtctgcgtgggttgatactgacaagaaattgttggaaatgggcgtaggcgtatttccggcaggggttgaggaatcagagacaaaacgcggggctcctaagaatcaagcgaggcgaggtcatcgtagccagcgaaggagcattgaacgccgggctgataggaaacacaaaatgcggatgtttcttgcagagagagtatggatagatccagatgagaaaaagtggatgggattaaatccctggattttgcgaagagacggattgaacaggaaactatcaccctacgaatttggtcggatactgctacacttggcgcaacgccgaggagcgtggtggtttgatgacgcacctgaggaaactgcgaaggatgtagaagagaacgaagaagagaaggcagcagaggcgaaggacaaggaggccaagaaaatcaaaggggcaattgaacaaaccaagaaggagatagggaagagcggggcaagaacattcggcgagttaatggcaataaaatttgaggaacagagaaaaatagtcggaagagagaataagcagattggtttgccgattaggaatcggacaacagcatcaggagaaggaacatacgagttctgcgcagaccgtgaaatgatttgggaagagtttgacaagctttggaacaaacagaaatccttcggtggagacctagcggtacagttaaccgatgagtgtcgaaaaaaactcgatgacccatctgaagatgcagcgtggcgatacaaggggatattatttgggcagcgaaaaacatactgggatattgggacaatgggtcgatgcgatttggagccgacggaccaaaaatgttcaaaagcagatatgtatgcacaggaatttctcgtactcgagacactaaacaacataatgataacaccaccgggagaacttaagcgtcatctcaatgacgatgaaagaaaaaaggttctatcgcttctaaagacagaagaaaatgtgactgaaagcaaggtgcgcaaggcacttggacttcataagggcgagaataagacattatacaccttgagtttggagaaagacccgaaacgaggattgaacacgtggtggttttatcgggaaataatagcgggagcgattggtgaagcggtttgggagagaatatcagcagagcagaaagaatcaataaataaggcgattctgaagtttgacccaatcgaagagaaagacaaggaaacgttagctgaagggtgccggaaatggtggggattcaatgaaaagcagactgagcgatttctcgaggcgtggaataagagaccgaaagtagatgaccgagttgagtattcgaggcgggcgataaagaatctgctaccatatatgcgcgagggttttacagtcaataaagcacggaaacgtttttgtgaggatgcggacaacaatgcaacgctggagcaacgggagcgatacagtttttatggtggtcgcgcgaaccataggacgaggcaatatcttgagaagcacccggatttgctgccgcccgcgccggaagatataagcaatccggtggtgaggaaagcgattcacgaggtgcggagccatattcaggagtggatacgcaaattcggatgcaagccggaccgggttgtggtggaacttgtacgtgaggcaagacagtcagcaattgttcgaaataagcaattggcagaaaaccgccaacgcgaaaaagaccggaagaagattatagaagactataacctatcgcagttgacaagaacgcaacagaacagggctgttgatcgagttcgcctttgtcgagagcaaagaaatatgtgcgcgtattcagagcaaaccataaccgaatcaatggcggctaaaggggatgggctagagatcgaccacatcatacccgaaagtcgtggtggtaatagttatctgagtaatctgctcttgtgctttgacggtacaaaccgtgggaaagtaaataagacaccaaaggaatggcttattgatgaggatttcagaagattagagcagcgattaggacatctgaaaaaagaaaacaaggtgaagtgggataatctgcatagcgacgcaccggatatcgataagttcactgattcgcaactaacagatactgcgtacgcatcacggcaggttgcagaatggctgcgggccgtgctttatgatggtgaaaaggatcgagtgcgcaaggtttttacaaccaaggggcgatatacgaactggctgcggagagattggcagcttttccctgatggtacgaatgcttggacaattgagaaggaccggggcgaccatcgtcaccatgcgctggatgctttagttgtggctttgagcttggaacatctgcagccgttagcttgggcgttagaaaagtgtgagcaagcaaaagcagaaggtaaagcaataccaagacgagaaccactgcctccgccatggggaccggtcgagagttttcggaagcaggttatggaaaggtacgaaaagatgattgtttcacatcgtgcagctcgaagacgattagcaggcgagctgcataaggatgagcactttgggccgataagcggcgacacggaacattttacgaagcgtatatttgccgtagagttgacgccgaatcatttgcgtgtgccaaaaggatgggaagaactgcgtgagaagttggagcaaaccacttctaaagcggaaaaaagatatatcctttcacaaatgctttccattgaagacgccaaaccggaaaaatcgggtattgttcgagaccgatggtttcgcgaagagttgagagattgcttgcggcgaaatggttttgacccggatagttttggtgaggacaaagaatccaaaaagagatttaaggaacttgtaaaaagtaaggggttgcttttgaaaagtggtgtgccggtaaggcgcatcatgctgctgcgaacattaggtgagccagtggagataaaaagaaagcgattcaacgttttgacagggaagatggaagaggatgttgatccgcagtcagaacggcagagactgcgggtatatgattcacagaataaccaccatatagagatcagggaaaacaaaaagggcagatggattggggatgtaattacgaactggaaggccgcgttgcgagtgaggccgccgaaatcttcgggcgagcaaccgcaattagccgttgaccgcagcaacaatgaaaagggacgatttgtgatgtcactatctatcggggaaatggtttatatgaagcatcccgaaacgtgtaagccggactattttgtggttttcaaaatcgatggtaccgacacaatacatttcactggtcaccgggatgcgggaagagataaagcaacggaaaagtgcactaagagagaggacattcatttgtcacccgcacaattgcaaaaacttggtgtaccaccagcaaaccagccacagaaagtctgggtggggccgttaggtgacgtaaaagtcctgaatcgagactaaacaaacgcgcacaaagccgtcgcctaacgccggttaagacattgtgtttttttgccgataataaaggagggataaaggcgaaatatcggcaaaatgataaagaaaatcatcgaaatatcgcaggcaaagacacatctatcggttcgatacagtcaattgataatcagggaggaagggcgggaggtaggaagtatcccttgcgaagatataggggtcttgcttattgaccatcagggaactacttacacacattcggtctttacagaattactacaatgcggagcggcggtggtattgtgcggagggaatcatcagccggcagggatgctgctgcctattgaaagcaatactttgcagacggagagattccggcagcagatagaggcgaaagagccggtaaaaaagagattgtggaggcagattgtccgggcaaagataaaacatcaggcaagattaatcgggcaggatagtgacgtttacaaagtattaatggtgttgcgggataaggtgcgctcgggcgaccccgaaaatatagaagcacaggcgagcaagaaattctggcctgcgtatgtgcaggatattatttctgagtttcacagggacatcgagggcaggccgccaaataatatgctcaactatggctatatggtgatgcgggcggcggttgcacgggcgctatgttcggcggggcttctgccctgtcttgggattcatcatcgcaaccgctacaatgcgttttgtcttgcagatgatatgttagagccatttcggggatttgtggaggcgaaggtgcgagatatatgcaagacaaatggtgtgccggatgagcttacacagccggtcaaagccaagcttttagaagtgttatatgagcaggtaagaattgccggttttgaggggcctttaatggtcgggcttcatcgaacaatggcatcacttcagaggtgctttgcgggagagcaaaaagagttgaatttgcctgagatatgattttgagcggttacagagcgatgtggattttcgcgatgtttgatttgccgacggacacaaaaaaggcaaggaaagactatacctattttcgcaaaaatttgttgaaaaacggctttagtatgctacaatattcggtgtatgtcaggcattgtgcgagtgaggaaaatgcagatgtgcattatggaagagtcaaaaattttttgccgccggatggggaagttcggcttgttgctattaccgacaagcagtttggacggatggagactttctggggaaaaatgcggaaacctgcccctccagcaccgagacagctcgaattattttagcaaatcgagcccgcaagtccttaacgaccaaggacttgcgggcttactattataactgatccgcgtccgagtgcaagccacaacgaaatacggtgaagttgatagtcaaaagttattataactgatccgcgtccgagtgcaagccacaacatattgaatgaaggtgtaaatcttgctttcattataactgatccgcgtccgagtgcaagccacaacgctaatcgttctgttaatgcttgacgcaggattataactgatccgcgtccgagtgcaagccacaacagctggcgaccaacacacatggcagtaaacattataactgatccgcgtccgagtgcaagccacaacctgtagggaccgttaaagaaattccgtgtattataactgatccgcgtccgagtgcaagccacaacggaacttctgttctgatgctttacttgttgattataactgatccgcgtccgagtgcaagccacaacgaccttttacttcgacattgtattgtttcaattataactgatccgcgtctgagtgcaagccacaacagtccggaagaaactaatgactgcgagaaaattataactgatccgcgtctgagtgcaagccacaacgctaatcgctcggtgcatataaacgcgaaattataactgatccgcgtctgagtgcaagccacaacattagtgctattctggacaacagtgctttcattataactgatccgcgtctgagtgcaagccacaacttccgccaggtccgcacggctgccttccaattataactgatccgcgtctgagtgcaagccacaacaatcagtttagcatacggttcatctgtcttattataactgatccgcgtccgagtgcaagccacaacaacaatggcctatggccgcaaggcgttgtaattataactgatccgcgtctgagtgcaagccacaatgtgacggcggacttgcctgcccctgcaagcagttagcaggggcccgcctctaatttgtcgcttgtatttagtccctcgtctctcgtccatcgtcttacatctgttatcctttgtatcttcgagtcttcgtggctaaaacaaaatgccgtattaatcggtgttaatccgtgttaatcagtgtcaaaccggtcagtgtcagtcagtgctaaaaaggtccgtgtcaatcagtgtttatgttaatccgcgtctgaaaaatttgtgtccattcgtgttcattcgtggttaattttctctgtgttctctgcctgccctgagcagagtcgtagggtgccctctgtggctaaacaaaatgccgtgttaatcggtgtaaatccgcgtctaatttgtcgcttgtggttcgtccctcgtctctcgtccatcgtcttacatctgttatcctttgtgtcttcgtggctaaaacaaaatctgtgtaaatcagtgaaatctgtggttaaacaagtgcaataaaaaagccctgtgagttgcacagggcttttatttgcaagttcagttaaaccaacgcaacgaaaggcctgacttgtcccggaaagtttttatccgggacccagcatccaccttacggcggacaccgttctaaattatcctttagaaaggaggtgatccagccgcaggttcccctacggctaccttgttacgacttagtgccagtcatcgggcttaccgtcggcaggcgcctcccttgcgggttggcggcccgacttcggg

SEQ ID NO: 2548 - DNA, 5990 bp, synthetic construct
  misc_feature 1..5990: note = Synthetic
  source 1..5990: mol_type = other DNA
agaagacctgattgagcaagccgggttgctgcaccatcgcatcaattatagggtcggcgtcgttatatagcgaccgagcgacgtcatgcagctccaacacaaaggactcagtagccaactccgaaatcaacgcaaaatcctgctcaacaaacgctgcgtggctgtcgggcagtctttggatttgcgtgtacaatgtatcagccagtaatgcgttgtcctgcgtccagtcgaaatcggccaacagatgctgactggcaaaatactggtgcaggaggtcagcagaaacactgcggaaaaacgtcttgaatgaaaaattacgcgacataaaaactccttaaaagttggcccagccccgccgagcgttcttcatcagccctggaatcccgcattcacaggtgcaaaacaaaggtcaaacggccgcgtcgcagcttccggacgaacccttcgcttgtcttacggccagtcaacttacgcgaaaatatagcacccaaacaaatcccgaacaaacagaaatttcagagaaatgtatgagggtttcggggcagtaattttaagtgtctgatttcattcaatttatgaaaatgggctacagtggattatgtcctacccatagttgaaggttcgtggcggttccttttatgtaaagattaacacatgatttaagttcagcaaggatattgtaaccaatatccctccagaaccaccacttatttcaaacttcaactatgaaaaagacatccttttttgagaagagcaagatcaagcaggcatcaccggtctgcttttaggttatttacgtaaaaaaaccgcagaacatggattacatgtgctacggcggtcgcccgaaggcaggtgcctaagaatttttcatcttgttgtgaaaaacactcaagcatggattagttacaatattgacactgatagcctgttgccgtatgtttgtcaacataattttcccaggaaaagtacaaaactgaaaattcaggaggttatgatgtcaggaattacattagggctagatattggcacaaattccgtcgggtcagcgtggattgacacccaacatagaattattcaattaggtgccagcgtgtttcctgcagggattgaagaatcggaccaaaagcgaggtgcccccaaaaaccaagcaagacgaggctttcggcagcgaagaagaaatgttgaccgaaaagccgacagaaagcatcatctccgaaaattccttatgagtaaaggttggattccgaaagatatcattgagttgcagagggggactgaactgaacccgtggatattgagaagagatggtcttgaaagagagttgtcgccttatgaatttggacgtattctgctccatatgatacaacgtcggggagcatttggttttattgatgagcaagatttctgcgatacggaacaagataacgatacacaaacggagaaagaagacaattcgaatgataaagagcaaaagataaaaggagccattgaccagacaaaaaaagaaatgcgtaagcttggcattgaaacctttggacattttattgcagttaaatatgaagagagaaagcacaaaattaataaaggatcggcacgtgagacggaaattcggtttcccgtaagaaaccgaacgacggccaccggtgagggaacatacgaatactgtgcagaccgagacatgatttggaacgaatttgataagctttggaagaagcagaaatcatttcaaagcactttgagcgaacaattaacaactgaagttcgaaaagaactcgacgatccatcatcagatgcaacgtggcgatataaagggttactctttgggcagcgcaagacgtattgggatatgggaactcttgggcgttgttctttagagccaaccgacatgcgctgtccgaaggcagatatgtatgcacaggaatttctggctctcgaaacagtgaataatattcgaattatccccctcaatgaaccagcaagaagattaaacagcgatgaaagagcattggtattaaaagcgttacgtttacagaaaacagcgtctgaaggtacaatacggaaagcgctaaaaatacataccgccgagaaaaaaagactattttcgctcagtctggatcaagatgcgcaaagggacttaaacaccgattggttttatcgtgagattatttcgggagcaatcggagaaactgcatggaaagggttaataccagaaaagaaagaatccatcaatcaagcgatactcaagcatgaccctaaagaagaaaaagataaggttcggtttacacagggctgcaagacgtggtgggatcttgatgatgaacaaacacaacgactaatcgctgcgtggcaaaaacgacccaatatagacaaacgagtaaatttttctcgaagagccattctcaatttactgccttacctgcgcgaaggatggactgtaaacgaagcgcgtaagttattcgcagaagatgccgataatggcgccagcgacgaacagcggaaacgttacggctttaaagaaagcatcaccaatcgtgcaatgcgacgttacatccaaaaacatccagatttattgccgccagcgcctcaggaaatcagcaaccccgtggtacgaaaagcaatccatgaagtcagacgacatataaacgagtatattcgaaagttcggaaaaaaacctgatcgagtcattgtcgaacttgcaagggaagcccgacaaagcgcaaaagtatgcaaccagatgctggcaaaaaatcgaaaacaggaaaaaatcaaaaaagagattatagagacttatgatagttacatccgcgagcattacaaaaaaaagtatggcgttgacaatctgactcacaatcagcaagaaaacgcaatcaggcgcgtccttctgtgtcgagaacaaaaaggcgtctgcccttattcggatacggcaagaaacattactgaaagaatggcagccataggcgaagggcttgaaatagatcacatcattcctcgtagccgcggcgggaacagcacgctgaacaatcttgtactgtgctttgacggcaccaaccgtggaaagggtaacaaaaccccgcaggaatggctaaccaaggaggattttgctaagcttgagcagagaatggcccatcttaaaaaggaaaatccgacaaagtgggaaaatcttcacaaagaagtaacagatatacaaggttttgtcaattcacagcttacagatacagcctatgcctcaagacaggttgccaactggttaaaagacgtcttgtacgacggagagcgtgacggtgtacgccgggtatttacaacaaaaggggtttatacgtctattataaggaaagactggcaactttttctgaacggttcagacgaaccaaaatttcaaaaagatcgctctgaccatcggcatcatgccttagatgcattggccgtcgctttttgcgggccggagatgatacaaaaagtagcttgcgtcgcacaaaagcgtgaaatggcaaaatcagaaggcaattatttgggtaaacgtattccatttgatccgccgtggggggatcacgattcttttcgccagcaggttatggctgaagtggataaactcatagtcgcacacagacccgaaagtcgaaaaatcacaggtgctttacacaatgatactcaatatggtccagtagttgaagacggcaagcgtttgagtcattgcacgataaggaaatcggttgctcaattatccccaaatcatttacgagtacccgacggctgggaacaccttcgcatagaaatggaaaatgctccaacaaaagcatttgctaaagctgttcgctctgaaatgttaaaattgccggatgttacaccaggtaaatcgggtattataagagatcgctggtttcgcgaagaattacgagaatatttacgatgcaataatcttgacccggacaattttactgcaaagcaaattcaagaactggtgaaaaacaaaggtgtatttctaaggagcggcgtgcctgtcagacgcatcacattgctgcgatctccgactgtaagagagattcagcgtaaaaggtggaatgacgcaaccggcatgatggaatattacccagaagaagaaaagaatgcattaagactctatgagcctcaaaataatcaccatattgaaattcgtgaaaatgaaaaaggaaaatgggttggcaacgtggtaacgaattttgaagcggcaaaaagagtcaggccacctaaatcctctgggcttgctccgcaaccagctgttaaccgagatgatatggaacatggaaaatttgtgatgtctctgtccatcggcgaaatggtgtacatgaaacaccccaaaacaggtaaaccaggctatttttctgtctttaaaatcgacagtactaacaccgttcattttacaccgcattgggatgcaggcagaagtaaagcgacagatagttgtactgccagagaggacatcgccttatctttaaacaatttttctaagatgggcgtggaggcagatatgcggccgcaaaaggtatgggtgagtcccttaggagaagttaaatttttagtgcgtgattaagcaacatcctttgtttgtcgatacggcctttggaggatatttgaaagggccgtatatgattaagcggatcgtggaggtttcgcaggccgggacgtttttatcggtcaagctgggccagcttgtggtgcgtcgggacgggcaggccgtcgggcaggtcccctgcgaggatatcggggtcttgctggtggaccatacgggggttacgtacacgcattctgtgctgacgacgcttttggagcatggggcggcggtggtgatttgcaacgggcaacatcatccggcggggatgctgatgccgatggagggcaacagcgtgcagacatagcgatttcgtcaacagcttctggtcaaagagccggtcaagaaacggctgtggcagcagattattcaggccaaaattcgccatcaggcccgaatcgtttccgatgacgagcagaccagcggctatctgcgcggcctggccaagcgggttcgcagcggcgacccggacaatcttgaagcccaggcctcgcggcgattctggggggcgtatttgcagggtctggagtttcggcgaaaacgcgacggcgtatggccgaacgcctttttgaattacggctatatggtgatgcgggcggccgtagcgcgggcgctgtgttcggcggggcttttgccggcggtggggattcatcactgcaacaaatacaatgcgttttgcctggcggacgatgtagtcgagccgtttcgggggtttgtcgaggcgaaggtgcgggcgatgtgccgcgaccgtgtaccggaggagacgctgagccaatcggtcaaggcccaactgctggagacactgtatgagacggtggagatcggcgggtacagcgggccgctgatggtgggcctgcatcggacggcggcatcactgtatcggtgctttacgggggagtctaaacacttggaattgccggagttatgattcagacggggtacagagcggtgtggataatggcgatgtttgacctgccgacggatactaaaaaagcccggaaagattatacggaatttcgaaaaaatctgatgaaagacggctttactatgatacaatattccgtatacattcgacattgtgccagtgaggagaacgcagatgttcattacaaacgagttactgtttttttgccgccggacggagaagtccggctcctcaccattaccgacaagcagttcgaacgcatgcagattttttggggaaaactgcgcaaaccaaccccgccgccgccccgtcagctcgaattattctgacgtggtattgattcaagttcttgctgcgtcaggacttagaaatgaggtattgtaactaatccatgcctgagagcaagccacaactacacgccgccgttatattggcattgagttattgtaactaatccatgcctgagagcaagccacaacg

SEQ ID NO: 2549 - DNA, 5212 bp, synthetic construct
  source 1..5212: mol_type = other DNA
  misc_feature 1..5212: note = Synthetic
tgggcgtcgtcgcataagttgaatgagaccacgagataagagccgattcggctaaacgtggaaactcggatagaaggttgaagcaatcaaacgaattttgcccttgacaggcctggcttcatagaagttttaacgaaggagggttgacgaaaagggggattaggggtaaggtttaccccagtgagatagtaaacgacacatctcacggggttaaaaagggttgcccgcagccagtcgttagaataaaaaaagccgcaggacgtgagttgcacgcgctacggcggtcgcccgaaggcaggtgcctgcgaattttgcatcttgttgtggaaaacccacagacacaggtcagttacaattgagatagaaagtagccgggaggcaggaaaaagtcaagaggaatttgcggaatttttttggagggcaatatgaagttgttagggcttgatattggtagtaattcagtcggttctgtgtgggtagacacggacaagaaattaatacaaatgggagatagtgtttttcctgcggggatagaagaatcagacacgaagcgcggagcaccgaagaatcaggcaagacgagggaagcgaagccaaagaagaagcatcgaaagacgagcggagcgaacgcatcagatacgagcgtttctgctgaaaagaggatggatgccaagcgacggagagcgagaaaagaagtggcttgaggagagtaatccgtgggttcttcgaaaggagggtttatatcgagagcttacgcagtatgaattcggacgggtgatactgcaccttgtgcaacggaggggatcgtatggatttggggttgatgaggaagaagaggatgcgggaaagatcaaggatgcaataagcaatacgcgcaaagccatgaaggatgcaggtgcggaaacattcggtgaattcatggcgatgaaatttgaggagcgaaaaagagagattgggatacgggggaagatggttcgaggagcgatacgaaatcggacaaaagcaacaggtgatgggacatacgaattctgcgccgacagggatttaatttgggaggagtttgataatctatggaagaagcagaagtcattcggaggtgagctgtctaaacagctttccgatgaatgcaggagagaattagataatccggaaagcgacgcaacttggcggtataaaggcatacttttcggtcagagaaagacgtattgggatgtggggacaatggctcggtgcgacttagagccaacggatatgaaatgcccaaaggcagatatgcacgcacaggagtttcttgtgcttgagacggtaaacaacatcaggataacagcgaaaggcgaattgaagcgggcgttaacaagagaagaacaagagaaggtaattggcgctttggaaaagcaaaagacagcgagtgaagcaacgatacgaaaagcaatggggattgacaaaggcgagaaaaagggggattacacgcttaatttggaaaaggacccaaagaggggactgaatacgaattggttctgccgtgagatcatcggggccattgtagtggaaacctgggaaagcatggacgataggaaacgagagtctataaacaaggcaatattaaagtttgatccgcaagaaaaaaatgatgtgaagcaactgacggaaggatgtcgcaaatggtgggctttcgacgaaggacaaattgagcgattcattgagggatggaagaagcgacctaaggtggatgaccgggtgaattattcgaggaaggcgattaggaatctgctgccctatatgcgtgagggcttcacggtgaatgaagcaaggcaacgttttgccgaggatgcgacgaatggagccagcgatgcgcaacgggaacgttattcatttggggcacgtgcggggaataggagagttcgccgatacatggagaagcatgcggatttgctaccgccagcgccgaaggacatcagcaatccggtggtgcgaaaagcgatccacgaagttcgtcgtcacattcaggcgtacattcgtaagtttgggtgtaagccggagcgggttgttgtggagctggcacgagaggcaaggcaaagcgcagtcgtccgcaataggcaattggcagagaatcggtcacgagaagcaaaacgtcgggatgtcgtcgaagagatcaggaaatatgtgaattgggaggaattgtcaaagacgcaacaagagaaggcggttaagcgagttttgttatgcaaagtgcagaaataccattgcgcgtattgtgacaacgacaatgacaccataaccgacggtttggctgcaaaaggcgagggcgttgagcttgaccacattgtccctgagagtcgaggaggggacaatggactgaataatcttgtgatatgtcatacaaagtgtaaccgtggtaaaggaaatcggacaccgagagaatggtttactgaagagcagtttagccgacttgagcatcgtcttggacatctcaagcaagaaaacgaaacaaagtgggataatcttcacaaagaagttccggatttgaacggatttgttgagtcgcagcttactgatacggcatatgcagcgcggcaggtggtgggatggttagagaagacactatacgcagatagaaacgatggaaagcggcatgtcttcacgacaaaaggtcgatataccgcgatattgcggcgagactggggtttgttcccgggtgataaaggagaagaggcaacggacaagaatcgagcagatcaccggcatcacgcaatagatgcggtggtgattgcgttaagcgggcctgagcggctgagtcagcttgcgagagcagcagaagccgtagaaatagagagggtgggaaagagggaaccaataaccccaccgtggggggattttgattcattccgtggcgatgttgtaaaggagtggaagaatcttattgtcgcgcacaggccggagagccggaaggtaacgggttcgctgcataatgatacacagtacgggctcgtggtagatgagaagggaaaatcgaccggtgaatttacggtgcgcaaatttgcagttgcattgacccccaatcatctgcgagtcccaaaagggtgggaggaattacgagtcaaacttgaaatatgccattcaaaaagagaacaaagacgaatatgtaaagaaatgcttgctctacccgatgtggcaggtggaaaatctgggcttatcagggataggtggtttcgcgaagaattacgggaatgtctgagaaaagagaatttagaccctgataactttagcagcaaacagataaaggatttaattaaaactaaaggattatttttgaaaagcggtgtgcctgtgaggcgggtaacattgatacgaaagccaacagttattgagataaaacgcaaacggtggaatcccaataccggaaagatggagcacgatccgtatccaaggtcggggcgatattacgagccacagaataaccaccatattgaaattagagagaataagaaaggcaaatggattggcgaggtgattacaacttttgaagctgcgcagcgtgtgaggccatcaaattcgtctatgcggaggccgcaatcggctgtgaaccacgaggatacgaaagatggtaggtttgtgatgtcactatctataggcgagatggtttatatgaagcaccctgaaacaggcaaggccgattacttcgttgtttttaagatagatggtacaggtgccgtccattttgcgccacactgggacgcagggcgagcagaagcaaaagagaaatatcccgcaagagaagatgtaaatgggggattgacggcaggccaattgcaggagcttggagccgaacaaggaaaaggcccgcagaaggtatgggtggggcccttaggtgatgtgaaggtcttacatcgcgattagggatttttaactgtgatatatcgttgatagcgaaagtcggtctttgggattgccgatgaagaggatagggttagggcaagcccaaaggcaggcgaaaatgataaagaaaataatcgagatatcgcaggcacggaggcacttggcggtccggttgggacagcttattatcaaagaaaatggcattgagctttcaaccattccctgcgaagatataggtgtccttttagttgaccatatcggcgtaacctatacacattcggtttttatggagttattgcgatgcggggccgcgattgtgctttgcggaggcaaccaccagccaagcggaatgatgctgccgatagagagcaatacaattcagacagagcgattcaggcggcagatacaggcgaaagaaccaataaagaagcagttgtggcgacagctcgtccggtcaaaaatcaaacatcaggcgaagattgtggggccggattgtgaggtctataaagaactgatggcgttgcgtcatcgagttcggtcgggcgacccggataatatcgaggcacaagcgagcaagaagttctggcctgcgtttatctcgacgattgatttcaggagggatatcgaggggccgccgccgaataaccttttgaattacggatatatggttatgcgtgcggctgtcgcgagggcgttgtgttcggctggtctgcacccatccatcgggcttcatcactgcaatcgctataactcgttttgtcttgctgatgacgttatggagccatttcgggggtttgtagaatcgaaggtaaagcagatttgcgaaacgcaaacggcaatcgacgatttgacgcagccgataaaagcacaattgttagaggtgctttatcaggagataacaataggtgagacatcaggccctttaatggttggactgcacagaaccgcggcgagtttagtaaggtgttttgcaggcgagcagaaagaaatggatttgccggcattatgatactaagcgggtacagggcgatgtggatatttgcgatgtttgatttgccgacggatacgggtgaggcaaggaaggactatacgcattttcgcaagggattgttgaaagacgggttcagtatgctacaatactcggtgtatgtgaggcactgtgcgagtgaagaaaatgccgacgttcactacaatcggattaagagtttccttccgccggatggcgaagtccggcttatcaccgttacggataaacagttcggacgtatggaatccttctggggaaaaatgcgaaaaccaccccctccacaacccagacaactcgaattattctaatt

SEQ ID NO: 2550 - DNA, 4658 bp, synthetic construct
  misc_feature 1..4658: note = Synthetic
  source 1..4658: mol_type = other DNA
agagtggagacatcctggcaaaaaagaaaccgcaggacgtgggttgcacgcgctgcggtacgtcgcccgaaggctggtgcctgcgaatttttcgtcttgttgtgaaaaacccacaggtgcggatcagttacaatgatggtagactatggtggctggagtcgcatgtcaaggagaatccggtcgagaattgaggcgtttctgttcccaatgtggaggcgaccatgagactgctggggttagacattggcaccaattccgtagggtcagcttgggtagacaccgatgcgcgcacgatcacgacgggcgtcagcatctttccggctggcgtcgaggaatcggaggacaagcgaggcgctccgaagaatcaagctcgtcgggggcatcggagtcagcggaggagtatcgaacgccgggcggatagaaagcaccgaatgcgaggattcttgcttgagaaaggatggatgccagccgacccgcaggaacagaaggaatggttggagaggctcaacccctggatactccgcgctgaggttttgcagagggaactggaaccgcacgagtttgggcgtgtgctcctacacatggcgcagcaccggggagcatacggcttagacaatgaagaaaacaaccctcgttctgaaaaagaaaaagggaatggagcaaagggccaggagtccgacgagaagaaggccaaagagcagaaacagatgacagaggcgatcgaccgaacgcggcagcggatgagtgaatgcaacgcagagacgtttggtgagttggtggcaatagagttccacaatcgccgagtgcaagtcgagaagaatgataaagacggcaagaagctcgaaatcagatcggcggtccgcaacaggaccaaagcatcgggcgaaggcacgtatgacttgtgtgcagaccgcagcatgatttgggaggaattcgataggctttggaaggtgcagcaatccttcggtggtacactcgcaattcagctaacgcccgattgcaggaaagagttggacgacccccatggcgatccccattgggagcataacgcgacatggcggtataggggtatcctgttcgggcagcggaagacgtattgggacatgcgcacacttgggcggtgtgaccttgagccgaccgacaggcagtgtccaagggcagacatgtatgcccaggagttccttgtcctagagaccgtgaacaacatacggataacgccacccggtgaattgagacgcccactgacaaaggcagaacgagaggcggtcatcaagaagctggaggcccaaaagaccgcgagtatggccacggtacgcgaggcgcttggcatccacaggggactgaagaagacacagtacacgttgagtctggaggctgatccggaaagaggcttgaacacgaactggttccaacgggagattgtcaacggtgcaatcggcgaagagaaatggcaagcgatgccgccgagcaccaaggaatccgtcaatcgtgcgatcctgaaattcgagccagagtcgcccaaagacagggagacactgcatagaggctgccgaacatggcgggggtgggagctcgatgagcagaaggtgagtcgattgatcctcgcttggacgaagcgtcccaaggcagacagccgggtcaattactccaggcgcgcaatacagaatctcttgccgtatatgcgcgatggtctgacggtcaatgaggccaggaaggctctcgttgaggacgccacaaacggcgcaacgaacgaacaacgcgagagatacggcttcaaaaacagcaaagccaatcgggcgatgcgccggtatcaggataagcatcccgatctgttgccaccggccccacccatgctcagcaatccggtggtgcgcaaagccatttacgaggtgcgtgaccacatccaggcatatatgcgcaagtccggctgcaagccaaatcgcatcgtcattgagcttgctcgggatgcctatctgccagccgtggttcgtaacaaacagttgcatgagaaccgtgagcgtgagaagaagcgcaaggctatcgttgaacaacacaacctgagccaactatccagaacgcaacaggaaaaggcggtcaaacgggtattgctctgcagggaacaaaaggaccagtgcgcctactgcggcaacggcaacaacacagtaagtgaaaaagcggcggcagaggggaatggggtggaggttgaccacattatccctgagagccgtggcggagacagtggactcaacaatctcgttctgtgtcacacggactgcaatcgaggaaaaggaaacaaaacgccgcgagaatggctcacgcaggatgaattcggcaaggtggagcaacgcctgcgccacctgaagaacgaaaaccccgtcaagtgggataacctccacaaggaagtcaaagaccttgagggtttcgttgcatcgcagttgacagatactgcatacgcggcaaagcaggtggccgaatggctgcgagcggtcctctatgacggagaaaaggatggagtgcgtcatgttttcacgaccaaaggacgatacacagcctggctgcgcagggattgggggctctttcctgaccgcaaagcggagataccagaacgcaacgatgcgagcaaggagtcggccttaccacggcatgaaagcgaaagcaaaaccaagaatcgttcggatcaccggcaacacgccatcgatgcagtggccattgcgctgaccagcccggagcgactgaaggaactcgcgatggcaattaagcggtgggaactggcgaaagcggatggcagagcggctcccgagcgagagccattagacccaccgtgggccgacttcgattcgtttcgcgcccaggttatggcagaatgggaccggatcatcgtgtctcaccgcccccaaaggcgacggatagcgggccaacttcataaggatgagcacttcggtgcgatagccggtgacgagaagcattttaccaaacgcatattcgctgcggaactgaaagcgaaccatctgcgcgtgcccaagggatgggaggaactccgcctgctcttggagaaggcgcctgcaagagcgcagcagagaacaatacggaacaagatgctggcgttggaagatgtgccacccaccaaatccgggatcgttcgcgaccgatggttccgcgaggagctgcgtgaatgcctgcggcggaacggcttcgatccggacgatctgtccaaggacaaccaatcggcgaagaagtacaaggactgggtcaaacaaaagggcttggtcctggaaaacggtgtgccggtgaggcgaatcaagctactatgcacgttgagcaaaccggtcgagatagaacgccaacgattcaaccttgtgacggggaagatggagaaagatgttgaccccagatctgagaaggattcgcgatttgagcggcgaaggctgcgcgtttacgagtcgcggaacaaccaccacatagaaatccgggagaaccagaaggggaaatgggtgggagaggtaatccccaactggcaagcggctcgccgggtgaggccatccaaagagtccgctgaagaaccgcgacccgctgtggaccgcagcgacaacaaacaaggccgctttgttatgtccctgtccattggcgaaataatccacatgctccatcccaacacgaagcgcccagggtatttcgtcgtgttcaagattgacgccacgaagaccgttcacttcacacggcacttcgatgctggccgagacaaagcgactgacaaagctccagcgagagaagatattcccgtgactccagctgaccttcagagactggggattcctcctgagtcgcatccgcagaaggtatgggttggccctctcggagacttgaaagtcttggtgcgggattaggacggtgagccattgagcgttcgtcaagtgccctctcgcaattgccgataccacgtgggtagaagcgctatttcggcagtgagaggtgcacccgatgatcaaacgcatcgtcgagatatcgtcggcacggacgttcttatcggtccggtacgggcagttggtcatcaaggagggcggcaacgagctttcgcagattccctgtgaggatatcggcgtccttctcgtcgaccaccaggggacgagctacacgcattccgtattcaccgagttattggacaaaggggccgcaattgtcctctgtggcggcaatcatcatccggcgggaatgctcttgccgctcgaaagcaatcgcgaacagggcgagcggttccggcagcagattgaggtgaaagagcctgtcaaaaaacgactttggaagcagctcgtccaggcgaagattcagcatcaggccaggatcgccggcaaaggcacggagacctatactgccctgatgaccctgcgccagagggtgcgatccggcgatccgcagaacgtcgaggcacaggccagccgtaagttctgggcgtcgtacctgcaaggtatcgaattccggcgtgctgtagacggggccccgcccaacaatctgctcaactacggctatacagtgatgcgtgcggcggtggcacgcgcactatgctcggcaggtctgctcccatgcctcggcgttcaccactgcaaccgctacaacgcttttgccctcgccgatgacgtggtggagccgtttcgcggatttgt

SEQ ID NO: 2551 - DNA, 23681 bp, synthetic construct
  source 1..23681: mol_type = other DNA
  misc_feature 1..23681: note = Synthetic
attattatttcaaccgcgtcggatttgccaacggtacgggaatcgtgctggactccccgttcgattacgccaaacaggtgcgtctgtatctgccgcgttcgatgccgctgccttccgaagagagctattacggagccgtgtgcgacgagattgtccgtttcctgaaattttcaaacggccgcgcctttgttctgttcaccagttacggcatgctccgtacctgcgcggaggagttgaaagacgagatccgggagctcggactgaatctgctggttcacggcggggaactttcccggacggcaatgctccagcagttcaaaacgagcgatgtgccgtcggttctgttcggggcaacgagtttctggaccggggttgacgtgccgggagaggctctgagcaatgtgatgatcacgaaactgccgttcgccgttccgtctcatccgctgatcgaagcgcgtctggagcggatccggcagaacggcggggagccgttccgcgattattcgattccggatgccgttctgaaattccgtcagggagtcggccgcctgatccgcagcaggaccgatcagggaattattgtggttcttgaccgccggattgtcacgaaagcctacggcgcccgttttctggattccattccatcgtgtcccgtggagtacttctgatctcttcttccgctatgctgtcggcaggatgcggtgaattgcgcgtgcggcggcggatgccagatcgtccgcaatgacgccgcgggaaccgcatggagaaagcagttcgcctgcgagtccgtgaacataggctccgagacgtgccgcatcgtatgcggaatatccctgagcgaggaacgaaccgcagattcctgtcagagtatcgccgcttcccgccgtggcgagggcagggcagccgctcagattcagactgtacgagccatccggcgaggctacgaccgagcgacagcctttcaggatcacggtgcagcccgtgcggatggcaaggtcgagagcctgttctatgcgtgttttctgtccgtcgagtccaaatgccgtttgcagacggcgcatttctcccggatgcggcgtcagaatcacggattctccatgcgattccagaagcgccggattttgcgcgatcaggttcaatgcgtccgcatcaaggaccagcggcaggttcgtcagaatgagtttatagagaaacggaacgctttccggacggtccatcatgcccgggccgaccgcaagcgcggttttgttttcaagttccagttcgagttccggcagagagaccgcattgaatgccggagctccgttgaccggcagtctgcgcaggatcagggctttgcggacgatgcagtggatttccgcggtttccggcagcagcagggagacgagtccgctgccggttcgcagagccgcttcggcagagaggaacggagcatgggcgtagttgcgtgagccgccgaccacggcaaggtgtccgcgtctgtttttgaacgtgtcaaacggttcgcggtgaagcattttccgtgcgtcggagagggagaagacggggaatccgtcgccggcttcttccagatagtcgtcaggtatgccgatccgggcaatctcgatccgtcccgaagcggcgggtccctgttccacgagcattccggttttgactccagccatggtgaccgtgaggtcggccgtgatatggagcgcggcggttccgtcgtccgcattcagcccggacgggatgtcgatggcgataaccggtgcgttggaggcattgacgaggcggatccagcttgcggacggttcccgcacttctccgcggattccggttccgagaagtccgtcgatgatgaccgcctgttcgggaatatcatcggcggaaaactcaaagcgggcgccgtttttgagagcctgcggcatggcttcgaacatttccgccgcgtctccggtcagttcgtcgggacgcgccgtcatgaagaggtgcacgggacgcccggactggtggagctgccgtgctgtgacgaaagcgtcgccgccgttgttgccttttcctgcgagaattacgaattccggagaatcgaatccggcggaaaagcgcaggacggcgcgtgtgagagcggtccctgcattttccatgagcgtggttccggggatcccgtattcttcgatcgtgcggcggtcgagtgcccgcatccgggcggcggaataggatttcatggcagtcctccttctgttttttgccgtaaaatacaccttgcggaggtcgtttgcgaatttttcttgtgcatttttcggcttttgacttgattttttcctgaatcgggttaaaatctctgtggataacagaacatattggaggtttttatggcagatatggatgatttgactccgtggctcaagaattttacaccccgggcaaaacacgttctcgcgcttgctcagaaagaatcggagcggctcaatcatgattacgtcggtacggaacatcttttgcttggcttgatttcactcggggagggggttgcggtttccgtgctccgctccatggggcttgatttgaataccctgcggttcgaggtggaacgtcagtttggaaccggagggcagaccaaactggacggcccggctccgttgacggcgcgtttgaaaaacattatcgtgatgtccgccaacgaagcgaaatccatgaattacaactacatcggtacggaacatctgctgcttgcccttctgcgcgaagggcagagtgccgccgcgcaaattctgcgtagtctgaaggtcgatgtggaacgtgtccgcgatgaggtgatcaagacgcttgatccgaacttcattccgggtgaggacgctccgcaggaggcggatgattccgccgctccgcagcagacaccgtctgctccgggtgatccgcagtttcagacgctgaacacattcggacgggatctgaccgagattgcgcgtcagggcaagctggatcccgtgatcggccgcaagaatgaaattgagcgtgtgattcagattctctgccgccgcaccaagaacaaccccgtgctgatcggtgaggcgggcgtcggcaaaacggcgatcattgaggggcttgcccaggcgattgccgccggaaccgttccggagattctgcgctccaaacatgtgtttgctcttgatcttcccctgatgatcgccggaaccaaataccgcggtcagtttgaagaacgcattaaagcggtgatcgacgaagtgcgcaatagcaaggctgtgattctgtttatcgacgaactgcatacgatcgtcggcgccggcggggcggagggggcgatggatgccgcgaacatcatcaaacccgcgctgtcccgcggagaactgcagtgcgttggtgcaacgacccttgacgaataccgcaaagggatcgaaaaggatgccgctcttgaacgtcgtttccagtccgtgatggttgaaccgccctctgtggaagacaccatccggattctgcacggactcaaaggtccgtatgaggcgcaccacaatgtcgtatatacggatgccgcgctttccgccgccgcgaaacttgccgaccgttacatcacggggcgttttctgccggacaaggcgattgatgtgatcgacgaagccggagcgcgcgcccggatcattgatactccgcagcagcccgatgtttcggcgcttgaagaccggatccgctcggtttgccgggacaaggagaacgctatttccgagcagaactatgaagttgccgccgaatgccgggacaaggaacgtgctctgcgcgccgaactggagggcaagctggaggagtggaacgagctgtgcaggagtcgccgtccggtgattgacgtcccggaaattgcggtaatcatttccaagctcaccggcgttcccgtctctcagatgcaggagggggagaccgcccgcctgctgcggatggaagaggagttgaccaataccgttgttgggcaggcggatgccgtcagtgcggtgtcgcgtgctctgcgccgttcgcgtgcggatctcaaagatccgaaccgcccgatcggttcctttattttcctggggccgaccggtgtcggcaagactctgcttgcaaaagcgctggcggagtttattttcggggatgccgattcgctgattcaggtggatatgtccgaatacatggagaaattcaatgtgagccgtctggtcggttcgcctccgggatatgtcgggcacggcgagggtggcgaactgacggaacgcgtgcgccgccatccgtacagtgtcgtgttgtttgacgagattgaaaaggcgcatccggatgtcatgcacctgctgcttcagattctggaagagggtaaattgacggacagtctcggacgtcgtgtggatttccgcaatacaatcgttattatgacaagcaatctcggcgcggagcagatgatgaaaggttccggaatgggatttgagggggcgttcaagcaggatgagtcgttccggaagattgcggaccgtctgattgaaaccgcgaaaaagcggtttaaaccggagttcatcaaccgtattgatgatgtgatcgtgttccggcgtctggaacgggaagatattctcaagattgtcaatctggagcttaaaaaagtctgtgaccgtttgaaagagaacggcaaggagcttgtaattgaacagcctgtgattgatttcatcatcgaaaaaggtttccagccggaatacggggcgcgtccgctccgccgtgcgatcgagcgttatatcgaagatgaacttgccgacagcatcctgcgtggtttccttgcggaggctcctcgtatagaagcgcgtctggataaccggaaagtggtgtttttcccggttgttccggaaagtcctgaaccggagtccgctcccgcttccaagatggtgcatacccgtaaaacggcgaaacggccgtcgtcggaaaccgcgaagaaacgcggaaccggtttgcggaagaaaaagcccggaaccgatggctcggagaaacgtaaaaaatgagtcctgtacaggaggaaatctttgacatcgtggatgaagccgaccgcgtgatcggctgtgctccccgctcccgctgtcatggggatccgtcgctgatccaccggacggcgcatgtggttgtgtttcatccggacggcaagcggattctgcttcagcgccggacttggagcaaggatattcagccggggaaatgggatacggcggttggcggtcatcttgatcgcggggaggattatgtgactgccgcccgtcgtgagatgacggaagagttggggcttgatagtgctctccccctccgttttctgtttcattcacggattcgcaattccgtggagtcggagaatgtcggtgttttttctctggtatcggagggtccatttacttttcagcgttcggagattgacgaggttcgtttttttacccgtgaggagctgacatcctgtcgtttggagtgtacgccgaatcttcttgttgagttggaagagttgagccgtcgtgatttattctgattcctgttttcagatttccggaattttattgaaaaaattattttttttgctttttcgacttgatttttgccgaaagagtaatatattaattgcatactccaattactggatgtggcggggtagctcagttggtagagcaacggactgaaaatccgtgtgtcaccggttcgagaccggtccttgccaccatttttttgtctctttgccggacggacaccacgttcggcttttttgtttccctgttttgagcgttgattttcaacgatttgcaaaatcagagaaaaacgaagattctccgtttgccaccatttccgatgcagattccctgattctccagcaaattctccgtctgtctcgtgtccgggacacatggattatcattcaggtttcttttcagactagagtaattttctccattgcagagtatcgttctgaagcttggtgcgaggtgctcccccttcgttgtacctttgctgaacttgagtgcaagatattttccatagctggacagagattcgaagcttttgggcagagaagggcacatattttatggtaacctccaattacaaatatgcttgaatttcaaaaaaatgcgttgaaaaacgaacaagatgcagtagattatttctcaataagggtctctgtctggaatgggcataaagttccctgttggcaaggttataataaggatgtcggcgaaattactgcgaatttgttgcacagtctttttaccatgttgtgaaggttgaggaaaatgccggattttaagctgattcatggaatttatgagagtgtaattaatcacgctttggcagagcgtttggcgcgtttggcggagaacttctctgtaaccaaagaacagcttgattccgaggaaagctcgtttactctggcgctgcatttgacaaaactgattgcaaactcgcttgccgggataaaaggcgatgatcgcaaacagaaacaggcgcaattttgcaatcagttattggatgtgatcgggaagaatgatacttcgtttccggtggaatcggagaagatcgtggaagatctgatgtatcttctgcaaattcaggatatgcgcaaaaagccgctttcacgtcccgacacgcccctgaccaatgccgccctttttacaggtacagcttcggatcttacgctcgaaagtgaactcaaaaaggagattcagaccgctgatcgcatcgacattttgtgttcctttatcaagtggagtggtctgcgtttaattctaccttatttgcaagaggcaacccgcgaaggtaaaaaactccgtctgattacgacaagttatctcggcgccaccgatttaaaggcgattgacgaactgcaaaagctccccaatacggagttactggtctcttacgatacagaacgcacccgacttcatgcaaaaagttatattttccaccgcgacaatgggtttggaacagcgtatatcggttcctccaacatctctgctccggcgttgaccagtgggctggaatggaatttgaaaatcagtcaatttgaatccccttatctgtgggataaagtttgcgcgacctttgaaacgtatcaaaacacaacggaatttacccgttatgatgaaagttcccgcgggcgtttggcgaaagctttgctccacgaaagcgggaaagatcaggacaaagaagactttatggcgtttatggatgttacgccatatccctatcaagaagaaattttagaccgaatccgcgcagaacgcgaaattcatcagcggcacaaaaatcttgtcgttgccgccaccggaaccggcaagacggtcatcgcggcgttcgacttcaaacgaattcggaaagaacagcccaatgccaagttcttatttatagttcaccgggaggagattctcaaacaaagccgtttcaccttccggaatattctgcgggatcagaacttcggtgaattgctggtcggtcagaataaaccgacgaatctggaccatcttttctgctcgattcaaagtctgaactcgaatgatctgtgtcggaaactcccggcggatttctacgattatattgtgattgacgagtttcatcacgctgccgcggatggctatcaggaacttctggaacactttacgccgcgcaatcttctcgcgttgactgcgacgccggaacgtcacgacggcttggacgtgttgaaatattttgattaccacattgccgccgagatccgcttgccggatgccatcaatcggaagttattatcgccgtttcagtacttcggcgtttctgactgtgtcgatttgagcaatctgcactggaccaatggcggatacgataaagcgcaactcaacaatatttttaatggcaacacccaacgggcaagcctcgttgtgcagaagatgcacgaaattcttttggacattgcacaatgccgggcactttgcttctgcgtgagtcaaaaccacgctgcgtttatgaatgactatttcaacacgcatggggtcaaatctgcggtgctgaccgcaaattcgactccgcaagagcgtaacagtgtacagggacgtttgatctcccgcgaaatcaacgtgatctgcgtggtggatctctataacgaaggtgttgatattaaagagattgataccgttttattcctgcgaccgaccgaaagtctgaccgtctttttgcaacagttggggcgtggattgcgacttcacgaagataaagagtgtctgacggtgctggactttgtaggcaatgcacataaaaatttcaattttgagtatcgtttccgggcaatgctgggagcttccggtcagaatgtggcggacgaattggagcatggatttccgcatcttcctgccggttgccatattcagttggaaaaagaggcgcaacggcggattctggaaaacatcaaaggcgcgattaccagcgggcgtcaaaacatgcttatcagccggattgccacgtttgagaatgaatccggcatggcgttaacgctggaaaattttgtggattatcatcacttgtcactgaccacgatctataaaaaggcgcttttcgcccgcttttgtcaaaaagcccatctccgggaagattttaccattgccaacgaagatgagttgcggaaagggctgttgcggatttgtcacttgaactcggcgtatcagttgaaaacgctgttggagttgttgcaagcgccaagcgaacgtctgaatcacctgccgagcgatgaagaacgcattttaacgatgcttttctttacattcggcggtcgaaacagcggaatttccgacttgcgccaatttgtggataatctcaaggctagcgacattttctttgccgaactgattgctgttctaaattacctttttgaacatgcagacttggtaacagccaagccggaactgccttttgcgtgtccattggaactccacgcaaattatacgcgcgatgaaattttagctgcgctggggaactgggcgctcgcaaaatcgccggaaatgcgggaaggcgtgaaatacctgccggaaatcaatacagacatcttcctgataacgctgaacaagtcggaaaaacaatattcacccacgaccatgtatctggattatgcgatcagcgacgatctctttcactggcagtcgcaaagcaccaccagcaccgaatccgcgacaggcaaacgttatttgaatgggacaagtacggttttgctgttcgtccgggaaaataaaaatgccgatggagtcagttccagttattgtttcctgggaccagccacttatgtatcccacagcggctctaagccggtcaatatcacctggaaacttcgttataaaatgcccgcgaggttgtgtcgcatgaccgaacgcatggctatcgcgtgagggtgattatggtaaaaaaatttgctcttgagatacttcagagataaatttagaggagaaacaggagatttgttgtaaaaatgaatcattcgctactgatttctgcgtggaaatgtctgaaaacagcgatctgatacggtttcagactcgtttttccccttccagataatcctcccctgccatttcttgtatttcttccgaacgaatatcccgttcggctttttattgcccatcttttcgggaaaatgtcaacaatttggtctctttcccggtatgaaccatataaatcaggggttcttttgcggttgaattgaggtggagtagcgaatgcaatgacggtgtttcattgcggtatttttgttatatgctcaaacccgtcaaagagtgtcgatgaaccgatttttttatttttttacatatttgtatttgacaacttgatgttgtaactgtactataaaaataggaaatatattggaataaaaagacgtccggcttgtgcaaccggacgttcaggtgaaacacctacggcatatagccttgttgtgatttgatgtttaacctttaaattagcagagtttatggaaaagtcaaataaaatctgaaaaaaaggaaattttatgcaaaaagaactgggaattgacttgggaacgaattctttgggatggggaatcgttgaaagtaatactgttaaagattgcggtgtgcttgtttttgaacagggaattcctcaggagaaggggcgggaagcggcattgtctcctgcggcggaaagaacggctttccgtgcggcaaggcgattgaaattccgtcgccgcttacgcaaatatcataccttaaagatcctgatagagcagggaatgtgcccgcttgcgttggaagagttgaaccgttggattcggcagggagtttttcctcggggaaatgaaaattttattcattggctgaatagtacaaaagaaagaaatccgtattatttccgtgcccacgccgcaacggaaaagattccgttaccggatttgggacgggcgttttttcatatcgctctcagacggggattcaaaagttccaaaaaggatcaggaaaaagaggactccccggagatgcaatccagcgaaatgaaagggaaaatcagagagttgaaactcaagctagagagttccggcattactcttggacaatatctttatgagcgttttcaatgtgaaaaaaagatccggaaagagatccgctgcggacggaaagaacattatgagccggaattcgagcggatttgcgacgtacaggagattgatcccgaagttcggaaggcgttgcatactgcaatttttatgcagcgtcccttgcgctcgcaaaagcatcgggtcggtaaatgtccactggagaaacgccattcccgctgtctgatttcacatccgctgttcgagcgttaccggatgctttcttttatcaactcaatcaaagtaaaaaacgtcggggataaggagttccgttttttgacggatgcggaaagaaggctcgctgaaactgtttttatggtgagcgcacccagtttcaaggtcgaaagaattctccacaaactgtttccggagatcgggaaaaagaattacgaaggtcctcggtcggaaataaattatcgtcccgaccatacagtagcttccgcttctgttactcaccagttgtccaaaatcctgaaatgcaatgatctttttgcctggcgtcattcttatgtcacacggcatggcaaagaggcggtgatggatgtacaggcgctcttcgacggcttgtattatttcagtcatatttatgatgaagatgacgatgataaagcggctctgaaatttgcttcggaacgtgtcggattgagtgaagatgcggcagccgcgttgatcaaaataaaaatcccggatggttatgcgagatacagtctgtgtgccattcgcaagatcatgccttttcttgaaatgggatatgtggaacgtcatgccgtgtttcttgcaaaactgccggatattatgggggaatgttttgaaaaccggaaagaggagctgctccatgattttcagcaatgcgttaatgattatgtgtgggaaaaagagaatctttcacgcagggaacacgttcagggacgtttgctgtctctgacggaacgcctgcggaatatgttggaagagaaatggaagatcatgccgccggaattcgaaaagctgtacagttatcaggagaattccaattatcaggattgttccaaagaggggattttgccgcgcattgaactgggaatgatctacaatccggtcgttcatcggtctcttacggtcttgcggcatctggtcaaccacctgcggcgttgcgggaaaatagatgcagataccgagattcatgtcgaattgacacgggaggtgaatgataaaaatcatcgtctggcctatctggactggcaaaagaaaaatgagggtgaacgagcccaggcagtcaaggcttttgaggaatatggaatcagtaatccgactgaaactcaaattctgcgttggtgtctatgggaagaacaggggcatcgttgcctgtataccgggcggaaaatagaagctggggaaattttttctccgactgccgattcggttgatatcgagcatacgattccccgttcacggggcggagataacagtcgcgaaaatctgacgttgtgtgattcacagttcaatcgacacgaaaaggttggaaaactgccatcggaatgtgataattaccatcagccgaatggaatcctggagaatttgaagagctgtatccagccgaaactggaagaagctgaggttgcgtacagcaaggcatcggcagcagctcgaaaagcaacgggaatccagcgggcaaatgcacggaagaaaatgctgtatctgcgctttgcgcttgattactggcggacaaaagtcaaaacttttaaccttgccgcggatgagatcaatgaggattttacgttacgccagttgtcggcgacaggagtgatgacccgtcatgcgctgcagtttctgaagtcggtgtattcccgtgtttttgcaaacagcggcaaaatcacaaaatttgcccgggagagctggggagtccagaatcaggatgaggcaaaagaccgttcggatcatattcatcacgcggtagatgcgattgtggttgcagcactgaaccgtaagacgcttgcccggatttctgcggcgtatcatgaatgcgaagagctcatgcaggggcgcggggcgttgaaaatcgcttatccgtgggagtcgttcccggaagatgtgcgtaatgcggtgaatcagattctggtccgacatattgtgcagcgcaatgagatgaagcagacgaaacgcaatggagtctttcttaccagtccggtaaagttgcccgacggcagggtaatccgacgggttcccgccgccggcgatactgttcggggggctttgcataaccagacatggtacggttgcatcagacagaatggtgcagaaaaatttgtggtgagaaagccgtttgattccaatgaattcaaacagttgaaagatctggaaaagatcgtcgatccgggtgtcaaaaacgcattgctggaacagatccgcaacagcggaatggacttcaaaactgcgatgcagcaggaattccgcatgaaaaccaaaacgggaaagtttgatggtccggtaatccggcgggttcggatattctgttctatgcaggaaccgttgaaaatcaaggaacagacctattgctctgagaagacatataaaaactactattatgccgaaaccgcaaaaggcagtaatttcatggtcgctctttaccggaaaccggagattccaggaacggaaaaaacgtatgaatatcggctgatctctctttggaattgggcgaaagaacaccgtcagtccggctttgttccctatgagcggagagagaaaaacttggattttatcggtttcatagctcccggaacgatggcgctgttttatgaaaaatctccggaagaattgcatgcgttgccaaagtccgagttgcagaaacgactgtataaaattacagagtttgaaaaggatggagaacggttgaggttacacttgcgttggcatcgggaagccagagaaaagggaaaggctacggaagcaatggaaattatgcaaatgaagtcaagtgttgtatcatacgacatccctgcttttttgctgcggatttcccaaaagagttatcagaatcacttgttgtttgatggtattgactttgagtttactgctgatggagaaatcattttcagggagtgatcggcatgttgaaacggactttgtttttcggatctccgggtaaactgtccaaaaaaatggcttgctggtctatgaatccggcaagccggatacatgttatggaaccgtatcgaccgtttgcggatgagttggtttttgcgaaccggcaatatttctctgttccggctttggagaaggagcataaagcgagactgcttcagttgctgattgcggatgtgaagataaatggggaacgtcgtccgcttatgaatgcattatcgtatacgaccgcttcgttggtgcgttgctttcagaaagaggaaaagtgcatatcatatccggaattttatgaatcatgagtatacggtttaatgcgatcagcaggtataagccaatgtggatctacgcaatgttcgatttaccgaccaataccaaaaaacagcgggaaagtgctgcggattttcggaaatttttagtgaaagatggatttgcgatgatgcagtattcggtatatatccggaattgtgcctcgtttgagaatgcggaggtacatatcaggcgaatccgggaagcagttccggaagaggggattgtttccattcttaaagtggcggatcgtcaatttggagatacgtgtacatttgtcggtcataagcgtacgcctccaccggaagctccattgcaactggaattattttgattatctttttcttcgttttcgggtatttcttatcatccgacgcgaatttctccgcatcaacaaccgacttaaagtgcttatattaaaggagttgttactccaataatatagcacatccttgaaaaacatcaaatcacaacccgccttacacgatccgggaactgaacgagaatatagcacatctttgaaaaacatcaaatcacaacctacgaggaggaagctctgattcatgattaatatagcacatccttgaaaaacatcaaatcacaactagatgttgcggacgtagctggacggcaggaatatagcacatccttgaaaaccatcaaatcacaacccttgacgagatccaccaggtagcccgtgacaatatagcacatccttgaaaaccatcaaatcacaactataatgtgttggcgggcggctccaatatagcacatccttgaaaaacatcaaatcacaactatcacgttcggagatatgaattttcagctaatatagcacatccttgaaaaccatcaaatcacaactcgccgattctatagcatccctcccgtgcaaatatagcacatccttgaaaaacatcaaatcacaactagatgttgcggacgtagttggacggcaggaatatagcacatccttgaaaaccatcaaatcacaacctttgccggagttgattcgacgacggtcaaaatatagcacatccttgaaaaccatcaaatcacaactaaccaagggtaacacgggagttcgccagcaatatagcacatccttgaaaaccatcaaatcacaatcggtttccggattcggggcggaactcttttaatgtcaaccgtgacaggtcgtattgttcccggcttttcctttcttacgcacgttcatcccctgttttcaataaaaggtcggaccaaagagtacgttccgcaatatgcgccgcaccaacggattgccgcagatctgacggttatggttccggaagtattccctgtccgcttcgttattctcggaatagcggttgaagtaatcgttcagaacttcgccgactgctccggaacggctgattccagcggcacagttgatgaaaagtccgtgcgccggatcaatccgtttgacgaactcggcaatccggcgtgccatatcttcatcgaataaaatcaagggactgcccgaatccgcgacggtcgtatcgtcgaaactcaatttcaacacgttttccccggagaccggtacagcgcatttgtcgtccgtttcgaaagaattccggatcgttataaagttattgattttccagaaaggcgaatccggctgttcatagaccggtacgggcccgctgttataataatactggcgataccagttctggctgaccactcggattttcatttgtccccgtctgttttacaataccgttccggcaatccgaatagaacttctatccggagattctcttctttccgcattatggtttcaagtgctgcaatacaaattcagaggaaacatagcaccaatccgaaaaaaagtcaatagcgtggacggtctctgacaggaaaaattgattttgctgaaaccaatggaggaaatctgacgaaacaaggatgcggggggacgaggcggcaaacaattttacaatacagacggcggaggatgacgggaccgcgtatgtctgcgtcgcggtgattcataaaaaagcagaattatatttttttttcgtgtttgttttagaaaaaaaatttttcgtttcatatatatagtaaaagggtccggttatcgtctgcggaagggaatgcccgcggaatttgccggaaaagaagtcgtaaacagaaaaaattatttttttgaaattgacggaggaaatctgagtatgggaaacagttttgctgtaacaggaacggacgcattttcggcagcgctgccgtctgatctggtagtggagccgtccagcaaaattacgcgtttgtcggatgatacggtcgtaaacaacctcacaatattgactgtggcggatgacggaacggtgtataatacggttttgctggtcaacagtgttctgacggtcgcgggaaacattgccaacgatggaacgctccggatcaacaacatcggcagtctggtatccggaggcacaacggagatcggcggttccggcacaacggagatcaaaggttcgctcggttcctccgactggtccggcggctcctttgtcatagcctccgagcagacgcttcaggttaccggagccgtgtatgccgatgtcgtaaacagtggaaccgttaaaacgaatggagaatggatcgggcagagtgcggacgatccgttaaagattgagaaccgcggaacgattgacggttatgccggttacagccattttaccaatgtttccatcgtcaattcggaaacgggaattctgaagacgtccggcggtcttatatatctgaatgagggttcttccgttaccggcggaactttggacggcgctgttcagttcagcaccggagacggtgaggcatccattgcaaacctcacgtttgcagaaaccgcatctgccgagaccggttccgttgccgctgtgagggcttcggggacgattacgctcaacagcacgctgtccaacaagggtactttgtatgcggacggcatggtcgctcttggcggtagcggaaagctttacaacctcggaaatctgggaaaaagcgactggtccgattccggaacctttgtaatcggttcgaatatggcggtttccggcggcgggaatatttacagcaatatcatcaacaacgggctgattgatgcggcagtgagttcgcatatgtatttccgcgggaaatcctcctccgaaagaactgtgattgtaaacaataatacgattcaggcgtcgagcattcttgaaacaagcaatgtttatattaacaacgccggaggagcgctgaaaagtgcgggtggcacctttgagctgtatgacggaaccgtgatttccggtggaactctggacggctcttttgaattgagcaaatcaagcggcagcgtggttaaactggaaaatgtgactttctcggcgaactcctccgtcaagacaggtccctatgtttcaaagacttatctttcggggaatattgtcaagaattgcaacatcacattgagttcgactttcgccgcggacggagatgcggtgatttccggttccgggaccctgactcttgccggaggcaaactcggcagcagcgactggtccgattccggtacgctgacgttcagcgcgggacagaatgtgctcggatatggttctgtttatggcgacattgtcaacaacggacggatcgtttcccagagcatctacggacttgcttttactggaaaaagcgctgcggaatgtcttaccgtgaaaaacagcgggctgatttccggcggtgacgatgcccgttcttccgtatcgtttataaataccgctctggtaaacagcggaaccatttccggcggggaggggagttgcgtcaatttcgggaattccgtgacggtttccggcggaagtttgaccggggctctgaacttcaattcctctgccggaacgcgactctccgggacggttttctgtaacgccgccgtcagcgtgaaaggcagttcactgaacggcactttccgtgtcggcgacaatgtttccataacaggcggaagcatttccggaaccatgacggtgaacggttctctttccgctgcttctcttgatgcatccggggcggagattgtgttttccgtgtccgcgagggatcggaatgtcctgatccgcaatctgtcggagatttccggcgggaactataccgttctgctgccggaagaaacggcaaacggcagttaccggcttgcttcgggagcatcgtccttccgttctgcgattaccgtcagaaacgcgtcggggcgcgctcttgggacggtgacgcgggattccggattgacatcaaacgataaattctactatatttccgtcgtggatggaacgctttccctgaatatcagggatgctgaagagccggttccggtacctgatcccgatccgacaccaacgcccgaacctgaagcgaacggtccggagctgacaaggaatttgagcgtttccctgaacaacaaatcgtacaaagcaaaattttcatgggggaaggcggcgttggagaagggcgagaaactccagggatatgagatcgttctggatggaaacgcgcttggatttgtcaaatctgccaattactccacgaagactccgctttctgttggcactcatacgttcaaagtacgcgcggtcaatcaggcgggggaagccggagaatggtacggggagtcctttgccgttcaggacgtgacggcaccgcagggaaaaatgaggatcaatgccgatttcaagaccgatgaaaacggagttccggcggtcgatctgaactgggatgccgcggaggacaatgtgggagtgacgaaatatgttgtcgcttacggcagcggaaagaatatggttgagacggagacggcggggacatcgctgcggatctcgaacgttgcgggcaagatgacgttccaggtctatgcgtatgacgctgtcggaaaccggagcaaggtcagcagaaaaaaagtgaccgttcctgatgtggtcgccccggatgccgtgcagaacctcggatgcattcagacggaatccaagtacaaggcggctctgacgtgggatgtcgcaatggacaatggaggaaccgtgaaggctgccggctattatgtgacctatgcgacagcggcggatttttcgggcgcagtaacgaaaaaaacgacgaaaaattcgctcaatctttccaaacttcaggcgaataccatgtattattacaaagtaaccgcctatgacaaggcgaaaaatgtgagcgcggacagtccggtttacagtttcttcgtgaaggatgtgacgccgccctccaaaccgtcgttccaggtaaggaaaacggacgagaatcattatgagttaagctggaaaacgccgaaggagaatgtcggcatcgccgggtatgaagtccggtatgcggctgcccccggcgacttgaacgatccgcttcagtcgtggaaaacggtggggaacagtgtatccctgacactggagaatgccggaggctatctggttcagatgtgcgcctatgataccagcgggaacgtttcgtacagttccgtgaagaagatcaatgtgaaaagcgatatggcattgggctattccgcttcttctctcttgaatctgaatttcggagatgacggcggccggaatctgggacttgccgctgtataatctttcgattttactttcaacaccccccgcccggaaaacggatggcaactgttctgctgtacgtttcccgggcattttgctgttccggagagatgattctgcaagctcaaatttgcagaaaatttgattcttcaccggtttacggtatgattgcgcttaaaatccggcaagtctgtccaatcggtatggagaatggttgatattggttttatgtcccggaaaccaaactaaaacttcaaggagattccaatgccgactgctttgtttcaaaagaaaaccggttctttggtaaggattcacagcgagcctcgccagaggtttgggtcggattatttccgataatccgggcgtatgaatggctcctgaattcgctgcgcggtaagactccggtatttttccggatgccggtaggcattgccgtggatttcggttttccggtatgccctgagttcgtcaatcgggaaggctgccatataaatgccttccgcttctcccgcttcgattaccagcgtatcacgggaacctgccgtatccggccgatagacaattccgtcaaaagcggaagagtgcccgttgcagtccggctgcccggcgggataattgcaggtcgcaatagccaccatattttcaaaggctctggtccgcagttgcgaaagccggttgatttccatcggacaggcgttgggaaccagaatgagttcggctcctttcagcatcaggattctggcgctttccggaaattcacggtcgtagcagatcatagccccggtttttaccataccggcggctgtatcaagttccgttacataaaaatcatcgcccggagtcagatgccgttccacatcgaaatcgcaggtatgcacttttgaataagaaagtgctctgttgccgtggcggtcaaacagcaacagggaatttttgggaccgaccggactggcctccagaaaagtaatgccgattgccatttccaactctccggccaaagtcccgaaagcggcagtgaatttgctgtcttgcggaagcgcttttttgatccactcctccggaaagcggttatgaatgcgatagccgatgctccacatctccggaaaaagagcgatatccgctccctgtacttttgcctgtcggcaacaggcaattcctttttggagattatcttccaccgttgccatcggcagaatttgcaataacgccacattcagattcataacgccgctttcattggttgcttcacttttcctgaatgacgattccggtaaaatatataccggaaattccgaaatacaagcaaccgtcgttttcattcatgacggccgggaatgaagtaatctgtcctttgacagtgccgccttttataatattgaaatcatttcctcgataattgtgcatatcgttcgaatgattttcgctgtaacagcatttgctgcaaatcctgttatcggttgagaaacagtcgccgatatgcgttatattgtaaaagataagaatcaattattccggaagctcatttggagttattcagaacctgaagtcatttatttttcgcgtaccacacgaaagccgacgtcggcatatctgacagacgctttgcgtgcttcgtccttttgctccgttctgcaactggttcttggggatttccacgaaccacctttgatcgctttggtgttgtttcgtctgtttgtggcagtccactcccaaacattgccccacatgtcaatcgcaccacaagcagagagcgtttttgaatatgcgttgacaggtgttgttccatcattttctccacagttgaaatccgcatctttgggcatgtgtccggcagcgagctcccattcgatctctgtgggaagacggtatcggacgtttttgtcattttttgacaaccagttgcaatatgcctgggcatcactgaaagaaacatttacgactggatgattggctttatctgccggcatgctgttatttttccaatcgccgggagcttttgccccggttgcttttacaaactttgcatactcggcattcgtaacgggagcataggcgattgatacgttttgtgcggctccaagcaccggcagataaccatcggcagtttgacgcgcccccggacgcagacggggatcggtaaaacgtttcaaactttgggtgatacgctgttcgcggttttgaatcagctcattgacgatatcttccatctccttaattttgaagtcatgtcttgcggtgcgtttcaattcttccagcttggctttcttttttgccagtactgcatcataattttttccgatctgtatacgcagggctttttcattttcttctgacggattgcggcgataggcttgaatcaaacgctttgtagcctcattcaactgggggcgttctttttcaacagtagtactgtagcggaattgccgggctccattgttcggagcagcggaaacggttatgcctgtggcggcaagacacagcactgcaagagctggatgcataaatgttctcattgttacctccatccgtttatttgtgaattttgattgatttcagttcctgtcaatagaacgaagagttcacttattttattgtatgtttaatttccaatcagttggctgtcgatgaaaagatggatcaaattcttatatgtacatgttgagaacatgcctgatttcggatatgccgagctgtttcctgaaaactgccggaactctcatcctgaaatagaacgttccgtttcgtaattctttcccatttttacacctctgtcggcagaggattttgtgcatcaaatgggtatcatgaaaatcccgccaccattttgttggtgtaagtccgagatttgaaaaaggcgtttttacgctcaaaagtaataaaaaagccgtccaatggacggcgaaaatctgagatggtggtgggagatggattcgaaccatcgaagtcagcgacagcagatttacagtctgccccctttggccgctcgggaatcccaccgattggagcgggtgaagggaatcgaaccctcacaatcagcttggaaggctgatgttctaccattgaactacacccgcttgaggtatgaagcaaaatatacgccgtttttgctaaatgtcaagtcgcaaatcgcgttttttcagcactttttcaggattttcccttgccgggcacaaatccggccgccggaaaaggataatgttccgtttacataaaccgaatggaggcccgacgaaacggcatgcggtgtccggaagtctgcacggtcggacaattccgattcggaaaataatataagatccgcgtagaatccggcgcgtatcattccccggtcaggaagagagaaaatccgcgccggaagagacgtcaggcgcgcgatcaccgtttccaatggctggcccgcctgtcggcataagcggatgaagcggggaaacgaaccgaaaccgcgggggtggctgcggccgatccgctccgaacagggacgggctgtttcgtcggttccgcagcaggtgtaatcctgcaggatgatccgccggagattctccggggaaagaccgccgaacgccgccatggtcccaaccgcatcgcggctcagccattccgtgcagagttccggggcagggcgctgaagaagaccggcaatctctgcaagagtgcgtccggcataacacatcatgccgggaagagcggttgagcagagaatgatcttctgccagtcgatcgtcattccggcgagaacctttgcgatacggcggcattccgccggagaggcggaaagagcctgctggatcgccgcgtccgtcatgctgtcgtaaggtggcggaagaatcacgctcaggctcgtctgaccgtatctgtaagggtagcggtcggcagtaacccggagacctccggtttgtgccgcggctattttgttcagaagtccgtcgattttatgccagttgcgcggctgagctgttttcagatggctcaggtgcagtctgccggaacctgcgcgggcaatgttcatcgcttcctccacggattccagaaga

SEQ ID NO: 2552 - DNA, 6082 bp, synthetic construct
  source 1..6082: mol_type = other DNA
  misc_feature 1..6082: note = Synthetic
gacttcctgtttctggagttcggctgcaagccgggataccgcggcagtcgttgctccagttccctgcatgcgtttccggatgatatggaaaaagcgcttccatcgctatgagttgtgagtccgtcttttttacatctgtgggttgtctttctttggggatgtctctgctataaaacgagaagatggttcccgctactgtgcaaatttggaccctatgactgcttgttttattgtaccatccatgggtgaaaaacacttttaaagaaattgattacagggaaaatgactgttccaaaccaaaaatgttttgccaatcagaacaaacaccattgcttcctcaggggtattttatggatttttgcgaacgttccgaatactccaactgtgcaggaggaaaaaattcctggcaaagcgtgtgttgtccggggtgtaaacgaccgcttacccggcagccgggactggaacggccgaagcgaattgtaatgcgggatacaatagatttttattactgcatgcgaagaattcagatcgaaaataaaaaaatagttatttttagtaattgtgatacttgacaatctgggttcattgttgtagtataaatgtggaaatatgtcgagatcggtaaaaaagacatccaacttgcgcaaccggacgtagaggtgaaacacctacggcatatgagccttgttgtgataagatgtttagctttaatttagcagagatattgatgaagtcaaatagaattagagaaaaaaggagttttttatgcaaaaagtattgggacttgatttgggaacgaactctttgggttggggaatcattgaaaataatacagtcagagattgcggagtacttgcttttgaacagggaatccctcaggagaaagagcggaaagctgcgttgtcaccagcggcggaaagaacggctttccgtgcggcaagacgattgaaattccgtcgccgtttgcgtaaatatcataccttgaaaattctgatagagcaggggatgtgtccgcttgcattggatgagttgaaccgctggatccggcagggaatttttccccggggaaataaaaattttattcactggctgaatagcacaaaagagagaaatccatattatttccgagcccatgccgcaacggaaaagattccgttgccggatttgggacgggcattttttcatatcgcactcagacggggattcaaaagttctaaaaagaatcaggaaaaagaagaatcgtcggaactgcaatccagcgagatcaaagggaaaatcagagagttgaaactcaaacttgagagctccggtatcacgttgggacaatatctttatgagtgttttcaaagtgaaaaaaagatccgtaaagagatccgctgtggacggaaagagcattatgaaccggaatttgagcggatttgcgatgttcaggggattgatcccgaagttcggaaggcgctgcataatgcaatttttatgcaacgtcccttgcgctcgcaaaagcatctggtcggcaagtgtccactggagaaatactactcccgctgtctgatttctcatcctctgtttgagcgttaccgtatgctttcgtttatcaattcaatcaaaataaaaacggtggaggatcaggaatttcgctttctgacggacacggaaagaaagcgtgtcgaatctgtttttatggtaagcgcacccagtttcaagtttgaaaaaattctccataagctgtttccggagaccgggaaaaagaattacacaggtccttgtccggagatgaattaccgttccgatcaaacggttgcatccgcttccataacacaccagttgtgtaaaattctgaactgcgatgatctttttgtctggcgtcattcttatgtcacgcggcatggcaaagcggcggagatggatattcagactcttttcgatggtttgcactatttcacttcgatctatgatgaggatgacgatgataaggcatttcggaaatttgctttggaccgggtcggtttaagtgaggatgctgctgtcgcactgatcaaattaaaaataccggacgggtatgcgaaatacagtttgtgcgccattcgcaagatcatgccgtttcttgaaatgggatatgtggaacgccatgccgtattccttgcaaaactgccggagcttatggggacatgttttgaaagccggaaagaggaattgcttcaggattttcagcaatgtctcaacaattatacatgggaaaaagaaaatctttcgcgccgggaacaggttcagggacgtttgctgtctctgacggaacgtttgcggaatatgctggaagaaaaatggaaaatcatgccggcggagtttgaaaaactgtacaattatcaggagaattccaattatcaggattgttccggagaggggattttgccgcgcatagaattgggaatggtctataatccggtagttcagcggtcgcttcctgttttgcggcatttggtcaatcacctgcggcgctgcgggaaaatagatgcggaaaccgagatccatgtagagttggcgcgggaggtgaatgataaaaatcaccgccttgcgtatatggaatggcaaaagatgaacgaggaggaacgggctcaggcggtcaaggctttcggagagtatggaatttccaatcctaccgaaaaccagattctgcgctggcggttgtggaaggaacaggcctgtcgctgcctgtataccgggcggaaaatagaagcggaggaaattttttctcagacatccgattcggttgatatcgagcatacaattccccgttcacggggcggagataacagccgggagaatcagacattatgtgattcctggttcaatcgtcacgaaaaaatcgggaaattaccatcggaatgtgacaattaccgtcagccggatggtattttggacaatcttcggagttccggctttttagagcggcttgaagaagcggagaccgcctataacaaggcgtcagcagcagtccgaaaatcggtgggagtccatcgggcggctgcgcgtcagaaaatgctgcgtctgcgttttgcgcttgattactggcggacaaaagttaaaacgtttatgcttgcggcggatgaggtcaatgaggagtttgccctgcgtcagctgtcggcgaccggagtgatgacccgtcatgcactgcagtttctgaagtcggtatatccccgtgttttcgcgaatagcgggaaaatcacaagttttgcccgggaaagctggggactccagaatcaggatgaggcaaaagaccgttcggatcatatccatcatgccgtggatgcgatcgtggttgcggcactgaaccgtaagacgcttgcccggatttctgcggcgtaccatgaatgcgaagaacttatgcagggacgtaatgccttgaaaatcgcttatccgtgggagtcgtttccggaagatgtgcatagtgcggtgaatcagatcttggtccggcatctcgtccggcacaatgaaatgaagcagacgaaacaaaatagagtttttctcgtcaatccggtaaggttgcccgatggcagggtgatccgacgggttcccgcttccggcgatactgttcgtggtgctttgcataatcagacatggtatggctgcatcaggcagaatgatgtagagaaatttgtggtgagaaaaccgtttgatttgagcaatttcaaaaagttggaagatttggagaaaatcgtcgatccgggtgtcaaaaacgcattgctggaacagatccgtaacagcggagtggagttcaaaactgcgatgcagcaggaattccgtatgaaaaccagaacgggaaagtttgatggtccggtaatccgtcgggttcggatttcctgttctatgcaggaaccgttgaaaatcaaggaacagacgtattgctctgagaaggcatataaaaactactattatgccgaaaccgcaaagggcagtaatttcatggtcgctctttaccggaaaccggatattccaagaacggaaaaaacgtatgaataccggctgatctctctttggaattgggcgaaagaacaccgacagcccggctttgtcccctatgagcagagagagaaaaacttagattttatcggttttatagctcccggaacgatggtgctgttttatgaaaaatctccggaagaattgcatggaatgccaaaatccgagttgcagaaacgactgtataagattacaaggtttgagaaggggcagaataatcggttgctattgcatttgcgttggcatcgggaagccagagaaaagggaaaagtagagagtacgatgaaggaaatgtatggttcagagacgaaatccgttgtatcctatgacaagccttatttgctgttgaggctttctccggtgaattatcagaatcacctgctgcttgatggcattgatttcgagtttacagtagatggagaaatcattttcaaggagtgatgccgcatgttgaaacggactctgtttttcggatctccgggaaaactgtccataaaaaacggactgctggtatatgaatccggcagtccggaaactgcaatacggactttccctgtggaagatattggattccttgtgttggaatccatgcagctctcattgaacagctattgtctgaattttttgacggaatgcaatgtcgcggtgattctgtgtgatgcatcgcatatgccgtctgcgcaaatgatcccgttttgtacaaattctctgatgcagaagttcgtggaggctcaagtacgggcaagcgatgccttgaaacagcgtttgtggaagcagacagtccaggcaaaaatttccaatcaggcgacagtcctccggcatttgggattaccgtttcaacgtctgcatgctttggaaaaggaggtttgcagcggagatgagggaaatatggaagctgttgccgcccggtattattttcagcagcttggattggatcagacgtttatccgtgaacgggaaggtgaaccgccgaatcatgcattgaattatgggtatgcgatattgagggctgcggtggcaagggcgctgatcggttccggattactttgtgttttggggattcatcactcgaaccaatatgatccctttgtattggcggatgatattatggaaccgtaccgtccgtttgtggatgaattggtttttgcgaatcggcaatatttttcagtttcagtattggaaaaggagcataaggcgaaattgcttcagttgctgattgtggatgtgaagatgaatggggaacgtcgtccgcttatgaatgcgttatcgtatacgacagcttcgctggtgcgttgctttcagaaagtggaaaagagcatatcatatccggaattctatgaatcatgagtatacggttcaatgcgatcagcaggtataagccaatgtggatctatgcaatgttcgatttgccgaccaataccaaaaaacaacggaaaaatgccgcagattttcggaaatttctagtgaaggatggattttcgatgatgcagttttcggtatatatccgaaattgtgcttcgattgagaatgcggaggtacatattaagcggatccgggaagctgttccggaagagggaatagtttctattcttaaagtgacggaccgccaatttggagacacttatacatttatcggtcgcaaacgcactccaccgccggaagctccattgcagctggaattgttttgacaatttcctgtatgaataaatttatcattttttatttattttcgatttttgagcgtcgtcagacgcatttttatttgcgttgaaagcaagttaagatgcttatattaaaggagttattcctccaataatatagtacctctttgaaaaacatcaaatcacaacgcagttcccgcttccaatgttcctgtatttaatatagtacctctttgaaaaacatcaaatcacaacaagcgactacacgatacagactccggcggaaatatagtacctctttgaaaaacatcaaatcacaacactcgctgagcatgttacgaataaagttgaatatagcacctctttgaaaaacatcaaatcacaactaaacgtcttttccatcg

SEQ ID NO: 2553 - DNA, 23360 bp, synthetic construct
  source 1..23360: mol_type = other DNA
  misc_feature 1..23360: note = Synthetic
aatccggcctgtgccggaatatcgcatgcgcatactcatgcactgcgttgagcgggatgttcatttgccggtttggcgcatatcctgtccggtggtgccgaatgggggtatttttgcgaataatcaagcggattcgatatccgcttgcttttttctgcatcaaacggtagataatcaagtagtcaatactttttggtttttttgcctcatggttggttttcttgataaaatgataagaacgaacaaattgcttgtcgtgcggatatcgaatctgttacgatgcccgcgagaatgactcaggaatcatatcgatcgaaaaggaatgttgccgatgtgcctgttctggcgacggctcatacatgtacgggctgtgccgcttgcgccaatatatgcccgacttcggcgatttccatacgcctgaatgcggacggcttctataattcattgatcgaagaagaactatgtattcgttgcaataagtgtgccaaagtctgccccattttacaggatggcccggaacaggaggctccgccggctgctcccttggcgtattccgcgtggtctctcgatgcagcggtaagggagcagagttcttccggtggcatgtttacggagctggcccgccatattttgcagtctggcgggattgtggtaggggttgcgttggatgaagagctccatgcacgacatgttctggtgcgggatgagcagtcgctggcatcgcttcgaggcgccaaatatacgcagagttttctggatcacaagattttcagggaaattgctcaggagctgaagaagaagactcccgtgctttttacggggaccgcatgccaaacggcgggcttgcaaagttatctgggcaggaatgatcctaatctgatcctgtgcgatgtgatttgccatggcgtgccttccattcatctgctggaccgctataaaagccatcgggaacaaatggcaggcaaaaaactcgagcatatcgcatttcgccacaaggagagggccggatggcagcattcccacgtcaaactgacgtatgaaggcgggagtacccagacggtcaatccggcggatgacgtctacatgcaggcattcctgaatgatctgtgcctgaacgaaacatgccataactgccagttcaacgattttccccattgttcggatttgaccttgggcgatttctgggggcttgagcacctgcatcccacatgggatttgcggcaaggcgcttcgcttgtcctcgtgcatacggacaaggggaaggagttgctcggccaattgaaagatcgtattttcctttcccgcgaaccgttggatgaggcattgttcgataatgtgtctttcctcaggtcatggcccgagccccgggggcgccaagccatgttggatgagctgtccggccgtctatcgctgcccgaactggttcggaagcgcatggattctttgcttccccgctatgatgtgggtattgtcggtctctggtattcatgtaattatggtgctatcctgaacgggtatgcgacgatggctgcgctcaacgagatggggtatagtgctgtgctcatcgatacggctcccctgtctggctcccggagcaagatgctgcgttatacggatacattgacggtttttcggcaatttgccaagcggtggcttcatacgactcccccgatggcgcatccgcgggatttggcgcggttgaatgaaatggtcgatgtctttgccagcggatcggatcaggtctggaacatcggttacaacgagggtcagcagcatatcgacgattacagcctgctgcgttttgcaaacccggagaaaaagcgtatcgcgatcgcttcttcattcggccatgcaaacgatattcgcaatccgcagcaaatgcggcgtgcgaagggtatgcttcaatgttacgatgcggtttcggtcagggaagattcggctcttgatattttgcgaagccaatacggtattcagggtacacatattcttgacccagtgtttctttgttcccggaagaaatacgatgccgtttctttgcttgctccggtccagagaacggaacagacgtatctggcttcctaccttctggatccgagtgtcggcaagaaggctgttctccaatatgcacaatcggtgctggcgtgccagtcggtacatatgcttgacgcacagtttgattttacttccaaaaaacggcagatggatcttccgggaattgaagaaaatctgacagtcgaacagttcatccataatattgcacacagccggtatgtgatcactgactccttccatggtgcatgttttgcgatcatctaccaacgcgatttcatctgtatcggaaatgccgaacgtggagccggccgatttctttctcttttcaagcaacttggccttcaagatcgacttgtatcctcggtcgatgaggttgtcgcgaagaaactattgacgacgcctatcgattaccggcgagttcatgcaacgatttcttctctgaaacaatatgctcttgattggctccaaaaagttttacaagagcaggcgtctccccgggtgcaaatggaaaaagagaggctagcgcgcgaagtgaaaagaaagcgttcctgtttttccttgttgtacagagtcaaaagaatgagcgccgtgtatcaactgtccaaatctcttttagctgttcgtcgagagatcaggcaggctcagccagttgttcgccatgctctgggccggagggaatgggtgataaagcagcagcttagaacctacttgcccttcttgcggcaacgcaaagcgtgacgagaactgcgtcggtatggtgattccatccatcatccgcaacgacaagagaaatttcggaagccgaatatttgtgaagaactttattttcgaagttctttgggtgttcggagcggagaaaagggtatttctcctctttgtgggagcgtaaaattctcacacgatgaaggcggaacggcagtaatttgcttctgccatcacatctggtgtgtgggggatactgcggtgatgaggcggggcatggcatgtggtgaaaatatataatgaagaatggccgaattcggtttgcaattaaatgtaatgttgctgacgaagttcagtgcatctatatgtgaataaaacgaatgagattccatgcgagtctgatgtgataggagagcagatttattatccggcgtcaaacacattcgcgcaatttattctttgtcaatatattctattttccgtaacggctactgcatcgcatctgatatgcactcgccatcacaataagttcaattcatgggaataagagaaaacagttagatagcggataataaatctgttaacattattgaaaatgttgcgattgcaatattgattcgccggatgcttcgaccaggcaaacgaaactaggaatagaaccttcatctccatgtcaactgctatcattcctgcttttaccgaacgcaatattcccgtcgttttctcggcggatgagacgtatgctccctatttgggggttactctccaatctcttgtcgaacatgcatcgtccgaattcaactacgatatcctgattctggacggtggtatcctgccggaaatgaagcgtactctggcatccattctgcctagcgggagtcagcatttttcgttacggtatattgatatgcagaagtaccgcgaggagttggacaagcttttcgtggacaggcatttgagttcggctacctattatcgcctgattctttcaagtttgctggaggattacgattccgtactctatctggattgcgatttgctcgttatggacgatccggctctgttgtaccgatgtgatctggaaggttacctcgtcgccggcgtcaaggaaatcgctacttattggatcgatccttcgtggcatcaggaatggcatcaatccattgtggagcagggcgtcgaaaatcctttgcacagtttcaatgcaggcgttcttctgatgaatctgaaagctttccgtgaaataaagctcgaacgccgtctgctggatcttgctcggaataatcgttttatccagcatgatcaggatgttctgaatattgcatgtgagaacaggtggcagctccttcccggcgaatggaactaccaataccatcaatgcgctccctatgaattttccgaagaaacgtcgcgacaggaacaaacgatcatggatgagcctgcctcttacaggattgtccattatattcgggatcagaagccgtggagtcatccggacaagcctctcgctccgttatggtgggaatatgctcgtcgtaatccgttttatgcggtcttacgtgcgggagctccggcgcgcggtgtgttgagaggtcgttggtttgtccatggcatcgccgccggtgtggctggattgtgtgccaaggtatcgcctccttccttgcggcggagattctcccgcaaggctgaatacagcaggaaggctgctcgttctctgcgtgcgtttctggcgattacccggtagagggtggcccggtgctgtccggattcaggcgttttgtgcggtttcgtgaagtactgcgcggagatcgcgtacgaagcggggtacattatgcacttctcgaatataggctacggcttctgccgccaagcgggtgcgccggggctcatcctccatcaggcggcggactgcatccacgaatagcggaacctgttcgtagccatcgcctagtacagtaccgacgaattcgccgaaacgtgcagtaagatcctccggattgcggcagctgaccagcaatgtaccatatgccagagcttccagaaatgaaatcggcagagcttcgtggatggatgtattgacgagaactttcgcttctttcaggaatgtctctttcacctcgccgtccacatgcccggcaaaatgcagattggtcagattcttgtagggagccatgatggccgtattttcatctgcttcccggaaggtctgtccgagcatgtagaattcgtattcaggaagcgctttggcaatttcgcagaacagccatccgcgcttgaccgattcgatgcgacccagaaagatgacgtggttctttttgggaaatgtggtcacatcgaacttcagatcgagatcgattggattcggcaggtattggatcggtacgttgttgggaagccggtacaggtcgatcgccttctcattcaggaaatgcgcctgcgagacgaagcggatacgcccctgtcggtaccattcatgggcgtagtcgtataatgactgattgtagtagcacggttcgggaaatttctcgaccgtattgatttctctccattcggaccatgggcgaggatcctgaatccagagaacaagtttcttgtcttttctgggctcatggcgcaggaagaagtctgtgaccagctcgacgctcaaatagacatcgtaattcttccaccacagccacagccgcgccaagccgaagcgggaaggaagccgatacaggttgacgccatccacttgcgttttccggaatttatagcgggtttggtcaactagaacgtccaattcgatatcttcgtcggggatatacttggcaatgtattttcgggccaaaaatccgtaaccaccgaaagctgtgccgtccgcgccgaaaaactcattgatgatcaaagcgaccttgatctttcttttctttttttgcataccaacctgagtaaagtaagtctttggaacggagtgccgttactcctgccgtggacatgagcaattataccaagaggcgaaacggcatagcaagaagcaaataggaaaaatttcagacagaatggccgttttccccatggaacgccggtaatcgatgctgttccggagacaggatggcttccatatctctttcctttttaatcccccagttgcgaagaccgggccagggggcaagttgcgaaatgagcgcatacgcctgttttttacactttcggaaccgtgtaaaatggcggtcaagggaacaatcgtctaattcgaaggggagtccatcgttccggatatcctcaaccatgcgcgtaacggcggcccgcaagcctgccttgcaggactcgattccggcgatatatccgatcggctgccattcgaaggaaggaacatcctccagagagaaagacaaggagtcttctccggagcgtccgatggatgcaaagtagtcgttatatttgaaagctgggaaatcggaaagtttgagccacttgttgggaatgtggtaggcgtcggcgatcacaagaccgtgcagggaacttgatacgatggcagagcaggatgcgatttcccgaacgacttcaggagcgtcacggcaaacgtcgatgtaaagataaccaggatcatttttgaatctctgcagtcctgcaagatgcctctcactatgatgaaccaaaattccgattttcccggaacgaggtgcttctccgaacacgtctcttgccagaatgcccatgtcaccaagagccgtttcttctccgagccccaggcaacggcgtgtcaaaggccccctcacggcatatgcccgggcgtttttgaagacgcgcgtcatttcataaaacaagccggtgcccagcagcatcatggcgcggttcggatatgtatcctgcaatagagtaccgatgaccaatagccgggcccggttccggtgggtcaccgggaagaagccgatctctccggcaggcagtaatttttcaagcaaatagggagtcaggcggtctccgaagttcatcatatcttcacaaggtgtggaccaccagtatgtcgcgatcttcttcatgggcaaaaagcattgatgtcagatgtcaatgagaaacaaagcgaatccgaccgaaggctgttctagcagatttcaaatccgcagtcaagcattgctcggtcgtcggttgccataaagcttcatatggcaaatacaatggggaggagatggctataaatgtttgatttgaaattatattgcaaaaaacaataaaaagataaaaaatatatcaatatattgttatgtaatttaaattgaataaaatgaaaataatattaaataacatgtgcgataagctgatttgaaatccgcaggctgtcaaaaatacgtgttttttcgatttcatgctagccgatacccaagaccatgtgttcgctgagattgattcttcacgatttcctgttgtgaaataagcattgcaaattcgctgagccatgttacactccatccacccaaacacccaatgtttggaaattcaccaatcacacaccatcatcatatggatatcatacatgacaacgacgctgacctcagcgtgatgaacggcaagaccgttgccgtgatcggatacggcgcgcagggccgcgcacaggcgctttgcatgcgcgactccggcctcaacgtcatcatcggcgtccgccccggcaaatcctttgacgctgccacgcaggaaggcttccaggtcatgagcgtcgccgaagctgctgacaaggccgacgtgatccacattctcctcccggacgaaaaccacggcgccgtctacgaaaacgaaatcaagccccaccttaagccgggcaagaccctctgctgctcccacggcttcgcttacgtcttcaacaccatcgtaccgcccgccgatgtggacgtgatcatggtcgcccccaagggacccggcaccgaagtgcgccgcgtctttgaagaaggcttcggctgccccggcctcatcgccgtgcatcagaacccctccggcaatgcccgcaacgtggctctcgccatggccaaggccgaaggcctcacccgcggcggcgtgctcgaatgcaccctcgctcaggaaacctacgaagacctcttcggcgaacagaacgtcctctgcggcggcatggtcgacctgatgaagtacggcttcgagaccctcatcgaagccggatacccggctgaaatggcctacttcgaatgcgtacacgaagccaagctcatcgtggaccttatctacgccggcggcatccagcgcatgaacgaagtgatctccaacaccgccgaattcggcgagtactacaatggcccgcagatcctgacgcccgacgtcaaggaacgaatgaaggaatccctcaagcgcatcgagagcggcaagttcgccaaggactggctcgaagaagccgccaagggagcccccaacctcaaggccaagcgcgaagaactcggacagcaccccgtcgaaatcgtcggcgccaagatccgcagcctcttcgaacgcaagtaaaccgcttgctttcccatctgcacggggcgccgccggatacacggctgcgccccgtcttccttccgccccttttcctctctctacatcacccagcccgccgccgcgccatgagcacccccgccgtccacatcgaaaatgcccgcgtcttcctcggaggccgcgaaatcctccgcaacatcaactggcaggtcgcccagggagaccgctgcttcatcctcggagccaacggcgcaggtaaaaccaccctcgtcaagctactgatgggctacgcatggcccctctacggcgcgaaaatccaaacgctgggcgaaaccttcggccatgtcaacctcgtcgaacaccgcaagcgcatcgcgtgggtcagccccttcatgcaccagtggctcggcgaccgctcttggacgggcagggaaatcgttctctccggcctcgacggcaccatcggcctcttccgcgacaccacgcccgaagaggaagccctcgccctcaggcacatgcaggccctgcgcgccgagcatctggcggatcgcaccgtcgtcaccatgtcctcgggagagcaggtcaaaatcctcatcgcccgcgccctgatgaccagcccggagctgatgattctcgacgaacccagcgtctacctcgacatcgccgggcgcgagtacctcctccgcaccattgcggacttcgccgccacccgccccgacctcaccatcatcttcatcacccagcgcatcgaagacatcctgcccgaattcaccaccggcctgattctcaaatccggggaaatcgccgccagcggtagccgcgaaaccgttctcaccgaagagaaccttcgccacgccttcgacctcgacattcgcctcatcaaaaccgacacgggccggctctggaccgtgatcgactgacgccttattcttcacctctcacgccgccttgccgccatggaactcaaaaaacccgttcgccgcaccctcgcccgccagatcctcgacgcgatggaagacatgatccgcctcggcaaatggaagatcggcgaccgcattccttccgagccggaactggccaaaaccttctccgtcagccacaacaccatccgcgaagccgtccagaccctcatccatgccggtattctcgccgcccgccccggagacggcacctacgtcatcgcggacaaccgcttcgccgtcgccatgaacaaccggctgcacgaagccgaactctccaaaatcctcgaagcgcgcctagccctcgaaaaagagatcgcccgcctcgccgccgcccaccgcacggacgaagacctcgcccgcctcgaaaccgccctcgccaaatgccggaagaaggacggcaacggtatcgaagacgatatggccttccatgctcttgtggccgaagccacccacaaccccatactggccgatctctaccgcatcatcatcggccacctccggcaaaacctcgaaaccctcctcgaggaaaagcaatacaccccctccgcgatggccctgcacgacgatctcctgcaagccatccgctcccgccacgccgacgctgcggaaaacatcatcgtgcaaatcgtcgccttcgacacggcgagtattcgaggataagtcggcctccagccacaaaaaagcccttcccgaaggaagggccggaaaatgctttgaaagaccggtgtggctggcttgcagccggggaatcggtttgcatttcaaattttgtcttgaatccacaggaataatagatatattgactccaatagtcaatatctaacatgcaaaacattaccttttcttttgatgtcggttacgcctctatcggttgggctgttgtgcaggctcctgcacagccggaacaagatcccggcattgtcgcttgcggcactgtactctttccgtccgacgattgccaggcgttccagaggcggaattaccgaaggctgcgccgcaatatccgctcgcggcgcgtccgtattgaaagaatcggcaagttgctggtacaggccggtatcttgacgccggaagaaaaagccacccccggccatccggccccgttctttctcgctgctcaagcgtggcagggcatccggcaactctctccgcttgaagtctggcacatcctgcgctggtatgcccacaatcggggatatgataacaatgccgcatgggcgaccgtctccacgaaagaagatacggaaaaagtaaacaatgcgcgccacctcatgcagaagttcggcgcagagacgatgtgcgccactctctgccatgccatggagctggatatggatgttccggatgcagcaatgaccgtatccactcccgcctaccgcacgctcaactcggcatttcctcgcgatgtcgtccagcgtgaagtactggacattcttcgtcacagtgcatcccacatcaaggaattgacgccggagatcatccgactcatcgcccagcaggaagacttgtccaccgagcagcgcagcgaactggccgcaaaaggaatacgcctcgccagacggtatcgtggcagcctcctgttcgggcagttgctgccgcgtttcgacaatcgcatcattcgccggtgccccattatttgggcgcatactttcgagcaggcgaaaacaagcggcatgagtgaaaaagaggcgcaggcgcttgcggacaaagtcgccaaggtgccgaccgcagactgtcccgaattctatgcctaccgcttcgcccgcatcttgaacaacctgcgggcgaacggtctgccccttcctgtcgaggtgcggtgtgaactcatgcaagctgcccgggcggaaggaaaactgactgccgcaaaaatcaaaaaggaaatcatgcgcctcatgggagatgtagaaagcaatatcgatcattacttccaccttcaccccgatagcgaagaggcactcattctggatccggctatggaatgcctgcaccgtaccggattgtatgatgctctttcttctgtcgtacggagagttgctctaacgcgtcttcgccgaggcaaaatctgtactcccgcctacctgcgagacatgatgcttcgccacggagaagatacgcaggcgcttgatctggccatcgcgaaacaacagggcagaaaggcgccccggccccgtaaaaacgatacggacgcttctgccgatgcgtccatcgcatggcaagacaagccgctggcgccgaaaacagccagcgggcgggctccttatgcccgtcccgtcctgcgtcaggccgttgatgaaatcatgaatggagaggatccgaccagaccggccctcgatgaacaacatccggacggtgaagacaagccttcgcacggttgtctgtacggcctgctggatcctgcgtccaaagaaaacgagtacctgaacaagctcccgctcgatgctttgaccaataaccatcttgtccggcaccgcatgctgattctcgatcggcttacgcaggatctcgtccgggaattcgccgatggcgatccctcccgcgtcgaacggttctgcatcgaagtcgggcgcgagttgagcgcattctctggaatgacttccaaacaaatccagagcgagttgaatgagcgtatgaaacatttcaaatccgccgttgcctatctcgccaagcatgcgccggacatggccacaagcgcgggactcatccgcaaatgccgcatcgccatggacatgaattggcaatgcccctttacgggacaaacttacatgccctacgaccttccgaaactcgaaagggaacacatcgttccctatgccaaccgtaaaacagatgccctctccgcgctcgttctcacatggctggcagtcaataaaatgaaaggaaaacgcaccgcctaccaattcatcaaggaatgtgaaggtcaatcggtgcccggccgcaatcaaaacattgtcagtgtcaaacagtatgaaacatttgtcgaaaaactggatacgaaaggacatgcagacgatgccaaacgcaagaaaacgcggaaaaaactcatgatggtggatcggctctcctcacaagggacaaatggagagagcgagctcgactttaccgaaggcatgatgacacagagctcacatctgatgaaaattgcggcccggggagtacgcaaaaactttcctcacgccacggtcgacatgatacccggtgccatcaccggaaccgtgcgcaaagcatggaaagttgcaggctgtcttgccggaatctgtccggaggccgttgatcctgtcacccaccggattcaggacaaggaaaccctgcgcaggctgacacatctgcaccatgctctggatgcctgcgtgctggggctgattccccatctcattcccgaacaccgtagcggactcctgcgtaaagctcttgccgcacgccgtctgccggaaaacgtacgccaggaagtagaatccgctgtcagcaaaagatattataccatcacgaaggaatcgaagctcgaacttcgagacctccctaccacattgaaaaactccatcgcggcgaaactttccgaaggccgcgtcgtccaacacatcccggcggacatgagcggcgcaaaactggaagaaaccatttggggcattgcccccgggcaacacatcgacgacaattcggaagtcgtcatcaggcagaaaagcctcagcatcggtaaagacggtaatcgtatccgaacgcggaaaacggataaacaaggcaatccgattacggaaaaggccagcaagctcgtcggcatcaaaccgacgggaacatccaaacttcagcctattcgcggcgtcatcatcatcaaagacaattttgccattgcgctggatcctgtaccgaccatgattcctcaccacaatgtgtacaaaaggctcgaagaactacgcaagctcaatcatggccgccatgtgcgcctcttgaaaaaaggcatgctgattcggttgagtcatcagaaatccggcgacaaaaacggaatgtggaaagtgcgcagtattcaggatcaaggatcgtcgggattgaaagtcaatctgcagaggccgtactacgccggaaagatcgaagacacaaggactgaaaactggaagaacgttagcataaaagccctgctttcgcaaggcatggaaatcttacctaccacttattgcggaacaactccataaattatgtcctatcatatcctcagcatcgacgcttatacctgccagttgagctgcgaaagagggcagcttagttgcatcagcgacagcggacgccagagcataccactcgaagatgtaggcgccattattgtgagttccttcaaagccacgttgaccagcaacctcatcatcgaggcagccaaacgtcgcataggcttcatcctgtgcgacagccacaaaccggcggctctcatcctgccggcagaccgggctacggacacagctaccctccgcagtctcgctaccatgcctgcccatctgaaaaaacgcctctgggataaaacgctatccgccaaatgcggcaatcaggcagaactggcaacggcatggaatccactccatccgaagatcgaagaaatatgcgccgtggcaacatcccgccgccccaaccgggaagcagacacggcgcggctcttctggagtatctttgccgatacttttgccgatgcaaactttcggcgcggccgcaaagaagaaggctataattctctgctcaactacgcctacgccatactcctctcctccattctgcaaaaactttacgccttggggctcgacccggctttcggcatcttccatcaggcacgggaacatgccgcaccgcttgcttatgacctgatggagccctttcgtccggcattcgatgccaatgtcgcccgctggattcgccggggactcgagcaggatgagtctcccgattccatctccgaaatcacgcgggaataccggcggcatatcatctccacactggatgccgaaaccttctgccgcgggaaaacaacaacgatccgcgcctctctggaagccgtatgccgaagcttccggcaggcggtgttgtctcaccagtccggaccttatgaaccatggacaatatcaactataaaatgggctggctcgtagtcttcttcgatctcccgaccaccacgcgggaggacaaaaaacagtacatccagtttcggaaaaacctgttggaagacggttacctgatggtgcaatacagtgtgtatgcacgggcttgtgtcactcaggaacgaatagaaacccatgcccggcgcttgcgtagcatggtgcctcctgacggttcggtgcgatgcatgttcgtgaccaatatccagtgggacaaaacctacatttttcacggaaagtcgaagcctccaccggatatctccatgcctgaacagatgcttttgtggtaggactcgttgcgaggaaatctatttaagatattcaatataaaagtaaggcatggtatctactgtaccatgccttactttggattcaaggcaaaacgtgcatgatggtcattagtttccgtagatgactgtaccatgccttactttggattcaaggcaaaacgtattccggtttgaggggcagggtttgttcactgtaccatgccttactttggattcaaggcaaaacaataattccagctatttactatgctaattaactgtaccatgccttactttggattcaaggcaaaacgttgagactgacaacgtagccgccactcttactgtaccatgccttactttggattcaaggcaaaactgcttgatgaccatggggatgccgtggtctactgtaccatgccttactttggattcaaggcaaaacgttgagactgacaacgtagccgccactcttactgtaccatgccttactttggattcaaggcaaaacgtattccggtttgaggggcagggtttgttcactgtaccatgccttactttggattcaaggcaaaacccggctcgtatccctgtaccgagagcgattactgtaccatgccttattttggattcaaggcaaaacgaatttccctacctcgtcacccgctttttgactgtaccatgcctgattttggattcgaggcaaaacataaagaaggcgacactgtctcaatcgcgaactgtaccatgccttactttggattcaagtaaatcgcggatgatatgttgataagattattttcgatgctcattttcaagagcatgttttgttgttattaacaggttgttacagccgtcttcgaggaggcggatgacgtgggtgaagccttcggggccgccgtagtaggggtcggggatttcgcggtcggggtggttgcggaggtagctgcacatgggcatgatgcgggcgtggtgttctccgctgccggcgagggcgaggatgtcgcggaggttggcgttgtccatggggacgatgaggtcgaaggtttcaaagtcgcggcgggtgagctggcggccgaggtggccgccccaggcgtagccttcgtgttggagggcggcgagcatgcggcggtcgggtttgtcgccgatgtggtagtcggaggtggcggcggagtctgcctggattttgtgttcgagtccggctttgcggatgaggctgtcgaagacgatttcggcggcgggggagcggcagatgttgccgaggcagacgaagaggacgcggtacggggcggtggcagggggtgcgggttcggtggtcatggcggtggcggagtttgcggagattgtagcacggcagcagcggggtggcaatgtcgaaggctggcaggctggccgggtgatgtggcgggaggcggttgcccggcggcagtgggtgtggttggctttgtgttttgtgttttaggggatggctggcgggagtggcgggtatgaagaaggcgtgccgttgttgcaacggcacgcctgaagggagtgaagtttccggtcggttttacttctcaggtttggggacggcgatgcgtccgctgcgggtgaggagctggatgtcgtattcctgcatcatggagacgaagcgttcgatgcggaattcggagccggagatttcgatggtgagggtgtctttggtggcatccacgactcgggcgcggaagacgttgcagacttcgaggatttcggagcggttttccttggtgactccgacgcggaggaggaggatttcgcggtagacgttttcggtgttgcggaagtcgatgacttcgacgacattgactagtttgttgagttgcttgatgatttggttcagcgtttcttcctgttcgtcgacgacgatggtcatgcgggagaagctgggaacctgactcggggcgacgttcagggagtggatgttgtatccacgaccgctgaagagtccggcgatgcgtgtgaggacgccgaacttgttctcaactaatacggatatggtatgtaacgtcatgttaatagtccaatgagctgtagaggatacaggattgaggaggggaggtcaagggtattgtcgcaggggcgggggtgccggtgcgatgtgggtgtgttacagggagccacagatttcacggatgctcacagattcatgttgatagtgaatgatttgtggtttttgttccagagggtgagtgaaggtcgggctgaggcgggagcggtgttccgtgtatgtgtgttgtttgtcagtgaggttgaggcggggtggcggcggggctgtgtttgcgcccggtgagggtgtaccagaggaagaggctgttgtaggtgaagtagcgtttgaagaggcgtcggggttcgcggcagaggcggtagagccattcgaggcctcgtttctggatccagaggggggcgcggcggacggttccggcgtggaagtcgaaggcggcgccaacggcgaagtagagggcggctgggaggcggtggcgcatggaggcgagccatgtttcctgtttggggcagccgaggccaacccagatgcaggtggctccgctttcggcgatgcgctggaggatgttttgctggatggtttcgtcccatgtgccgaagggcggggagtagctgcctgcgagctgggcgccggggtagcgggcgaggagtttttcgcggagggtggcgagggtttgttcgctgccgccgaggaggtagtggcggatgtggggggagggctggcctttgtcccagagttcgctcatgatgtccggcccgctgaggcggtggggggcgttgcgggtgggttggcgtttgagtttccagacgacgggcatgccgtccgggcagatgatgtcgaaggtgtcgaggtggttgccgtattcctgctggcgtacgccgcgggtgacgacatgggcatccgcagcggcgatgaggattgggcggtcgagggtttccgcagtggtgatgaggtgggcgatgagttggtccatggttccggctacgacggggaatccgaagacgtcggctcgttcgagaggttcggcggcaggcatgtgtagagagaggggaagagagaggtttgtgctgtgcggtccgcgttactgcgggcggtagggttcgagcatttgctgcatttggcgttctttgtttttggcgaggcgtttggcttctttggtgaggtgttcctgcatgcggaaggttttggttttgccgccgggtttgaggggttgggaggtgccgtccgggaggatgagggaggcctgggtgttgtctttgaagcaggcgtcgaggatgttgcggaggcggcggatgtgccgggggtcgtcgatggggatcatgagttcgacgcgtttgtcgaggttgcgggtcatccagtccgcactggcgatgtagaggcggtgttcgccgccgtggcggaagtggaagatgcgggcgtgttcgaggtagcggtcgacgatgctgacgatgcggatgtgtttggcggctttgggggtgttgggtttgaagcagcagatgccgcggatgttgaggctgatgcgtacgccggcatcggcggcttcctggagggcgtccatgatttggacgtcgttgaggctgttcattttcgcctgtatttcggcgggttctccctgccgggcgcgttcggcttccccggcgatgagttcgaggaggcgcgctttcatcatggcgggggaggggtagagtttgcggaagcgggtgagtttggtgcggccggtgacggtgttgaagaattgggaggcatcggccccgaggtcgtcgtcgcaggtgaggtaggagatgtcggtgtagattttggcggtggtttcgttgtagttgcctgtgccgaggtggcagtagcggcggaggaggccgttttcccggcggatgacgaggcagattttggcgtgggttttgaggcctttgactccgtagacgatttggactccggcacgctggagttcttcggctttttcgaggtttttggcttcgtcgaagcgggctttgagttcgatgaggacggtgacctgtttgccgttttcggcggcgcgtttgagggcggcgacgatgcgggattgtttggcggtgcggtagaggacttgtttgatggcgatggtgctggggtcgtccgcggcttcttcgacgaggcggaggacgggttcgaaggtttcgtaggggtggttgaggaggatgccgccggtgttggcgatgttgtcgaagatgctgagggaggggtcgatttccggggagggctggggagcccatgccgggactttgaggttttcgttgccgggggcgaaggccatgtccatgaagtcggtgaggcggagggggcctttgaggaggtaggtttcgttgttgcctgctccggtgatttgctggatgcggcggacgaggggcgtgggggtgccggcggggagttcgaggcggacgcattcggagaatttgcgggcgacgaggacttcttccatttcgtcggcgaggtcgagggcgtcttcttcctggacggcgatgtctccgttgcgggtgacgcggaagagggtgtggtggaggagggtttctccggggaagagggaggagatgtgcgcgccgatgaggtcttcgaggaggatgtaggcttcttcttcggagtccgggatggggatgcggcgggggaggttgtccgggatggtgacggcgcagaagcgggttgttccggtgtcggggtcgatgagttcgacgccgatgatgaggttgagggaggggaggatgggaggggtgtcgacttccatgtcgagcggtgtgaggaggggggcgacctgggtgaggaagtggcgttcgaggtcgaggcgctggggttcgcggaggtgtttgaggaggatggggctgattttgtctatttccatcagcgggaggatttcctcgttgatgagtttgtactggtcggcgatcatggtgccgactcgtttgcggatgagttggagctgtttggtgggggtgaggccggagatgtcgcgggcgcgggagcctgcgctgcggagcatttggaggccgccgacgcgtacctgaaagaattcgtcgaggttggaggcggtgatggcgaggaatttgatgcgttccagcagggggaggttggttcgtttggcctggtcaaggacgcgctggttgaattcgagccatgagagttcgcggttgatgtattcgttcatggtggggtggtgcagttagcggctgaaggtggggatgagggcgatttcgtagccgaagatgtcggtgaagaggtcgcctttctggctcatggccatgttttcgatggtgatgtcgttgaggccttcgacgaggatttcgaggcgtttgtcggcgatgcggacgccgagtttgcggatgcgctgggagtgggagcgttcgagggcgtctgcgacgcggaggatggctgcgagtttctggacgcggaggcggtcgaggggttcgagttcggcgtaggtgggttcgtcggtggtgggggctccgtgccggtggtagcgggcgaggagggcgatgatttcgacgtccgagcggctgaggccgaagagttcgctgttgaggatgatgtattgggagtgctggtggtggcgcttggggttgatgtaggtgccgatttcgtggaggatggcggcgacgtggaggaggaggcggtcgtgtttgccgaggcggtggaggttctggagggcgtcgaagagcatgcagccgagtttggcgacttgccggctgtgggcgcggtccgcttggtagcggtcggagaggagggcggcgaagtggaggacttcgtcttcgagcgccatggtgtccgtgtgggagaggatgaggctgttgaggaagtcggtgccgtagttggtgggggggatgatgatgcgggagctgccgaagagctgggcgatggagaggttgatgatgagggcggggaggacggaggcgatgctggagtagtcctgctcgagtttgatcatgcgttgctctaccgatttgctggcgatgttttcggcgagggaggagatgtccgccgcgttgatggcggcgttgtttttggggttgaggagggggaggagtttctggatttccgcgccgatgatgatgatggtgtcgggcggggagatgttgtggaagtcgtgctggatctggtcgatctggccgcggatgtgttcgcggacgagggtgatttcggtggagtcgtcactgtagtcgatgtcgccgatggtttctccggtgcggtgggtgccgaggcggtagctggagtagcgggtgatgcggcctttttcgaagaggaggaggcgggtgttgcccgggccggcgtggacgacgaggacgcgttttttgaggaggtcggggtttttccggaggacggcgcggacgctcatgtagatgaggcgggtcatttcaccgtcgtcgatgacgcggaggcggaggccgtgcgcgatgtggaggcggttcatgaaggtgtccatgttggccatgtcttggacgatgttggtggcgaggaagctgatgtcgagggtggttccggtgccgtattcgcggaggagggccatgtagtcgtccatgatttggacgcagcggtccatggtggcgcgggagatgtagcctttgcggaagatgtcgcgggcgagggggacgggctgggtgaggacgtcgatgatgcgggcgttttctcctgccgtttcgctgatcatgaggtccatggagctggcgccgaggaagatgacggcacgcagggctgccgcttcgccgggggcggcggcggtttgagggtcgggagtggcggagtcggatgtcatgttctagagagacgatatgtcagatgttctttttcatcaagtcccaagtggggcttttctgtgacttttgcgtcacattttcgttgtgggcgggacgcagtgcggcgcaacgctccttagcggggcgctgcgccgtgcgtgtggcgtgccggtcagcgtgggtttaccagtgccaggtgttctggatctggaagacgacgttggtgtctttgccgttgccgtgtacggggttgcgggtgatttgtatgtccggctcaatggtcatggtgggggtgatttgcatgacgtaggcgagttcgatgccgtattcgttgttgttgcggacgggtttgatgctgtctgccggggtgagccagaggaagccgagggcgagctggtcgttgttggcgtagcggaaggggcctgcagcagcccatggagcctgccagacgaggccggtggtgacggcggatttgactccgttgatggcggcggcatcggggtcggcccagccgaggcgtccgaaccagccgagggtgctgtgtttgccgagctgctgctgccagttgatgccgacggcgttgccgttttcactgccggtgcgggtccatgcatattggaagcggatggtgccgggcccccagcccatgaagtcgtccgagacgaagcctgcttccatcatgttggtccaggcgtttttgttgatgtattggaaggggttgtggttgagctggtagttgttgcccgcagagacggccatgaggtagaaggatttgaccggctgccatgcgacgtggtagccccaggcgccgaaggggatggggagggcctggttgaattcgaaggattcgttgaggaggttgttgaagccgctggcggagtaggcgttctggtcgaggtagttggtggcgtcgagctggcctaccatgaggacgagtttgccgtcgaacgcgctgtagccgaggctgacgttggcgaggtaggagccgccgccgcgcgaggaggccgcggggttctgcagggaaccgaggcttttgttcgggccgccgttgcgctggttgtagttgatgccgtcaccccagtcccattcggtggcgatgaagaggccctggctgccgtcccgggtgcgcatgaggaaccagttggcgagcaatgaggcgttgtaggaggtgaagtcgcgctggccgccgatggggcgggggccggtgatgccggtgtagttgaagccgtggttgaaggagtactggaagcctacgtcggacaggcggtttttgacgatttgcgcgcctgtggagagcgggtcttcattgatgacggctcccggctggatgcaggtgttgccgaagacgtagatgccgtcgaggtagggcatcattttcggcggggtggaggggaagaagacgaggcggctgccggagtcgtccttgcggttctgctggatgactgcgtcgggggtggagacgcctttggtgcgtttcatgagctgtttgtgggcaggcatgcctttttgcaggctggggcttacctggtcttcgggcagggcgtggacgtcgaaaccctgccgcgtgttgaggtatttcgggagatcggcctgctgtgtgccggtgttgtctgcggaggctggcgcctgggaggccgaggcgatggcagatgcggcaataagcagggtgcctgtagccgtggccatggcctttttcaaggtttgggtcggttcggtggttttcatggtttgagtggtgcggaggtttccgttcaccgggtgagatgcctgcggttcgttcggttgttcaataactgttattcggaatgcattgtttttctaacgtgtatggctggatgagcgtatgcggagaagccgcgccattttgcatggcgcggcttgttgatcaatgggggtatatccgttttaggatgctggctgtgtgagggcgatttgcccggcagtggtgcggttacggtttgtttcgggcaggtttgaaatattctccgatagctttttgcatggcgtcggag

SEQ ID NO: 2554 - DNA, 23342 bp, synthetic construct
  misc_feature 1..23342: note = Synthetic
  source 1..23342: mol_type = other DNA
gatgaattgacggtggtcggccagcttgcgccggaagttttcccaggagcgcacgctcatcggtgaccagccggcttccgcaatggcgcaggcacgcggataggcgcggtagagaatgtggttcagggtagggagatgttctccccacacggtgccctgaacgccggtgatatggtttgtttccttttctggtctgccgtaggcggggtccagcctgtagctttgctccagcgtggtggtgggcatccatccccggttgctttgccctggaagttgcggatagtccaggtagcagtgttccccagcagcaatgatcagggagagcccctgctttttcgtctccgtgatggtggacggagtcagtcccatgcgccaggtgaagacggtgtctcctttgttgtagatgttggccctggcccacggtttttcataccatagttggatgcgcttgccgtgaccagccagcatggaggacatttttttgatgaattccttcaattcctcgtggacgtccttcatgcctttttgctcccggtactggatgctgagggggcatttggcccaggttttttccaggggtgcttcatcgccgcccagatggacgatgccggacgggaaaatatctttgagttccttgaaaacagcggcataaaatttccagacttccggtttgtgcgggcagatgaggtggagggtgacgccttcatcggtcttcactttcgtatccgggttcgggaagcagaagaattccgggtaggctgccgccagggcttggttgtgccccggcacgtctatttcagggatgacctcaatgccgagcgctgcgcagtacgccaccagctccttcagttcctgtttggtgtacatcccttcatggggaattccgttgcgcatgctttctttccgtttggaggagatgcttttgagtttggggtagccgggcaccggaagacgccacccctggtcgtccgtcaagtggatctggagcttgttgaatttgtagtaggccatcatatccacaaattttttcagatcggccgcggggatgaaatgccgcgcgggatccaccatgaggccgcgccacggatagcgcggcttgtccgtgatgacgccgcagggaatgccctccggctgtcccgccagctggtcccggagctggcggagggttgccagcccgtaaattctgccttcccttcctccggaagcaaggtgcgccccctgcggggtgaccgtgagccggtaggcgtccgttcccagggtcggaacttcctggtcggaaagaagtttcaaggttccggtactgttgtgctgcagctccgttttttccggttcagggataacgctgtatttgtccgttgcggcggcacatgccatgtgggcggaaaaaatggcgcaggccaggatgaggggcagtttaaacatcatgaagaactgtttcggaaaagattctaccatggtaagggatgcgtgataaggaaaaacggtgaaattacttgttgttttcccagcggaaggccggttcattcccctgagtgcgctccatatcataattgaagcgtttgaggatgaattgacggtggtcggccagcttgcgccggaagttttcccaggagcgcacgcccatcggtgaccagccggcttccgcaatggcgcaggcgcggggataggcgcggtaaagcaagtggttcaagtccggcaggcgttccgcccatacgggggcatgcacgccccggatatggcctgcctctttctccggttttccaaaagcgggatccaggtcataacatttttgcagggtggtggttttcatccatccccagttgcgctgcccctgaatctggggaaaatccaggtaacagtattcgctggaggccataatcaggttcaatcccgcctttttcgtcttctcaatggactggagggcctggccttgccgccatgcgtaaaccgtttcccccggatggtaaatgccggcgttcccctcataccagaattgcggcgtttgcccgtttttggcaagcagagctgccgttttcgcaaaaaaggctttcatctgttcctgttcgtctttcatggctgccctggtccgggcttcccggcacagagggcatttttcccagagttccgtgggggcctcgtccccgcccagatgaacgataccggacgggaagatatccttgagttcattaaagacggaggcataaaatttccagacttccggcttctggggacagaccagttccttgctgtttcccgctgtcgtccgcacgttcatgtccggtttggggaagcagaaaaattccgggtaggcggcatgaagcgcctggttgtggcccggcatgtctatttcagggatgacatcaatgccgcgcgctgcgcagtacgccaccagttccttcagttcctgtttggtgtacatcccttcgtgggggattccgtctccgaagctttcctcccgcctggatgcgacgcttttcaatttggggtagccgggcacgggcagcctccagccctggttgtccgtcagatgcaggtgcagcctgttgaatttgtagtaggccatcatatccacaaattttttcagatcggccgcggggatgaaatgccgcgcgggatccaccatgaggccgcgccacggatagcgcggcttgtccgtgatgacgccgcagggaatgccctccggctgtcccgccagctggtcccggagctggcggagggttgccagcccgtaaattctgccttcccttcctccggaagcaaggtgcgccccctgcggggtgaccgtgagccggtaggcgtccgtttccagggtcggaacttcctggtcggaaagaagctgtaaagttttagctgtttcctgtctgagttccgttctggacggctcagggataatgctgtattgggctgttgcttctgccggaggggagaaggatagcagaatgccgccgagaatgggtaagggacgtgccatatttccaatataaacggggaggaaacaggttctgtcaaagaatcatcttttgcttccagattttttgccgtctccttgttgtccagagcggaatcggtaatagaaagaaaataaaaaggccgcctccggagagacggcctttttattagaagtggtagccctatgaggactcgaaccccaaaatacggaaccagaatccgctgtgttaccgattacactatagggctatgtaacgggcgcttttgcggcgcgggcgcattaaagcggaagaggccgttttttgcaagtttttttttactcaaagatatgttttgattggaaaaaggctgtacaggtaagcggcaggctgttttttccggaattatccggccaggcttttaaagtacgcctgtacgtgctcctccgtgatttgctggcggtgcgcctgttcatgcttgccctgggactgcttccatggggaggacggggcggtgttgatgcgtccgagctgctgggccgtatatttgccatagacgttccagatatgctccagaaaggggataatgtccgtttcctcctccaaagggggctggcggcggctgggatgctctatggaagagtagggcggctgatccttgtattcatgataaatggaaggaagtaccggaccggaaggccaggcttccacccgttcattgatcaggaaagcgccagtccggtgcagatgccaccagtccgccagaatgaccagatggttcagtttgacgggcgtcaggatgagctccttggcgttcgcctgctgaatgaaccagttgcagagtttttgcgtggtagtggagtttgccatgctgaaatgggttgcctccattataaaaggccgcaggtatttctcaacactaaatccgcttgcggttccggcgctctggcggtcggcataggcaaatggctgtgccgggattcgtcaggtccccggcatgccgcttcctgctccgcaggcggaatgcctgaaaatatggcgcaggttgttctagcggggagggtgccggaggttcccctctcccgggcagctcctggtgatgtgcttccccttccggagatttccgggtcaggccgtgtgcatggcagcggagttgctttccggggaagagaagactgtcaaagggaaagaaagcgcgctctgcggacaacgtcttccggagaaagggcgtaaaggctgtccagcaatgatacggcaaaggaaccgggggaggggctttgttcaaaggccatttctccggcaatgcccatgagtacggctgtggaaacggccgcctgcaggggggtgggggagacggcggcgcaggcggcggacagggctcccatggaacagcccacgcccgtaacccgggacatcatggcgtggccgttttccgtggcggttacctggcggccgtcagtggaataatccgtacgccccgtaacgagcacggccgcccccgtgtgcagggccagttccctggccgcatgcagggcgtctgcgctggagctggtgctttccggccctttcgtgacggaggaatagccggccagggccatgatttcagaagcgtttccgcggatgatgcggggggattgttccttcaattgccccgccagccgcgtgcgcagggaaagagcccctacggccacaggatccagcacccaggggatattcagccggttggcttcccgcaccgccgtttgcatggcggctccctgttcacgcgtcacggtgcccaggttgaccagcagggcgcctgttccgctgcggagcatgtccaccgcttcttccgcgtcgttgagcatggcggggacggcgcctatggccagcaggagattggccgtcaggggctggacgacggaattggtcagggagagaaccagcggggccgtttcccggattttttccaaatcggcggtaacggcttgaacaaggtctgtcgatgaaagcatggcgtaaaaaagtgcttgattgtccggtatttcctgcggtacgtccgtcaggcaagagcccgtgcggcggtttccggattctccgctccgcaaatggcggagacaacggcaattccggaggcggttcccgtggcgcgcacttgacgggcccgttccgcgtccagtccgccgatggcgacaacgggcaggggagattgggaagccagagcggcgaagccttccacgcccagcacgggaggcgcgttcagcttggaaatggtggggaagacggggcccatgcccaggtagtccaccagggaggcatccacggcgcggagctgttccttattggagacggacagtcccaggattttatccgggccgatcatggctctgacggatggaaccggaagatccctctggccgatgtggacgccgtctgcttccagcgccagagccaggtcaatgcggttgttgacgatgaagggaataccgcgggaagccaggaaatcccgtatgggcaaagcttcccggtaacaggttcccgcatccggattggtggagcggtactgcacgatggtaactcctccgtccgccgctttccgtacggtttccagaaggctgaggcggcatttggatgcttcatccgtaaccaggtagagatggagattgaattttttcatggcagggaatggaaggaatcagtccgtaaacagaggggtggaaagatagcggtcccccgtgtccggcagcaggacgacgatggtctttccttcattctccgggcgccgcgccacctgtgtggcggcccagagagctgctccggaggaaatacccgtcagcacgccgtccgtgcgcgccagttccttccctgtggagaaagcgtcttcattggtaacggcgatgacttcatcgtacacggaggtgtccagcgttcccggcacgaagcccgcgccaatgccctgaatcttgtgggggccggccgtgccctgggtcagcacgggggaggagaacggctccacagccacgacccggatgcccggattacgggatttaaggtacttgcccacgcctgtgatggtgcctccggtacccacgcccgccacaaaaatatccgctttgccttctgtatcattccagatttccgggcctgtggtgcggaaatgcgcttccgggttggacgggttggcgaactggccggggataaagctgttgggcagtcccgcggccagttcctccgccttggagatggctcccttcatgcccagcgcgccgtccgtcagcaccagttccgcgccgtaggctttcaggaggttgcggcgttccacgctcatcgtctccggcatggtcaatataatccggtacccgcgtgaagcggccaccgccgccaggccgatgcccgtgtttccgctggtgggctcaatgatgacggaatccggcttcagcttcccggcggcttccgccgcatcaatcatggcctgggcaatgcggtctttcacgctgccggcggggttcaggtattccagcttggccaggatcgtggcgttcaggccattcctgcgttcgtaattggtcagttccagcaacggggtgccgccgatcagttccgtaatgtttttgtaaattctcatggcttgtaggaaaagagcgttgttgccgttaaatcgttagagaatggcgcggaagccttgttccaaatcttccagaatatcgtcgatatgttccgtcccgatggaaagccgcacggtggatggcgtaatgcctcccgccttcagttcctcctccgtcatctgggaatgggtggtggaggccggatgaatcaccagggacttgacgtccgccacgttcgcgagcagggagaatagttccaggctttcgcagaacttgcgagctttttccgcgccacccttgatttcaaaggtgaagatggagcctcccccgttcggatagtatctcttgtaaaggtcgtggtccggatggtccggcagggaggggtggttcaccctctccacctggggatgggaggccagatagtccgctacgcgcaaggcgttctgcacatggcgttccacccgcagggagagtgtttccagcccctggagcagcaggaaggagttgaacgggctgatggtggctcccgtatcccgcagcagggtggcccggattttgacgatataggccagattgccgcatacctcagcgaacacggctccgtggtaattggggttgggcttgctgatgccggggaacttgtcgttctgcgtccagtcgaatttaccgccgtccacaatcacgccgcccatcaccgtgccgtggccgccgatgaatttggtagcggaatgcaccacgatgtccgctccgtgttccagggggcggaacaggaagggcgtggcgaacgtgctgtccacaatgagcgggatgccgtgggcgtgcgccacttccgccagcgcttccatatccacgatgtcgcagttcgggttgcccaggctttccacgtacagggccttggtattgttccggatggccctggaaaaattctgaacgtcccttgcatccacaaaagtggtttctatgccggcgtccgccagcgtattggcaaagagattatacgtcccgccatatacggtggaagaagaaacgatgtggtccccggcccgggcgatgttctggatggcatacgtgacagcagcagccccggtggagacggccagcgcggccgcccctccttccagggaggcgatgcgtttttcaaaaacatctgcggtagggttcatcaggcggttataaatattgcccggctccgccagggcaaaacggcctgccgcctgttccgagtctttgaagacatacgaagtggtggcgtaaataggcacggcgcgcgcatcggtggccggatccggactttcctgacccacatggatctggcgtgtttcaaatcgatggttcttactcatggtttttatattcctatcggaaaactagggaataaataatgaaaaggaaagcagatgtcaagctccgggtaaaaaaaacgggacatgggccggaaggagaaaggaaggggaaatgttcaggcccgcggccgctgcttaaatgcctgctccgtagtcgcagccgatttccttctgctgttcggccagatcttccagcgttacgcggcgcaaataattctcaatgacttgttgcagcccgcgccagaaaggcagcgtggcgcagccggccgcccgcgggcacggattttcgtgggaagccgtgcaggaaaggggcaggagggagccttccgtcagtttcaggatatcttccgtagtatattcgcgcggatgcctggaaaggcggtatccgccggcctttccccggaagctctggacgaatcccgcttttaaaaggatggcgataatctgttccagataacgtacggtaacgtcctgcctggcggaaatctccttcagggagatgtaaccctcgtcgcggtgctgggcgaggtcaatcatcaggcgcagcgcgtaacgtcctctggtggaaaccttcatcatactggctaactaaacgatatttctgtctgtccgtcaatcgggaaagaagcccccagaaatgggcggccggcttggcccttttccctcctgcctggtttagtgggtgtagtggcggggtacccgggggcctattccggtaaaaatctcccaggaaatggtgccggccttttccgccagttccgtcacggggatatgcggccccatgatttctgcggtcatgcccggttccgcgtgcggcgcccggctgacgtccaccatgatctggtccatcgtcacgcgcccgagaagggggcaggaaacgccgtccaccatgacgcgggcgcccttgtgggccagggaacgcaggtagccgtccgcatagcctatgcctacggtcgccaccctggtggggtggtctgtcacaaaggtgcccccgtaggaaatgccgtggccttccggcagcgtgcgcaccaccgtcaggcgggaaaaaagggccatggccggcttcaattgcgcggcccatggggagggaatgggggaaaaaccgtacagcaccaggccggggcggcacatgttgttggagggaatttcataatccagggaggcggcgctgttggccaggtggcagtacttcaaaggcagtttttcccggatgcgggcggccatctgttcaaagcgggagatttgcctgagcgtaatctcccggtcctcgtccgcacagggaaggtgagcgcccaggccttccagatgcaggctgtccagttctcccaggcgggaaagcagttcttcaagctggtccggcaggaatccgccgcggcccattcccgtatccacggaaaggtggatgggcagcgtctttccgtacagccgcgccagggaattgtaatgcgcggcttcctccatggtggaaatgaaggagcgccagccgttcagcacgatttcctcccgttcctccgggaacgcggggcccaggatgtaagggcgggtgcggcagcccgcctggctgatgcgccgggcttctcccacattggccaccccgaagaaagcgatgccttccgaatccagcgtgcggcaaacctgttccaggccgtggccataggcgccggccttcacgacgggcatgtaatattcccctttggccgcctgtttgacgacattcaggttatggcggatggccccgaggtcgatttcggcccaggcgcggggagggctggttgctggcatggttggaaaatggcggaaaggttggaaaaagaggggcgccggatgctcccggtgcaggggattgtccgtctttggccgcgcaattccagacggatttttgtcagtcttttgaactttcaaaagataataaaaaccgccttgcgctgaaacgcatggcggtttgataaaaatgcttttgttaccggtgtgactggctggcagtcaggaaaatcggtttgcatttcaaattttgtcttgaatccgttggaaattaaacggatgttcagatgttttgtcaactgtttttttgaattgaataatttttataaaatacttgataaaatgcaatattggcatataacatgaataaaagcagttttttgtgatgtcgcgttctcttactttttcgttcgatattggttacgcctccattgggtgggctgtaattgaatccgcttctcatgatgatgcggatccctctgtttgcggttgcggtgcagttgtgtttccgaaagatgattgtcaggcatttaaaaggcgtgaatacaggcgtttgagacgcaatatccggtctcggcgcgttcgtatcgagcgtatcggcagattgctggttcaggctcaaatcatcacgcaggaaatgaaggaaactcccgggcatcccgctcccttttatttggcgtcagaagcattaaaaggacataggaatcttgccccgattgaactttggcatgtcctccgctggtatgctcataaccgggggtacgacaataatgtctcatggtctggcggcttttcagaagatggagggaacaaggaagataccgagagagtgcagcatgctaaagatttgatggataaacatgggacggcgactatggcggaaaccatttgccgggaattgaaactggaagagggcaaagcggatgctccgatgaatgtttcaacgccggcttataaaaatctcaataccgcttttccccgtttaaccgtggaaaaggaagtacgacgtatattggagctttccgcgcctctgattccggggctgacttcggaaatcatggagttgattgcccagcatcatcccctgacaacggaacaacgcggcgtattgattcattacgggataaaattggcccggcgttatcgtgggagtcttttgttcggtcagttaatcccccgttttgataaccgcatcatcagccgctgccctgtcacgtgggcgcaggtgtatgaagctgagttgaagaaaggcaattctgagcaaagcgcccgtgaacgggcagaaaaactatccaaggtgcccacggcgaattgcccggaattttatgaataccgcatggcccggattttatgcaatatccgcgcagacggagaacctctttctgcagagatacgcagagaattgatgaatcaggcccgacaggaaggcaagttgaccaaagcctctctggagaaggctatttcttcccgtctgggaaaggagacagagactaatgtaagcaactattttactttgcatcctgacagtgaagaggctctttacctgaaccctgccgtggaagttctgaaaagaagcggcatcgggcaaattctttcgccgtctgtgtatcgaattgccgccaatcgtctgcgtcgcgggaagtccgttaccccgaattatttgttgaatttgcttaagtcccgtggggaatctgtcgaggcgttggaaaagaaaatagagaaagaacgccatcaacaggccaatcgaaagaaagccaagaagacagatccggattatgccgccacgccgttaaaacccaggtatgcgacggggcgagcgccgtatgcccgccccgtcttgaaaaaagttgtggaagaaacccttgacggggaagacccgacgcgtcctgcccggggagaagcgcatccggatggggaactgaaagcgcatgacggttgtctgtattgtctccttgacgcggattcttccgtgaatcaataccagaaagaacgccgtcttgatacgatgaccaacaaccaccttgtccgtcaccgtatgttgattctggatcgcttgctgaaggatttgattcaggatttcgccggcggccaaaaagacagaatttcccgcatttgcgtggaagtcggtaaggaactgacggcgttttccggcatggacagcaaaaagattcagacagaactgaatctgcgtcagaaaagccatacggaggccgtcaatagattaaaacgggagttgccggggaaagcgctttctgccaatctgatacgcaagtgccgcatcgccatggacatgaactggacatgtccgtttaccggtgagcggtatggcgctcatgagctggaaaatatggagatggaacatatcgtcccctattctttccggcagtctaacgcgctttcttctctggttctcacgaggaaagaggttaacaagatgaaaggtcagcgcaccgggtacgactttgtggagcaggagcagggtaagccggttacgggacgaacgaaccttcatatttgttcccttaataattatagggaatttgttgaaaagttggacgacaaaaagtggcatgaagatgaccgcaagcgcaaaaagaagcgcaaagccttactgatggtgaggggattgtctcataaacatcaatcacaaaatcacgaggccatgaaggaaataggcatgacggaaggcatgatgacgcagagttcccacctaatgaaactggcatgcaagtctattaaaacctctctgccggatgcgcacatcgacatgattcccggcgctgttactgctgaagttcgcaaggcgtgggatgtttttggggtcttcaaggaattgtgcccggaggctgcagacccggtcaacggcaggattattaaggaagatctgcgttctctcacgcatctgcatcatgccctggatgcctgtgtgctggggcttatctcagaaattattcctgcggacagaaaaaacgtgttgagacgcgccattatcaagcgccgtctggatcaaaagatgaaacaggacttcctggaactcaggaagaaacgttattataagttgcgtgagaaggatggccagacgggagcatcattggtggatttgcctagtgggatcaaagaaaatatccgcgagaaattgatggagcagagggtcattcagcatgtccctgcagacatgggcggcgctttactcaaggaaaccatacagagagtgctttctgttgatggaagcggggaggatgccatggtttctctttccaaaaagaaagatgggaagaaggaaaaaaatcaggtaaaagcaagcaaattggtcggagtgtttccggaaggcccgtcaaaattgaaggctcttaaggcggccatagaaattgatggcaattatggagtggcgttagatcccaagccggtggtgatcagacatattaaggtgtttaagcgaatcatggccctgaaagaacagaacggcggcaagccggtgcgtatcttgaaaaaaggcatgttgattcatttaacctcctccaaagatcccaagcgtacaggcgtatggagaattgcatccataaaagataatgagagaggcatagctattgatcttcaaatacctcattccgcagttcccggggccaaaactcatgaatttaattggattaatgtaaaacttgatacactattaacaaagtatcgattggagatataccccacttcttatacgggaactccacgataaggcgttttacatgtcataccatattctgagcatagatgcctgcacatgccatctgagctgcgacaagggtcagctcagatgcgtggatggagagaatcctccccggacgattccgctggaggatgtgggggctgttgtgctcagttcttttaaggcgacgctcacgagcaatttgctgatagaactggccaggaagagaatagggttcgtgctgtgtgaaagctacaggcctgccgtgctgcttctgccggcggatcgggctacggataccgctctgttaagacatctggcggatatgccggcccgtttgcggaaccgcctctggcaaaagactctggatgccaagtgtgggaatcagacggcgctggcgcaggtatggaatccgcatcatcccgccattgcggagctgaagagaatggccgtgacggaaaagacggcgagggaagcagagtgcgcccgcctgttctggagcgtatttgcggatacatgggcaaactccgattttcgcagaggacgtcatgaggaggggtttaataacctcttcaactatgcgtacgctgttctgttgtcttgcgtattgcaatatctctttgcgctggggctggatccctgcttcggcatttttcatcaatcccgggaacatgcggcgcctttggcttatgatctgatggaacccttcaggcctgcctttgacgccaatgtggcccgttggattcatttgtgcctgcaggaaggaaaaacagaagagagagcaggagaaatcacccgtgagttcaggcgacatattacagctaccttgcaggcttctgttatgcaccagaacaaacagatgccgttgaaagcggcggtagaggccgtttgccgcagtttccgcaaagcagttcttgccgggcaatccggaccgtatgaaccatggcatatgacaactataaaatgggctggctagttgtgttctttgatcttcccacaaccacgccggaagataaaaaaaactatcagtatttccgtaaggctcttttagaagacggctatacgatgattcagtatagcgtctatgcccgcgcgtgtgttactcaggaaagaatagctacccactcccgcagaatccagaaaatgataccgcctgatggttctgtccgctgtcttttcgttacgaatatccagtgggataagatgttcgtttttcatggcaggtcttgtccccgacaggaggtttcccttcctcagcagatgctcctctggtaaaaatatcggacgccgtatttttttataagtcgctgaacataaaaataaggcacagtatctattgtactgtgccttattttggattcaaggcaaaacaaagacaccatagcaccctgcacatggggaattgtactgtgccttattttggattcaaggcaaaacaaagacaccatagcaccctgcacatggggaattgtactgtgccttattttggattcaaggcaaaaccagccgtaggtgatggcattgtaaaaaaattgtactgtgccttattttggattcaaggcaaaactgcctgacgctgatttaactccggaacgcattgtactgtgccttattttggattcaaggcaaaacaacaaaagaattcatgcctaaatttttttattgtactgtgccttattttggattcaaggcaaaacaaggacatgaaaggaacacaaggaaaagaattgtactgtgccttattttggattcaaggcaaaacaatgcatgttgatcgatgctggatttgaagattgtactgtgccttattttggattcaaggcaaaactcgcagggatatgttcccgttgcatggttgattgtactgtgccttattttggattcaagacaaaataaatacgcctccggtttgatgacgcaaggtggatgtccgtctttggccgcgcaattccagacggatttttgtcagtctttctttaacggagcgggaggaatgaagctgtacgtccagaacatggcgccggttgcggaggtgattccgtccatgttaagataacgggccaaaagcagggagggggaggagtgccccatctccttctgaagaaggttttgattgcagaaatgggccaggtgataggaggcgtaggtatgcctcagcacgtcctgcacccatccgctttttttcaggatgccggaccggcgccttacttccctccatttcttttcccagttgggcgggcaaacgggacgggagggggaaccggcggaagacgtccggctgaggatggcgcccagcacgggaaggatggaaacgtagcggctcccgcctgttttggtatggctgggcgccagtgaaaccaggccggatttcaggttgatgttcttccaggtcagccttttgacttcgtgggggcgtatgcccgcgtacagcatcagggcgcaggccggcaggcatgccccgtggaacaactgttccgcggtgtggagaagccgttttgcctcgtacagggaaagggccctgatgcgtttttccctgaggatggggggaggaaccagaaaggccgcgtttctgcggcaccacccgcgcttcagggaaaaattcaggatgccgctcaggatcagccgccccttgtgccgctggcggggagtggaaaagcttttgcggagataacgctcgcaatcttccggcgtgatggaacggacctgttttcttgtcagttccgggcattttttcatcatccgggcagccatatagcggatttcctacagggtgcggggccggcggtgtttccttgcttccaggctggcgcggacagcctgggaaaacggcacgcttgtttccctgtcggcaagggcctctcctcccagccgtatgcatcgtttggcccgggttattctgtcgcctctgccgcggctggtgtccaggaggtcttttagaagaaggaaagcgtccatgggaggaatgcccagggaacggatgagtaggattcctgtctgatccgtgtcggtgaggaaagaggaagtcggtatgttcatgaagaacgttgtagcagaggattcccaatccgtatgcaagcttgaaatgtgatgaggataaatatgaaaatcagacaagaacgaaaatatctagggcaatgattacagcagagtataagggcgaatatgttggattttgttctaaatccttgaagaagtgtgtacggattgggaatccgttatacctctgcccatggaacaatatttcaaaaatttattagggaaaatggcgaaaacggctcttctaagtgtttttcttcactttggttttttgggaggagtttgccgggcaagtgaaatctacatagagaaaagtatctggaatgatgatcaggctgtttatgaggtcagcgattatggtagtgtattgtacaatagtgattcggattggtatttgaaggggtgtaatacattgtatatgaatggtatttatccttattttgaagttcctcgtgtagcgttgatgttatctgatttaacttttcatgtagagctgggagaacgaaatttgaatgaagctattttgggtgttaatttttttggagacctcagagcaaccatggcattggcgaataccaagtgggatataacggtttctcccgatttgaagccaggacgttatttgctgtttacaaatacagaatcattttctacccccctatttcacatatcaaattggaatgtggatgataatccatgcatagaagcggagtatgacgacgcttcatatacatggctctccatatattataaccatcttggttcccaagtgccggagcctggcgcggcggggttatccctgctggggattacggcggcgttgtggcgccgaaggagggaataggggactttttataattccgcagatttgttcgcgcctctgaggaagccctgtcgtcaggttgtggaagagccgggcggtgatgttttcttttctgcttcagtaggggaatggggagcgtcccgaagggttttcagcagggccgccatggtgtctatgtcctcatccgtcatggaggaaaggtcgtccagtttctttttaatggcttcaatttcctcttcccggtacggcagcgcttctccgccgtggggactcagaaagaaggacgtgatggtgctggtgagcgttcccacgaatccgatgcccgtgagcatcaggaatacagccagaaatttgcctgaagtagtgaccggataggtatccccgtagcctacggtggtagccgtgacgaaggaccaccagatgccgttgggcaggctcatgccctccgccagatggatgcctacggcccccagcaggatgatgaccagggcggcgatgcagatatacttgaatccgttcgtgttgaagaaacgccggatgcgcgtggtgaacctcatggcataggaaaacaggtccagatacctggcgagccttaagatttcccccagcgaggcgaacctgaacaggcggaacagggcgtcaaagggaataatggccagcaaatcccaggggtgttccttaatgaagagccatttggaccggctgatggagaagcggaccacataatccagcacaaaaatccagtagatgacgcggtccgccgtgacttcccattccgccgcttccgtggtcaggtcaatggcggtcagcgttacggcgaccagggccagcaggcacatgcccgcttgataggccagcctcaggaacagaatgtggcggggcatgcggcgtaacgcgttcatggcgggaagagaaatgaaaaagccgcccccggcggggtgggcagggagcggcttggggaaaagaggctgtttcctccgggccccttacttcagcaggagctgttccatcagggcctgggaggattgggccagcacggcgggatcgtccagcatgccggcgcggagcagggcggtattcgcgatctggtccgccaccatttgcgccagttccgggttttccgtccgtagggcggaaagctttttcaccagcgggttggaggggttcagttccagctgcgggtggctttccggcacttcctgccccatggctttcatgtacgccctcatttccggccccatgtcattgccgctttgcagggctacggcggctccgctgaccaggcgcttgcccagggtgactttggagaatttgtccgggtacagccctttcagccattcttccagggccgcggcttcctcctggggcagggcgtccttctgttcctcttccagggcggggagttccacgtcggcgcggtcgatcatcgtgacgggctttccgtccacgctggacagggagtccagcacgaattcgtccccgtggtccgtgaagaaggccacttcatagccgcgggctttgaaggcttccaggtacgggctgttttccagatgggagcgggaggggccggtaagcgcgtaaatggccgtctgcccttccttcatgcgggtgacgtagtcttcaaatgaggtcgtttcccccggttccgtggccgtggattcaaaacggagcagcttgcccagggattccttgttcggccaggaggtgacgacgccttctttcaggtagcgggagaattgcgcgtagaattccctgtaggtttcctgatcgtccttcgccagtttttccagatgcttgatgaagcgtttggtgatgatgtcgctgattttgcgcaccagggagttgtcctgaagcatttcgcgggaaatgttcaggggcaggtcctcgctgtccaccacgccgttcaggaagcggagccattccggcagcaggccttccggcttggcgtcaatcagcacgcgcttgcagtacagggccacgttggcgtccacgcggccgaatccgaacatttccggattgcgcctggggatgaaaagcagggcattcagggcaataggggcgtccgcgctgaagtgcatgtaggacaggggtttttcatccgtgtgggcaatgaactggtaaaattcatcatattcctccggtttcacgtcggatttggacttggaccagatggcctggacggtattgacgtgctctccgttggagttgagagggaaccccacgaagttggagtagcggcgcaggagctccttcacgcggtattcctgggagaactcttcatattcgtctttcaggcggatgacgatgcgggtgccccggtccagcggttccgccagcgtttcgatgctgtagccttcccgtccgtcagaagaccagcgcagggaggcggcttccgggtcataggaatgggtgaacacttccacccggtccgccaccataaacgagctgtagaagcccacgccgaactggccaatcaggtccgctccgccttcctgcttctgcttgagggcctccatgaatttttttgtgccggagtgggcgatggttcccaggttttccaccaggtccgcttccgtcatcccgatgccggtgtccgcaatggtgatggtcttgttttccttatccgtggtgacagtgatttccaggggcttgtccggctggtaaatattagaatccgtcagctgcttcagacgcagtttttccagggcgtcggaagcgttggaaacaagctcgcggacaaagatttcacggtcgctgtaaagggcgttgatgacaatgtccagcagctgccggacttccgcctgaaattgatgtgtttctgtattcatatggaaaaatgttttgcgagcgtcattatacggcccccgtcaagggggatggacagtttttctccctgggcccgggcgtcccatgtcacacaaaggggctttttcccgggcatgggggccgggcgtttttccttgaaacaattccggaaaccgaacagtattatttaacaaatgattttctcaccattgttgaaaaaggggattcttttactggccctctgcggcgtgctgggcggaggcgtgctttccgcccaggaaacagggggcgcgccgattacggaggagggtttgaaggcattggattccaatgtgttcgctaatgaatacatgcttgcattgaagcccaatgtcacgcgcgaccgcatcgccaaaattaaggatccctttgtgcgtgggctcgccgagcagatggcggagaagaaatttgaccgcaaggcccgcgccctgacggcggagccgtatgaaccggtcaaggatctggcggaacgcctgcgcaccagccagtacagcaaatttgaaaatcccaccggcatcttttttgaagagggggaggacgtattgctggtcatgggggatcccaaaggtgaaaaactgaatctggttatccacaatttcgggcgggacggaggccacagctcctatccgctgaaagagggggtcaacatcatcagggcgaagaacaaggggcttggctatattgagtatttcacatccaattacaagaaggcgcccaaggtgcatctgtccattctgtccggcaaggtgaatggagttttcgtgggaggcgtcagcaaaaacagcgactggaagaggatgctggaaaactcccccacggaagttgtggacatcgtgggcaaccgcgtgcatctggtgtatccggtggaggaacttaaacaattctgcccggacaaaggggaggagctcattgccctgtacgacaggattatcggcatggagcagcagatcatgggcctgtacaagtacaggatgctgcccaaaaaccggatgttcggccgtgtgatctggaacgggttcatgcatgcggacggtacgggagccgcgttccataacggtaccatgaaggaggtcggcaatccggacaagattcccggcagcgcctgggggattgcccatgagttcggccacgtcaaccaggtgcgccccgccatgaaatgggtatccaccggagaagtgaccaataacatttactccgcttacgtgaattacatgctgaatccctccagcatgcgcctggagcatgaacgcatcaacggcggggacggcaacatgattggcggccgcttcaacgcctacttgaacaacggcattttgaagggggaaaactggcttgtccagagcggtccggacaagcgttccggcggggataaccgtccgatggtgcacgaccattttgtcaagctggctcccctgtggcagctggagctgtatttcaagatagccgggaagggcaatcccgacttttatccggatatcttttataaggccatcaagatggataccaggggcaagaaggatggagagctccagcttgcgttcatgaagaacgcctgcgacgccgccagacaggacctgacggattttttccggaaaacgggcatgctcaagcccattgaccaggaactggacgactacacctgcgcccgcatgaccatcacggaggccgactgcaagaacctgattgcctatgccaggaagtacaaaaagccggaaagccccgtcatttactatatttccgtcaatagcgcggaagcatataagaaccgcctgcctgtccgcggcgtctataaccagggcgttacggagcagggcaatcgtcgcattatttcccatgacgtgtggaaaaacgccgtcgtctttgaaacatacaaagacagggagatggtccgcatcaccatggcggggacggattccagggataattcctccaccacggtcccctatccggaaggctctacgcggattgaggccgtttcctgggacggcaggcgtacgctggtgtacggcagacgccctgacaaatgaaagcttaagaggttagcgtgttcgggcgccgccgttctccgggacggcggcgctttttcatgacagggggggcggatggaaaaccgcaagaggattgctcatcctgatggccttttctccataccgtatcttccggactgctgacagccggaaggctgttgcttttgaacaggggcgggggagaggctgtataacatgggatggataaggcaggaacttccggaggcatcaggggaaagatgctgttgtttgccgcctttttaatcgtgtgctttaatctgcgtaccgggtttgattctcccgatccgctgttgggaacgattgaaagggatatggggctttccctggaaaattcagggctgttcgccctgctgcccgtctttgtgctgggggtggcggctcccatttctccgcgcgtggcgcgccggatgacgccgtggaaaatcattttctggttccagcttctggcggtggccggaattttctggcgcagctgggacggcgtggcggggttatacggcggcatggttctgatggggctgggcatggggattgccggagcggccattcccggactgatcaagcaccagtttcctgaccgtgcttccgccatgatgggcgtttacagcgccatgatcggcgtgggcagtgctgcggcttccggcctgtccgttcccctttccaatatgctgggaggctggcgtttcggcctggggatctggattattcccatcctgctggggatgctggtatggggcgcttattttctcaggcatccggacggcgtgtttcaaaacgattcggcggcatccggacgcagcctgctgcgcagcggcaaggcatggcaggttaccgttttttatttgagccgcgttggggctgcctatttcttttatacctggattcccatctttctgaggcagcggggcatgagctatgaggacgccggtttcatcctttccgtggccatgttcgcccagctgcccgctacgctctccgctcacgtgctggaaaaagctatgggagggcggggcctcctcatcgtgatggccatggcgttggcagccctctcctgctggggcatcctgtattttccgctggactgggccgtctggatggcgattctgttcggcctggcgacgggaaccgtattcagccgcggaatggcgctgatggtggaacgggcccggacgccttccgaatcaatcaggctttccggcatgtcccagggaatcggctttaccatgggcgccctgttgagcctgctgtttacctccttcctgcatcagggaggctcctt

SEQ ID NO: 2555 - DNA, 23324 bp, synthetic construct
  source 1..23324: mol_type = other DNA
  misc_feature 1..23324: note = Synthetic
accttgggctggatattccggacggcgtgattgaagcctatgaacgggtgaaggaccaggtgaacttggcttccatcgacgcccgcgaacgcgtcacccgccacgatgtgaaggcgcgcatcgaggaattctgcgacctggccggatgcgagcacatccacaagggaatgacctcccgcgacctgacggaaaacgtggagcagctccaggtatggaagtccatgcagatcatccgtgataaggccgtggccgtgctgaaccgcatgagcgcgctttccgaacagtggaagcgcgtgaccctggccggacgcacgcacaacgtggccgcgcagaccaccaccatgggcaagcgcgtggccatgttcggggaggatatcgttcacggcctgggttcctggatttccatcatggaccgctacagcgtccgcggcctgaaaggcgccgtgggcacccagcttgaccagctctccctcttcgggaaggatgcctcgcgcgtgctggagctggaggaccgggtgtgcgcccatctgggcattcccgccaaatggatgaacgtagggcaggtatatccccgctcccttgacttttccgtggtttccggcctggtggagctgacctccggctgttcctccttcgccaagaccctacgcctgatggctggccatgaactggctacggaaggcttcgccaagggacagacgggctccagcgccatgccccacaagatgaacgctcgctcctgcgaacgcgtcaacgggttccacgtcatcctgaagggctacctgatgatgatctccggcctggcgggcgaccagtggaacgaaggggacgtgtcctgctccgtggtgcgccgcgtcgtgatgccggactccttctatgccgcggacggcctgtttgaaaccttcctgaccgttctgaaccagatgggcgtctatgaagccgtggtggccgcggagctgcgccgctacctgcctttcctgatgaccaccaccatcctgatggaagctgtcaagcgcggcatcggccgcgagaccgcccatgaggtcatcaaggaacatgccgtggccgtctccaacgacctgcgcgccggaaagatttcggaaaacaacctgctggaccgcctggcggaagacggccgtctgggcattgaccgggccgccctccaggaaatctttgacgccaattccgccgccaccggtatggcggacgcccaggtggaagcgttccagggcatggtggcggacctggtggacaggttcccctccggtgcgggttacacgccgggagacattctttaagagagccgccggcggttaactgttgacggagagcaggctctccatgcggggcgggaccggaaggctcccgctcccttttttgccggcatgggcgcggcatggcggatgagacggaaatccggcacggcaccccctccgcttcagggtgggggtgcccggaacgcccggcctccgatgccgaatacatacattgtttttcaatatctttgcgtcaggagagcttgacgaatctggaggatgccagtaatctggaggccagtaaacgggcgcgccacttttctcgcgcttttgcaaataaaccctcctgtaaacaattttcaatatggaaaaccagcagctcaaccttttggaccgtgtatataccgttctcagaaagagaggggaagagacggaatggatcacctccgcggacaatcatgaaatcagaacgggcatcgcgttcgttccctgtgacacgttcacgcccgtgagccttctgtacacgatgatggaacacccggaaacgctggtcattgacgttctcttcgccgccaaggttcccgaaagccgccgggtggaagtcagcatcatcctgagcgaactgaatgcggaccagaccgccggcgccttccagctggaccccaacagcggatacgtttattaccgccagtcctttgtgctggagggaatggacctcagcgaagcccagttcgcccagttgatgaagaacattgaaaccgtggctgtggaaacggcggaagcctattcccacatcatggaaacggaatatcccaagtaaaggcgtcggcttccctcccgcagtgctgttcatgagcgaagccccccaaaaaaagggaacatggtggtccataggcgtcggcctggggatcactgtccttttgatagggacggccatcgtgacggagccggaaactccggaatccgcggacggcggcggggaaacggcgcagcgcacccttcttcccctgcaattgcaggacaattcctttgaaatcacggcgcgcggcatggtgcaggccgcccacctcacaatgctctcccccggcgtttccggcaaggtggacaaggtgcattccctgttcagtcccggagaaatcatcctgaaagggactcccctggtggagctggaaaaatttgaataccgcgccaggctggccaaggcgcaggcggaactggaacaggcgcgcctggacgtgtccacggaacaggcggaggcattgaaagccgtcaaaaaaacgtacagttccgtctccaaaagcggccgggactccgagctggtcctccgcgtgccgcagaggcgcgccgtgaatgcccggctgaacgccgcggaggcgtatgtggaggaatcggaacaggccctgcgggatacggttctccacgctccttatacgtgccaggtggtggaatgctccgtggggctgggttcacgcgtggtggccggccagacggtggggaaaatcatcccgcttcaggagcggatgatccgcattcccgtgcctctggaagaattttccgcccttcccagggacgaacagggcagggtgagggtgcccctgacggcctcctgcacgctgaaaaacgggaagcttctgcaatggcgcggccgcgtcacggcagtggattccgccctggaccctgccggaaattccgccatcctgatcgccgccctggacccgaatgaatcccacgtggcggaatggcaggccgcccctgtcaatatggcccttcaagtgaacattgacgtgcaggttcccgcttccgcgtggattccttccgccgccctcaagaatggaagctccattcaggtaaggaccccgacaggaatgcaggagcgcaaggtgcagttggtggtgttgaaagacggcaaagccctagtgaccgttccggaatttcaggacggagacgtcctgcttctttaattggaaaactatatattcaacttcgctataaaaatctaaaaacgcttcgcgttcagggttcggcgacccatgcgttagtctctgtccgtcttcatgtcgaacaccagcacttcaaagggctgaagctccagagaaaccgacttgccctgttccagttttagtgttttaacgcgctggtccggataggaggccttcatggagaaaacggggggcgttcccttcaccggttcaaagacggtagcggcgtccaggacgatcgttcgcggctggtcgtccggattacggagggccagcgtacatcctcgcggactccaggccgcatagccgtagggttccaattgattcggattgccgcccacccagtgcacatcggccaggatgtcctggaagcgccgcgcccagcgtgctccgtccgcgatgtcgtcccacgcttttttgtccatcatggacggcgtgaggtaaagctcctgaagattggctccggagccgaaataaatgcgggcgtcgttcttcaggtccctgttgtcctgcttgccgtcttctcccttgctgacgcgcgccgcctggaacttagtacccagcaccatgccgtggtgcatgatggagttcaggggataaaggggaccgggcttgacaatgacgttgtagcaggccccgtcgcggaacgtgatccactgctcgcggtcatttcccttcccggtccagcccacatccgccgtgccgttgcgccaggtggaatccacatggttgagccagaagggggagggccaggtgcctaccgtcgtgttgatgaacaggcggggattctcccggcgcagttcgctggcgatggaaagaagggccatgaagtgggggctgatgccgtctccggccttgtcccatttgaagtaggtcaccttgtcctttttcatcaggtcggaacagcgttttttgaaccattcgtaatacttggggcaggaaaggtcgaatcccgcggcgtcctcgggcaggatgcccttgtccttggcgtgctgcaccctcttttccgggccgaaataccctcccagcggagaaatccagatgccgaagctggaaggaatcctgcccaccgccttgactacggggccgaatccgtgcgggaattttttggtggatggctgccagaggtcttcgttgacgtcatcccacccgtcatccagcacaaagccgtccagtttgacatggcgcgctcccagctccttcccgtattctccggctgtcttgaccagcgttttctccgtggggtccaggccgtcgtcataccagccgttgtaatgcaggaactggtggtagggcgccgcccgttcccgctccagataataaaggaagccgcggcgcaactggttttccggccatacgcccagcaccgtggtaaatgtctggacgcttccgctgcccatgggaaggttgcagtcaaacccgacggtccccgttcctcctccggcctgagccctggctacgggaagttcaattccggcaaacgtgccttccctctcgctgaccagggggctgcccggcacggaacctttcacggccagggtgggatccttcaaatcaatcagttggattttcttcaaatccacatccttggacgcttcaatcctgtaggtttccttgacgtaggaggaaccctccctcaattccgctttccaatggaccgtcaccccgctctttttatccctgaaaatggcggaaaccacagctccttcctgccgttcccccagccggggactggcggcgctccctttcagggcgcttatggagggagctccctccatcacaaaccgggaggaggggagattgtaatcttccttctccgtggaaagacggaataactccggagcctgttctctggggactgcattctccgctccggagggccgttctttatttacgattcccataggaaccagcctgttgccggaaaccttccatgaagcggtcaggacattattgctcaagctgtagatatccccctcccggtgggctgccgccgcgccgggcgctgttcccgggtacgttacggaggtcgccgcggcttggaggcagatgcaggaacaggcagtcagggcaagcactggaagagatgatgaatgcatgattcggaagaatccgccatgcggcggcatccgtcaattcaaaaatccggcgcggaccgggggctgcatcgtgcgccccgtgtcgccgggaaattcctagtgggcttccagccagttgtcccccgttctggcctccaccaggatgggaacgctgttgggcaggggcagggcgcccgtcatggccgcctcaatgcggggaatgaggtccgtttcttccttgtgcaggtccaccagcaattcgtcgtgaatttggagaataagccgggaccgcgtgcctttcagcagtttgcccacattgatcatggcgatcttgatcatgtccgccgccgttccctggatgggagcgttgatggcggtgcgttccgccgcggatttgatggtcttgttggcggaattgatttccgggataatccttctgcgtcccaggagcgtttccgcatatcccttctgttccgcctggcgcgccaggtcttccatgaaggttttgacgcccgggaactggaggaagtaattttcaatcagagtggcggcttcgctgcgggggcaacccagcctctgggagagcccgaaggcggaaatgccgtagataatcccgaagttcaccgttttggcagcgcgccgcatgacggcgtccacctggtcgcggggaatgccgtacacgcgggaggccgtttccgtgtggatgtcccggccttccttgaaggcctcgcacatggcgggatctccggacatggcggccatgatgcgcagctcaatctgggaatagtccgcggaaagcatggtgtactccccggaggcgggaacgaaggccgtgcggatcagccgcccctgttccgtccgtaccggaatgttctgaaggttggggtcctgggaggccagccggcccgtggacgtcagcatctggtggaactgggtgtggatgcggccgtccttcgggcagatgtacttgggcagggcgtccaggtaggtgctcttcagcttcatgttttcccggtaggccaggatgtcttccaccacgggatggagcggcgccagggcggaaagggtttcttcatccgtgacgaactgcccggtcttcgtcttcttgggcttcttcaccagttccagttccccgaaaaggaagtcgccgagctgcttgggggaattcaggttgaggggatggcccgcggccgactcgatctttgtgcgcaggtcctcaatgatggctcccaccttgatggaagctttttccagggactccggaagaacgcggatgcccgtgaattccatgtctgcgagcacgggcagcaggggcagttccaccgtgcggaacaattcctgcatgccgctctcctccacctgttttttcagaatggccgacagctggagggtaatgtccgcatcttccgcggaatacctgcccatcacttccacggggatattcttcgtgtccagttcccgttttttggctcccgccggggcaatgtcgctcaacttgatggtggaatactgaaggagggattccgccagaatgtccatgccgtgcttcatgccgggcgcgatcatcgcgtgggccagcatcgtatcgaaaaacgggccggaaacatggatgccgtgggggcgcatcgcctggaggtcgaacttgaggttggggccgattttttccgcggagccttcaaaaaggggcctcaccgcttccaggtcttccgcaccggagacgggcaggtaccaggctttgtgaggttcggcgcagaaggagatgcccagcagggtgtccgttaccggattcaggcccgtcgtctccgtgtcgaagcaccaggaatcgtgcctgttcagttccgcgatcatggcgtcgcgggcctccttcgtgtccgcgatgatgtattcgtgcctgatgtcgtccacggttttcaactggcgctcttcaaacaattccatctgtcccgttcccgtctgctgcggccggggggccggggcgggagcctcctgcggctgggcgggggcgaacaaatcgtctgcgggaaggggagcggacgccctggcggccggaaccttcctgccgaacagcttggcctgcatggcgcggaactccagttcctgaaggatgctcagcagttcgtccggcctgggctccttcttgacaagctcgtcaagggttacggtcaggggcacgttcctgtcaatggtggcaagctccttggaaagggttgccagcgcggcgttctcctccacgatctccctgcgctttcctttcagtttgtccgtgtttgccagcaggttttccacggagccgaattccccgatcagcagcttggccgttttctcccccacgccgggcaggcccggaatattgtcggagctgtcacccatcagggccaggatgtcgatcacctgctccgcccgttcgatgccccagtgttccttcaatttttccaggtcgatcacttcgtggtcgttgccgcgcttgccgggccgccacaggtagcaggagggggaaatgagctggcccaggtccttgtcctgggaaaccatgtaggtgtggaactccttcgtatcgtccgcaaggcgggaaagggtgcctatcgtatcgtccgcctcatacccctcatagcgcagaatgggtatgttcatggcctccagaagactgaaaatgatgggaatctgaacgcttaactcttccggcatggactcccggttggccttgtattccgggtaaagcttgtggcgggccgtcggggccgaggtgtcaaaacaggctgcgatgtgggtggggctctcctgttccagaatggccagcagcgtattggcaaagccgtaaacggccgatgtgttgactcccttggaattgcggatgggattggagaaaaaggcgaagtgggccctgtatgccagagccatgccgtccaggatgaaaaggcgcttgggagtggattcagtcatttctgcgccaatgtaccattccgtccggaacgtggcgacagttaaatgcggcttgtgccttccggatggacggcattccgcaagccttatggcggcgcaaggtccggcaggacgaggatggaatgcctttccgggaagtgtgccgcgcgggggcgcggttttcatccggaagggcggtttttccggcgcgccggaaaaatcagtgcgtgtaatgcctggggacgcgcgggccgatgcccgtgaatatttcccaggaaatcgtgcccgctttttccgccaattccgtcacgggaatattcggtcccatgatttccacggtcatgccgggctccgggctgggcacccggctgacgtccaccatgatctggtccatcgtgacgcggcccagcagggggcaggaaatgccttctaccatgacgcgcgctcccttgtgggccagagaacgcaaatagccgtccgcgtagccgatgcccacggtcgccaccttcgtggggtggtccgtcacgaaggtgcccccgtaggaaatgccgtggcctgccggcagggtgcgcgccacggtcagtcgggaaaagagggacatggcaggcttcaattgcgcttcccacggggagggaatgggggaaaagccgtacaggaccaggccggggcggcacaggttgttggagggaatatcgtaatccagagaagcggcgctgttggccaggtggcagaatttcagcggcagtttttcccggatgcgcgcggccatccgttcaaagcaggctatctgctccagagtggtttcccggtcttcgtccgcgcagggcaggtgggcgcccagtccttccatgtacaggctgtccagttcccccaggcgggagagcagctcttcaagctggtccggaaggaacccgccgcggcccatgcccgtgtccacggaaatatggatgggcagcgtttttccgtacagccgggccagggaattgtaatgcacggcttcttccatggtggagatgaaggagcgccagccgttcagcacgatttcctcccgctcttccggaaaggagggccccaggatatacggccgcgtgcggcatcccgcctggctgatgcgccgggcttcccccacgttcgcgacgccgaagaaggcgatcccctccgcgtccagcgcgcggcacacctgttccaggccgtggccgtaggcggacgccttcaccacgggcatgtaatattcccccttggccgcctgcttgacgacgttcaggttgttgcggatggccccaaggtcgatttcggcccaggcgcggggagggctggtggctggcatggcggagaaaggcggcgggttgaaaagagcgggcggaaacgccccaaacgcaaaaaattgtccgcctttatgcacgtaatgccagacggatttttgtcagtttccttctcttctgtgaaacgtgaggcggaggggccattttttgtcttacaggacagtcacgacagagctttttgattcatggcagagaaagaagagatgataaaaaagactgcctcacttctacagtgagacagtcttaaaaaatgctcttgttaccggtgtgactggcttgcagtcaggaaaatcggtttgcatctcaaattttgtcttgaatccaaaaacactagagcgcagttgccggttcctgtcaaacgttttttgattattttaagataattcttatggatgcttgatgctgagtaatgttgatgctattataaatataaaccatttttcttcatgatatcacaatctcttactttttcctttgatataggttatgcgtcaatcgggtgggccgttctcgaagccaatccggatggcagtcaggatgcggatcctgtcgttcagggttgtggaacagtactgttccaagctgatgactgccaggctttcaaaagacggtcttaccgacgtttacggcgcaacataagatcccggcgcatacggattgagcgtatagggaggctgttggtacagactcaaatcattactcagaacatgaaagatgctccggggcatccggctcccttctatctggcatctgaagcgctgcaagagcatcgagttctttctcctctggaactttggcaggttctccgttggtatgctcataaccgaggctacgacaacaatgcatcatggtccaacagttcctcggcggtagaaaataaggaagatacagagaaattaagaaatggtcatgagttgatgaagaaacatggaacctgttccatggcggaaaccatttgcagggaattgaagttggaagaagggaaacaggatgccccgatgagtttttcaactccggcttacaaaaccctcaatactgcttttccgcgctcccatgtgcaaaaggaagtccgtcagattctggaactttccgcgcctcaaattcccggactgactccagaaataattgagcttattgttcagcaagaattatttactacggaacagcgtgaacgtttgcttcaatttggaataaagctggcgcgccgttatcagggaggcctcttatttggtcagttaattccccgttttgacaatcgcatcattcggagatgtcccattacttgggcgcaaatttatgaagctgagttaagcctgggttcttctgagaaacaggcgcgggaaaaggcggaaaaactttccaaggttccttctgcggattgccaggaattctatgagtaccggatggctagaattttgtgcaatctccgtgctgatgatcagcctcttcctgcgtccttacgcaggcagctgatgaaagaggccctcaaggaagggaaattaacgaaatcttctcttaaaaaaataatttcctcccaggcattgacggaaaataccaatatagataattatttcaatctgcatccggacagtgaagaagctctttatttggatccggcggttgaggtcttgcaaagaaccggtattcacgatgttctttctccttcagtcaaacggatggccctgacacgcctgcgccgcgggaaaacctgtactccccgttatcttttaaagctgatgcgttcccatggggaacctgttgatcagcttgaagctaaaattgagaaaaggcgcattcaacaaggagaaagaaaaaaaggaaaggagcacgtaccagcgggaaaagattgggcagaggaacccttgcttcccaaatgcgctactggccgtgcaccatatgcccggccggttctgaggaaagttgttgaagaagttcttgccggggaagacccctcccgccctgccagggatgaaaatcatcctgacggggaagtaaaaacgcatcacggctgtctttactgtcttcttgatcctaagtccaaagtcaatgaatatcagcgtaaccgtagtattgactcccttaccaacaatcatcttgtcaggcaccggatgatgattgttgaaagattgctgaaggatcttatccaggatttcgctgcgggccggaaggaaagggttgagaaagtctgtattgaagttgccagggagctttcctccttctccgggatggacagtaaaaagattcaggcagagctaaatctgcgtcaaaaaagccatgccatggccgtcgagcgtttggaaaaggatctgcctggcctagccctttcagctaacctgattcgcaaatgccggatagctgaagacatgaactggacctgcccgttcactcttcaaaaatatggaccccatgatcttgaccgtttggaactggaacatatcgttccttatgcattccggcagtccaacgctctctcttctctcgtactcacctggaaagaggttaataaaatgaaaaaccgtcgcactggatacgattttgtagaacaatgcgaaggttcccctgttccaggatctaatcttagcatttgctccatcaataactataaaacttttgtcaacgggctggacgagagaaaatggcacgcggacgatcaaaaacgtaaaaagaaacgcaaggcattgttgatggtacgtggtctttccagcaagaatcaagcacaggccaacataggcatgacggaaggaatgatgacccagagttcccatttgatgaaactggccgcccgtgtagtttccaggattctgccggatgtctccattgacatgattcccggagcggttaccgccgcagtccgtaaatcctgggacgtttcagggtgcttcaaggaactttgtccggaactctccggtaaaatcaacaagcaggatttgcgctcctgtactcacttgcatcacgccttggatgcttgcgtcctgggtcttatcccttatatcgttccggctcaccgcaacggtttgctgagacgagttctggccatgcgccgtcttccggaagaactgatgcgggaagtcaggcagattgcggacaaacgtcactacatcctgaatgatgatggacgaataatgctaaaggaccttcccaactccgtcaaagaaaatatccgtgaaaaactgatggagcagagggtgatcaaacacattcccgcgaatatgagcggagcctccctgaaggaaaccatgcagagagttatttctattgaaggaaatggggaggatgccatggtatgccttcggaaaagttctttcatggttggcgaagatggcaaaagaactactgtaaaagcaaataaattggtgggaatttttccggaaggttcttccaagctgaagcctttgaaagcggccatcgaaattgatggtaactatggagtggctcttgaccccagtcctgttgttattcgtcatgtcagggtttttaaacaaatcctggctttgaagaaaaagaatggcggcaagccggtacgtattctaaaaaatggaatgcttattagattaacttccccacaggataccaaacgggaagggatatggagaatagcctccattaaagataataaagtggggatagcccttgatctccaaaggccccattatgccggttccggaagcaaaaaacacgaatccaattggattaatataagacttgtcaccttacgcacaaaatatcatctggaaatacatcctacttcttacaccgggaaccctcgataaaactttccatgtcttatcacattctgagtatagatgcttacacatgccgcttgagttgtgagagaggacaactcagatgcgatgatggcatgaatccatcccgcaccatctctctcgaggatgtaggcgccgttgttcttagttctttcaaggctacgcttacaagcactcttctgattgaaatggccagaaacagaataggctttgtactttgcgaaagccatcggccggcggccttgctcctacctgctgacagagcgacggatactgctctgcttcggcatttgacagccatgccggcccaactgcgccggcgtctttgggaaaagaccctggatgccaagtgtggcaaccaagctgttctcgctcaaacatggaatccggatcatcccggaattgcggacttaaaaaagttttcggaatccagaaaatccagccgtgaggcggagtgtgcccgtctgttttggagcgttttttccgacacgtggtcaaactcatccttccgtcgtggcagaaaggaagaaggctttaatattttgttcaactatgcctacgctgtccttctgtcctgtgttcttcaatatctctttgctttgggcctggatccctgctttggaatctttcatcagtctcgggaacatgccgctcctctggcttatgatctcatggagccttttcgtcctgcttttgacgctaatgtggcccgctggatcagccggggtattcaagacggaaaaacagaagagcagataggagaagtaaccggtgaatatagacaacacattgtggctactcttcaggcatctgttctttatcaaaataaacaagtatttctaagaactgccgtggaatctgtttgccgcagcttccgaaaagccgttcttgctcaacagtcgggaccttatgaaccatggaatatgtcaactataaaatgggctggctagttgttttctttgatcttcccaccactactccggaagaacgcaggaactatattcatttccggaatcaacttttggaggacggatacacgatggtgcagtatagcgtatacgcacgtccttgtgttactcacgaaagaatggcgacacattcgcgcagaattcaaaaaatgatacctcctgacggttctgtacggtgcatgtttgtcactaatattcagtgggataaaatgttcgttttccacggaaaatccaaacctcctcaggatatttcaatgccggagcaaatgcttctctggtagaagctcgttttcctgatttctctataagttacttacaataaaaatcaagcatggcacctgttatgccatgcttgattttggattcaaggcaaaacttgcagcgggccaggcaattatccgcgtccgttatgccatgcttgattttggattcaaggcaaaactttcccggtgccgtatcgaccgttcagcacagttatgccatgcttgattttggattcaaggcaaaacaactggcacttgccgataatagcccgttccgttatgccatgcttgattttggattcaaggcaaaacaagggccgtcaagacaaagatgttcaatgagttatgccatgcttgattttggattcaaggcaaaacgccgtcgtcaatcttgcactcaactatagcgttatgccatgcttgattttggattcaaggcaaaacgatagagataaagagaatgctttactttttgttatgccatgcttgattttggattcaaggcaaaactataaagcggtcatcatcaggtcatacaacgttatgccatgcttgattttggattcaaggcaaaacaacagcaattaagagtaatgttagtatgatgttatgccatgcttgattttggattcaaggcaaaacagacgcttatttccttagtgctatcgtttaagttatgccatgcttgattttggattcaaggcaaaactaacaatcaacaacaaacaactataacaagttatgccatgcttgattttggattcaaggcaaaactgaggacgttgctaataatttggaggttgtgttatgccatgcttgattttggattcaaggcaaaacatgtgctacgaactggcaaagacggaacgagttatgccatgcttgattttggattcaaggcaaaactaattcctctcgctcttccctattcccattgttatgccatgcttgattttggattcaaggcaaaactccaagcgcgatgatagcggcggttttcatgttatgccatgcttgattttggattcaaggcaaaacagccgttggagtggtgacctacaacaaccgttatgccatgcttgattttggattcaaggcaaaactggggcatgtgcggctagtacttttcaattgttatgccatgcttgattttggattcaaggcaaaacaaaaacaaggtcatgcaaataatctatttcgttatgccatgcttgattttggattcaaggcaaaacaggataaagcgaaggttgatcgtcttattagttatgccatgcttgattttggattcaaggcaaaacgactcgatgagcgacactattggctcagaggttatgccatgcttgattttggattcaaggcaaaacaagatttccggctaccctgttgtagttgccgttatgccatgcttgattttggattcaaggcaaaacggtgctttaaatgttttcatattatttttctaattttattcttgaaactctaatgactccctcgttcggatacatgtccttttgagatcctaccgtgagggtaaaaccttggggatgccaacgcatggtaatcggattcacggttttatatatccaggttccagctttagtaatcacagtagtttgatactgggctcctggttcttcatacttgtaaagagaagtttctgatggagctaaaagcaacgcccatataaggaatacacccagaactccaataataatgcttattagaaccaatcttgatttagctgtcatcttcttattctccttacttaattactttctgtatcctggataccaacctattccaagcttctattgcagagtctggagtaccaaaaaacgcccgaagctcggttcctgcacccaaatcgctacggcattgaacctgaaaagcctcatatccctcctgtggcttcattcccgactcatttaagttccagactcccggaatcgaaccacaaattggacatggtttcctttttggtcttttatcaatatccatattcttcattgttttttctccttttccaggtaatgtttttcaatagattatgccatgcttaattttggattcaagtgaatcctattgcctcaagatgaggaatgtattatgccagacggttttttgtcagtctttgccggggacggaagattccgcttcctccacggctttgggtttggagacggtatgcggggcattttttaggattttgagcatggctgccagggtgtctatgtcttcatcggacatggaggaaaggtggttcagcttttccttgataccttcaatcacttcctcccgatacggcaattcttcccctgcatgggtatgcaggaagaaggaggtgatggtgctggtgagcgtccccacgaagccgattccggtaatcatcagaaaaaccgcgagaaacttgcccggcgtggtgaccgggtaggtgtctccgtagcccacggtggtggccgtgacgaaggaccaccaaatgccgttggacaggctcatgccctccgccagatggatgcccacggcccccagcaggataatggtcagcgcggcaatgcagatgtacttgaatccgttcgtattgaaaaaacgccgaacgcgcgcggagaaccgcagggagtaggaaaacaggtccaggtacctggcgagccgcaggatctcttccagcctggcgaagcggaacagccggaagagggagtcgaacgggatgatggccagcaggtcccagacgtggcttttcacaaagagccatttggaggggctgaggaaaaagcgagtgacgtagtccaggacgaatatccagtaaatgacccggtccacggtgacttcccattccgcggccccggaggtcaggtcgatggcggccagcgtgacggccaccagggccagcaggcacatgaccgtttcatacgccagtttcaggaacaggaagtgccggggtgtttttgcgtctggagccatggagggaagggtagtaaaaagccgctcccggatggcgggaagcggcttgaagggatgaacctccggctgatttacttcagcagaagctgttccatcagcgtctgggaggactgggcgagcacggcggggtcgtccagcatgccggcgcggagcagggccgtgttcgcgatctggtccgcgaccatctgagccagttccggattctccgtccgcagggcggaaagcttcttgaccaggggattggaggggttcaattcaagctggggatggttttccggaacttcctgccccatggccttcatgtacgctctcatttccggccccatgtcgttgccgctctgcagggccacggcgggaccgctgaccaggcgcttgcccagggtgaccttggagaacttgtccgggtaaagttctttcagccattcctccagggcggtggcttcctcctgcggcagggcgtccttctgttccgtttccagttccgggagttccacgtccgcgcggtcgatcatcgtgacgggcttggcgtccacgctggacagggaatccagtacgaattcgtccccatggtccgtgaagaaggccacttcataaccgcgcgccttgaaggcttccagatacgggctgttttccagatgggcgcgggaggggccggtcagggcgtaaatggccgtctggccttccttcatgcgggtgatgtattcctcgaaggaggtcgtttcccccggatccgtggcggtggattcaaaccggagcagcttgcccagggattccttgttcggccaggaggtcaccacaccttccttcaggtagcgggagaactgggcgtagaattccttgtaggtttccttctcgtccttggcgagcttctccagatgcttgatgaagcgcttggtgatgatgtcgctgatcttgcgcaccagggaattgtcctggagcatttcgcgggagatattcaggggcaggtcttcgctgtccaccacgccgttcaggaagcgcagccagtcgggcagcagcccttccggcttcgcgtcgatcagcacgcgcttgcagtacagggacacgttggggtccacgcggccgaagccgaacatttccggattccgccgcggaatgaagagcagggaatggagcatgatgggcgcgtccgcgctgaaatgcatgtaggagaggggcttctcgtccgtgtgggagatgaactggtaaaactcgtcgtattcctccagcttcacgtcggatttggacttggaccagatggcctgcacggtgttgatgtgttccccgttgaagttgatcgggaaggccacgaagttggaataacggcggagcagttccttcacgcggtaatcctgggagaactccgcgtattcctccttcaggtggatgacgatgcgagtgccgcggtccaggggctcgtccagcgtttcaatggaatagccctcccggccttcggagacccagcggagggaggcggcttccggttcatgggaatgcgtgaacacttccacctgttccgccaccatgaaggagctgtagaaccccacgccgaactggccgatcaggtcggttccgccttcctgcttctgcttcagcgcctccaggaacttcttggtgccggagtgcgcgatggtgccgaggttctccaccaggtccgcttccgtcatgccgatgccggtgtccgcgatggtgatggtcttgttgtccttgtccgtggtgatgctgatttccagcggcttgtccggctggtagatgttggagtccgtcaactgtttcacgcgcagtttttccagggcgtccgaagcgttggagacgagttccctgacgaaaatctcgcggtcgctgtacagggcattgatgacaatgtccagcagctgccggacttccgcctgaaattgatgtgtttctgtattcatatggaaaaatgtgttgcgggcaccattatagaagagccgtcaagagggtggacactttttaacattttgggcgtcatcccatgtcacacaatccggtttttttccggtccggcggtccggcggggaattttccttgaaacaattgcggaaactcaccagtattactttataatcatgatgctttcacagcttttcaaaaaagggtgtcttctgctggccgtctgcggatggctggggggcggcgtgctcccggcccaggaggttcagcaaccccccattacggaagaaggtctgaaggcgctggattccaatgtcttcacgaatgaattcatggtggcgctgaagcccgccgtgaaccgtgaccggattgcgaaaatccgcgaccccttcgtgcgccggatcgcccagcagatggcggacaagaagtacgacagcaagtcccgcaccatgctggcggaaccgtacgaaccggtgaaggacctggcggaccgcctgcgcaccagccagtacagcaaatttgaaaaccccacgggcattttctttgaagaaggagaggacgtgctggtcatcatgggagaccccaaggatgaaaagctttccctggtcatccagaacttcgggcgcggcggaggccgcagttcctacccgctgaaggcgggcgtcaacatttttaaagccaagaacaaggggctgggctacatcgaatacttcacgcccaactacaagaaagccggaaaggtgaaggtctccattccctccggcaaggtgaacggcgtcttcgtgggcggcgtgcacaagaacagcgactggaagaagatgctggaaaactccccgacggaggtcatcgacattgtgggcagccgcgtccacctggtgtacccggtggaggaactcaggcaggtctgcccggacaagggtgaggaactgatcgccctgtatgacaggatcatcggcatggaacagcagatcatggggctgtacaagtacaagatgcttcccaagaacagaatgttcgggcgcgtaatctggcagggattcatgcatgcggacggcacgggcgcggccttccacaacggaacgatgaaggaagtagccaatccggacaagattcccggcagcgcctggggcatcgcccacgaattcggccatgtcaaccaggtgcggcccgccatgaaatgggtctctaccggggaagtgaccaacaacatttattccgcctatgtgaactacatgctgaaccccaccagcatgcgcctggagcacgaacggatcaacgggggcgacggcaacatgatcggcggccgtttcaacgcctatctgaacaacggcatcgtgaaaggggaaaactggctcatccaggccgggccggacaagcgttccggcggcgacaaccgcccgatggtgcatgaccactttgtgaaactggcccccctgtggcagctggagctttacttcaaggtggccggcaaggggaatccggacttttatccggacatcttctacaaggccatcaagatggacaccgcgggcaagaaggatggcgaactccagctggcgttcatgaaaaacgcgtgcgacgtttccaaacaggacctgacggacttcttccggaaaaccgggatgctcaagcccattgaccaggaactggacgactacacctgcgcccgcatgaccattacggaggcggattgcaggaatctggtcgcctacgccaggaagtacaaaaagccggaaagcccggttatctactacatctccgtcaacagcgtggaagcctacaaaaaccgtcttgcggtccgcggttcctacaaccagggcatcacggagcagggcaaccgccgtatcatttcccatgacgtgtggaaaaacgtcgtcgtatttgaaacctacaaggataatgaactggtccgcgcgacgatggtcggcacggactccaaggacaattcctccacaacggtgacgtatccggaaggctctaccaggattgaagctgtctcctgggacggcaagcgcaccctggtgtatggaaagaggcctgccaaataacatcttaagaggttagcgtgttctggcgccgccgttccttctgggacggcggcgctttttcatggagaggcggggcgggatgaaagggaaaacacgccttttcagcgcgttccttccgccggttttcggtggtggaagcttccggcgttacggaagaaaccgggatgcttgggaccgccagcggcaggaatgaatatctgaaagccggccattgtgttaatggagaccatgaattggtgatggagaaggcccgcgcaccatcgaacgggaggggcggagaaaccggagaggacggaaaaatatcttccatttatcagggacggaatcagtcattcatgggatgtacgggtcaaaaaggccgcattgaccgcggcggccatgatgcgggggaaagacgggcatctccctggcaaaggctaacttgccggacgggctgctccgtgtctgcggcgtgccggcaggaaggtgctgggcccgacggtggacgccagagaatgccctggaaagcggatacggcattcaccgctgaatgcggcttataggggaacgccggggaaacggatcggaatggaggcgcgggaaaacggggaggacatccccagggaaagggaggtggagaagaaatacttatttgaaagacttgtgttccgtacaaggccggaaatgggagaaataaactgccgggaagttcgtggggagcccctgcggctggcgctggccattcttgaaaacggcgctgatgcgcttcataggtatcggcattccctgcgtggaatttgaaccggatggccgctggacggacggaaaccgctttttcctccaaaagacggtccacgtatctatttagagggggcctctcaggaaaagaaaatcccgtccctgcttgcggcaaggacgggatgaaaggaggtaaggtgtgaaagggttagtcgttccggcagcagcaggatttttcaccagtcgtacagccgaggcgcgctttcagaatgcgcttgatatccgttcccagcagcgtgaccgcgccggccatgatgacaatatccttgatcaccaggcgtccggctccgctcaggtaggggaagccgtggttcgggcctccaaggtcgggcacccatgtttccggcgtggtgatgaggaaggacagagtgccgaaagtcatgatgatcgccaggcagtctcccgccaggcccaccttcgggaagaaaaggcccagcagcaccagcgtgccgatggaaacgatcagaactcccagcccgtaggaaaacccgtaggtgttgttctccttgtgccaggcaatgttttccggcaccacggcgccttccttgttcatgtgctgcttgtattccggagcctccttgttgtagaaaaagctcatcatcgggctgttggcgacaaagggaacgatgccgtccgcttcatattgaaaggccttgagtccgccgatccacgcgaacacgacaaaaatggccactctgatgaaattgatgcccagtttctgcaattgttcggcataatgaaggcatttttcaggagatgaatgtgaagtaaacatatcccctcgtaataggggaaggtatcaaagtcaagagaattattctaattttaaataatatccgcgaatttccgtaatgctgcacggggaggagaaagggaggcttccgctccccggcagccggcaaaaacggattccctgccgggaaacgcgttttgaacgcaagcggcggggatgctgtataatatgggatggataagacggattcttctgggattatgaaaggcaaaatactgttgctggcggcttttctgattgtctgcttcaacctgcgcaccgggtttgattctcccgatcctctgt

SEQ ID NO: 2556 - DNA, 22007 bp, synthetic construct
  misc_feature 1..22007: note = Synthetic
  source 1..22007: mol_type = other DNA
tactgttgtgctgcagttccgttttttccggttcagggataacgctgtatttgtccgcttcggcggcacatgccatgtgggcgggaaaaatggcgcaggcaaggatgaggggcagtttaaacatcatgaagaactatttcggaaaagattataccatggtaagggatgcgtgataaggaaaaacggtgaaattacttgttgttttcccagcggaaggccggttcattcccctgagtgcgcttcatatcataattgaagcgtttgaggatgaattgacggtggtcggccagcttgcgccggaagttttcccaggagcgcacgctcatcggtgaccagccggcttccgcaatggcgcaggcgcggggataggcgcggtaaagcaggtggtccaggtccggcaggcgttccgcccatacgggggcatgcacgccccggatatggcctgcctctttctccggttttccaaaagcgggatcctgttcataacatttttgcagggtggtggttttcatccatccccagttgcgctgcccctgaatctggggaaaatccaggtaacagtattcgttggaggccataatcaggttcaatcccgcctttttcgtcttttcaatggactggagggcctagtcttgccgccatgcgtaaaccgtttcccccggatggtaaatgccggcgttcccctcataccagaattgcggcgtttgcccgtttttggcaagcagaactgtcgttttcgcaaaaaaggctctcatttgttcttgttcgtccttcatgcctgctttagtccgggctttccggcacagagggcatttttcccagagttccgtgggggcctcatccccgcccagatggacgatgccggacgggaaaatatccttgagttccttgaaaacagcggcataaaatttccagacttccggcttctggggacagaccagttctttgctgtttcccgctgtcgtccgcacgttcatgtccggtttgggaaagcagaaaaattccgggtaggcggcatgaagcgcctggttgtggcccggcacgtctatttcagggatggcctcaatgccgcgcgctgcgcagtacgccaccagctccttcagttcctgtttggtgtatatcccttcgtgggggattccgtcttcgaagctttcctcccgcctggatgcaatgcttttcaatttggggtagccgggcacgggcagcctccagccttggttgtccgtcagatgcagatgcagcctgttgaatttgtagtaggccatgagatccacgaatttttccaggtccttgatggggataaaatgccgcgcgggatccaccatgaggccgcgccacggatagcgcggtttgtccgtgatgatgccgcaggggatgccctccggctgctccgccagctggtcccggagctggcggagggttgccagcccgtaaattctgccctcccttcctccggaagcaaggtgcgccccctgcggggtgactgtgagccggtaggcgtccgttcccagggacggagcctcctggtcggaaagaagctgtaaagttttagctgttttttgcttgagttccgttctggacggctcagggataatgctgtattgggctgttgcctctgccggaggggagaaggagagcagaatgccgccgagaatggataagggacgtgccatatttccaatataaacggggaggaaacaggttctgtcaaagaatcatcttttgcttccagatttttttgccgtctccttgttgcccggcgcggagccggtaatagaaaaaaataaaaggccgcctccggagagatggcctttttattagaagtggtagccctatgaggactcgaaccccaaaatacggaaccagaatccgctgtgttaccgattacactatagggctatgtaacgggcgcttttgcagcgcgggcgcattaaagcggaagaggctgttttttgcaagtttttttttactcaaagatatgttttgattggaaaaaggctgtacaggaaagcggcaggctgttttttccggaattatccggccaggcttttaaagtatgcctgtacgtgcttctctgtgatttgctggcggtgcgcctgttcatgcctgccctgggattgcttccatggggaggacggggcggtgttgatgcgtccgagctgctgggccgtatatttgccatagacgttccagatatgctccagaaaaggaataatgtccgtttcctcctccaaagggggctggcggcggctgggatgttctatggaagagtagggcggctgatccttgtattcatgataaatggaagggagtaccggaccggaaggccaggcttccacccgttcattgatcaggaaaccgccagtccggtgcagatgccaccagtccgccagaatgaccagatggttcagtttgacgggcgtcaggacgagtcccttggcgttcgcctgctgaatgaaccagttgcagagtttttgcgtggtagtggagtttgccatgctgaaatgggttgcctctattataaaaggccgcaggtatttctcaacactaaatccgcttgcagttccagcgctctggcggtcgggataggcaaatggctgtgcgggattcggcaggtccccggcatgctgcttcctgctccgcaggcggaatgcctgaaaatatggcgcaggttgttctagcgggggagggagccggagattcccctctcccgggcagctgatggtgatgtacttccccctccggagatttccgggtcaggccgtgtgcatggcagcggagttgctttcctgggaaaataagactgtcaaagggaaagaaagcgcgccctgcggacaacgtcttccggagaaagggcgtaaaggctgtccagcaatgatacggcaaaggaaccggggaaggggctttgttcaaaggccatttctccggcaatgcccatgagtacggccgtggaaacggccgcctgcaagggggtgggggagacggcggcacaggcggcggacagtgctcccatggaacagcccacgcccgtgacccgggacatcatggcgtgtccgttttccgtggcggttacctggcggccgtccgtggaataatccgtacgccctgtaacgagcacggccgcccctgtgtgcagggccagttccctggccgcatgcagggcgtctgcgctggagctggtgctttccggccctttcgtgacggaggaatagccggccagggccatgatttcagaagcgtttccgcggatgatgcggggggattgttccttcaattgccccgccagccgcgtgcgcagggaaagagcccctacggccacaggatccagcacccaggggatattcagcctattggcttcccgcaccgctgtttgcatggcggctccctgttcgcgcgtcacggtgcccaggttgaccagcagggcgcctgttccgctgcggagcatgtccgccgcttcttccgcgtcgttgagcatggcggggacggcgcctatggccagcaggagattggccgtcaggggctggacgacggaattggtcagggagagaaccagcggggccgtttcccggattttttccagatcggcggcaacggcttgaacaaggtctgtcggtgaaagcatggcgtaaaaaagtgcttgattgtccggtgtttcctgcggttcgtccgtcaggcaagagcccgtgcggcggcttccggattctccgctccgcaaatggcggagacaacggcaattccggaggcggttcccgtggcgcgcacttgccgggcccgttccgcgtccaggccgccgatagcgacaacaggcaggggagattgggaagccagagcggcgaagccttccacgctcagcacgggaggggcgttcagtttggaaatggtgggaaagacggggcccatgcccaggtagtccaccagggatgcatccacggcgcggagctgttccttattggagacggacagtcccaggattttatccgggccgatcatggctctgacggagggaaccggaagatccctctggccgatgtggacgccgtctgcttccagcgccagagccaggtcaatgcggttgttgacgatgaagggaataccgcgggaggccaggaaatcccgtatgggcaaagcttcccggtaacaggttcccgcatccggattggtggagcggtactgcaccatggtaactcctccgtccgccgctttccggacggtttccagaaggctgtagcggcatttggacgcttcatccgtgaccaggtagagatggagattgaattttttcatggcagggaatggaaggaatcagtccgtaaacagaggggtggaaagatagcggtctcccgtgtccggcagcaggacgacgatggtcttgccttcattctccgggcgccgcgccacctgtgtggcggcccagagagcagcgccggaggaaatgcccgtcagcacgccgtccgtgcgcgccagttccttccctgtggagaaagcgtcttcattggtgacggtgatgacttcatcgtacacggaggtatccagcgtttccggcacgaagcccgcgccaatgccctgaatcttgtgggggccggccgtgccctgggtcagcacgggggaggagaacggctccacagcaacgacccggatgcccggattacgggatttaaggtacttgcccacgcctgtgatggtgcctccggtacccacgcccgccacaaaaatatccgctttgccttctgtatcattccagatttccgggcctgtggtgcggaaatgcgcttccgggttggccgggttggcgaactggccgggaataaagctgttgggcagtcccgcggccagttcctccgccttggcgatggctcccttcatgcccagcgcgccgtccgtcagcaccagttccgcgccgtaggctttcaggaggttgcggcgttccacgctcatcgtctccggcatggtcaatataatccggtacccgcgtgaagcggccaccgccgccaggccgatgcccgtgtttccgctggtgggctcaatgatgacggaatccggcttcagcttcccggcggcttccgccgcatcaatcatggcctgggcaatgcggtctttcacgctgccggcggggttcaggtattccagcttggccaggatagtggcgttcaggccattcctgcgttcgtaattggtcagttccagcaacggggtgccgccgatcagttccgtaatgtttttgtaaattctcatggcttgtaggaaaagagcgttgttgccgttaaatcgttagagaatggcgcggaagccttgttccaaatcttccagaatatcgtcgatatgttccgtcccgatggagagccgcacagtggatggcgtaattcctcccgccttcagttcctcctccgtcatctgggaatgggtggtggaggccggatgaatcaccagggacttgacgtccgccacgttcgcgagcagggagaatagttccaggctttcgcagaacttgcgagctttttccgcgccgcccttgatttcaaaggtgaagatggagccgcccccgttcgggtaatatctcttgtaaaggtcgtggttcggatggtccggcagggaggggtggttcactttttccacctggggatgggaggacagatagtccgctacgcgcaaagcgttctgcacatggcgttccacccgcagggagagtgtttccagcccctggagaagcaggaaggaattgaacgggctgatggtggctcccgtgtcccgcagcagggtggcccggattttgacgatataggccagattgccgcatacctccgcgaacacggctccgtggtaattggggttgggcttgctgatgcctgggaacttgtcgttctgcgtccagtcgaatttgccgccgtccacaatcacgccgcccatcaccgtgccgtggccgccgatgaatttggtagcggaatgcaccacgatgtccgctccgtgttccaaggggcggaacaggaagggcgtggcaaacgtgctgtccacaatgagcgggatgccgtgggcgtgcgccacttccgccagcgcttccatatccacaatgtcgcaattcgggttgcccaggctttccacgtacagggccttggtattgttccggatggccctggaaaaattctgaacgtccctcgcgtccacgaaagtggtttctatgccggcatccgccagcgtattggcgaaaagattgtacgttccgccatatacggtggaggaagaaacaatgtggtccccggcccgggcgatgttctggatggcatacgtgactgcggcggccccggtggatacggccagcgcggccgcccctccttccagggaggcgatgcgttgttcaaaaacatctgcggttgggttcatcaggcggttataaatattgcccggctccgccagggcaaaacgggccgccgcctgttccgagtctttgaagacataggaagtggtggcgtaaataggtacggcgcgcgcatcggtggccgggtccggactttcctgacccacgtggatctggcgtgtttcaaatcgatggttcttgctcatgtttttatattcctatcggaaaactaggaaatggataacgaaaagaaaagaccatgtcaagctccgggtaaaaaaaacgggacatgggccggaatgggaaaaggtggagaaatgttcaggcccgcggccgctgcttaaatgccggctccgtagtcgcagccgatttccttctgctgctcggccagatcttccagcgttacgcggcgcaaataattctcaatgacttgctggagcccgcgccagaaaggcagcgtggcgcatcctgccgcccgtgggcacggattttcgtggggagccgtgcaggaaataggcagaagggagccttccgtcagtttcaggatttcttccgtggtgtattcgcgcggatgtctggaaaggcggtatcctcccgcctttccccggaagctctggacaaatcccgctttcaggaggatggcgataatctgttccagataacgtacggtaatgtcctgcctggcggaaatctccttcagggaaacgtagccttcgttgcggtggtgggcgagatcaatcatcaggcgcaatgcgtaacgtcctctggtggaaaccttcatcatatcggttaaataaacgatatttccggatgcccgtcaatagggaatgaaggttccacgcggaatggcgggcttcttccccggttgaaagtttaataattgtaatggcggggaacccgggggcctattccggtaaaaatttcccaggaaatggtgccggccttttcagccagttccgtcacggggatatgcggccccatgatttctgcggtcatgcccggttccgcgtgcggcgcccggctgacgtccacgatgatttgatccatcgtcacgcgcccgagaagggggcaggaaaccccgtccaccatgacgcgggcgcccttatgggccagggaacgcaggtagccgtccgcatagcctatgcccacggtcgccaccctggtgggatggtccgtcacataagtgcccccgtaggaaatgccgtggccttccggcagcgtgcgcaccaccgtcaggcgggaaaaaagagccatggccggccttaattgagaggcccatggggagtcaatgggggaaaacccgtacagcaccagcccggggcggcacatgttgttggagggaatttcataatccagggaggcggcgctgttggccaggtggcaatacttcaagggcagtttctcccggatgcgggcggccatccgttcaaagagggcgatttgcctgagcgtgatttcccggtcctcgtccgcgcagggcaggtgtgctcccaggccttccggatgcaggctgtccagttctcccaggcgggaaagcagttcttcaagctggtccggcaggaatccgccgcggcccattcccgtatccacggaaaggtggatgggcagcgtctttccgtacagccgcgccagggaattgtaatgctctgcctcctccatggtggaaatgaaggagcgccagccgttcagcacgatttcctcccgttcctccgggaacgcggggcccaggatgtaagggcgggtgcggcagcccgcctggctgatgcgccgggcttcccccacattggccaccccgaagaaagcgatgccttccgaatccagcgtgcggcaaacctgttccagcccgtgtccgtaggcgcctgccttcacgacgggcatgtaatattcccctttggccgcctgcttgacgacattcaggttatggcggatggccccgaggtctatttcggcccaggcgcggggagggctggttgctggcatgattggaaaatggcggaaaggttggaaaaagaggggcgccggacgttcccggcgcaggggattgtccgtctttggccgcgcaattccagacggatttttgtcagtcttttgaactttcaaaggataataaaaaccgccttgcgctgaaacgcatggcggtttgataaaaatgcttttgttaccggtgtgactggctggcagtcaggaaaatcggtttgcatttcaaattttgtcttgaatccgttggaaattaaagtgatgttcagatgttttgtcaactgttttttttgaactgaataatttttataaaatacttgataaaatgcaatattggcatataacatgaataaaagcagttttttgtgatgtcgcgttctcttactttttcgttcgatattggttacgcctccattggatgggctgtaattgaatccgcttctcctgatgatgcggatccctctgtttgcggttgcggtgcagttgtgtttccgaaagatgattgtcaggcatttaaaaggcgtgaatacaggcgtttgagacgcaatatccggtctcggcgcgttcgtatcgagcgtatcggcagattgctggttcaggctcaaatcatcacgcaggaaatgaaggaaactcccgggcatcccgctcccttttatttggcgtcagaagcattaaaaggacatagaaatcttgccccgattgaactttggcatgtcctccgctggtatgctcataaccgggggtacgacaataatgtctcatggtctagcggcttttcagaagatggagggaacaaggaagataccgagagagtgcagcatgctaaagatttgatggataaacatgggacggcgactatggcggaaaccatttgccgggaattgaaactggaagagggcaaagcggatgctccgatgaatgtttcaacgccggcttataaaaatctcaataccgcttttccccgcttaaccgtggaaaaggaagtacgacgtatattggagctttccgcgcctctgattccggggctgacttcggaaatcatggagttgattgcgcagcatcatcctctgacaacggaacaacgcggcgtgttgcttcagtacgggataaaattggcccgacgttatcgtgggagtcttttgttcgggcagttaatcccccgttttgataaccgcatcatcagccgttgccctgtctcgtggtctcaggtgtatgaagctgagctaaagaaaggaaattctgagcaaaatgcccgtgaacgggcagaaaaactatccaaggttccgacggcgaattgcccggaattttatgaataccgcatggcccggattttatgtaacatccgtgcggacggagagcctctttctgcagagatacgcagagaattgatgaatcaggcccgacaggaaggaaagttgaccaaagcgtctctggagaaggccatctcttctcgtctgggagaggaaacagagactaatatagccaactattttactttgcatcctgacagtgaagaggctctttacctggatcctgccgtggaagttctgaaaagaagcggcatcagggaaactctttctccatctgtttaccggcttgccgccaatcgtctgcgccgcgggaagtccgttaccccgaattatttgttgaatttgcttaagtcccgtggggaatctggcgaggcgttggaaaagaaaacaggccaatcgaaagaaagccaagaagacagatccggattatgccgccacgccgttaaaacccaggtatgcgacggggcgagcgccgtatgcccgccccgtcttgaaaaaagtggtggaagaaattcttgatggagaagatccgacgcgtcctgcccggggggaagcgcatccggatggggaactgaaagcgcatgacggttgcctgtattgcctccttgatacggattcttccgtgaatcaataccagaaagaacgccgtcttgatacgatgaccaacaaccaccttgtccgtcaccgtatgctgattttggatcgcttgctgaaagatttgattcaggatttcgccggcggccaaaaagacagaatttcccgcatttgcgtggaagtcggtaaggaactgacggcgtttcccggcatggacagcaaaaagattcagacagaactgaatctgcgtcagaaaagccatacggaggccgtcaatagattaaaacgggatttaccggggaaagcgctttctgccaatctgatacgcaagtgccgcatcgccatggacatgaactggacatgtccgtttaccggtgagcggtatggcgctcatgagctggaaagtatggagatggaacatatcgtcccctattctttccggcagtctaacgcgctttcttctctggttctcacgaggaaagaggttaacaagatgaaaggtcagcgtaccgggtacgattttgtggagcaggagcagggtaagccggttacgggacgaacgaacctgcatatttgttcctttaataattatagggaatttgttgagaagttggacgacaagaagtggcatgaagatgaccgcaagcgcaaaaagaagcgcaaggccttactgatggtgaggggattgtcccataggcatcaattacaaaatcacgatgccatgaaggaaataggcatgacggaaggcatgatgacgcagagttcccacctgatgaaactggcatgcaagtctattaaaacctctctgccggatgcgcacatcgacatgattcccggcgctgttactgctgaagtccgcaaggcgtgggatgttttttgggtctttaaggaattatgcccggaagctgccgacccggactccggcaagattcttaaggaaaacctgcgttctctcactcatttgcatcatgccttggatgcctgtgtgctggggcttattccctatatcatacccgctcatcataatggtttgctgagacgtgttcttgccatgcgccgaattccggaaaaactgatacctcaagtcaggcctgttgcgaatcagcgtcattatgtcctgaatgatgatggacgcatgatgttgcgtgatctttccgcctctcttaaagaaaatattcgtgaacaattgatggagcagagggtcattcagcatgtccctgcagacatgggcggcgctttactcaaggaaaccatgcagagagtgctttctgttgatggaagcggggaggatgccatggtttctctttccaaaaagaaagatgggaagaaggaaaaaaatcaggtaaaagcaagcaaattggtcggagtgtttccggaaggcccgtcaaaattgaaggctcttaaggcagccatagaaattgatggcaattatggagtggcgttagatcccaagccggtggtgatcagacatattaaggtgtttaagcgaatcatggccctgaaagaacagaacggcggcaagccggtgcgcattttgaaaaaaggcatgttgattcatttaacctcgtctaaagatcccaagcatgcaggtgtatggagaattgaatccatacaggattcaaaaggtggcgtaaaattagatcttcagagagcgcattgcgctgtacctaaaaataagacgcatgaatgtaattggcgtgaagtagatctcatttctttattaaaaaaataccagatgaaaagataccctacttcttatacgggaactccacgataaggcattttacatgtcataccatattctaagcatagatgcctatacatgccatctgagctgcgacaagggccaactcagatgcgcggatggagagaattctccccggacgattccgctggaggatgtgggggctgttgtgctcagttcttttaaggcgacgctcacgagcaatttgctgatagaactggccaggaagagaataggatttgtgctgtgtgaaagctacaggcctgccgtgctgctcctgccagcggatcggtctacggataccggtctgctaagacatctggcggatatgccggcccgtttgcggaaccgcctttggcaaaagactttggatgccaagtgtgggaatcagacggctctggcccaagcatggaatccgcatcatcccgccattgcggagctgaagagaatggccgtgacggaaaagacggcgagggaagcagagtgcgcccgcctgttctggagcgtatttgcggatacatgggcaaactccgattttcgcaggggacgtcatgaggaggggtttaataacctcttcaactatgcgtacgctgttctgttgtcttgcgtattgcaatatctctttgcgctggggctggatccctgcttcggcatttttcatcaatcccgggaacatgcggcgcctttggcttatgatctgatggaacccttcaggcctgcctttgacgccaatgtggcccgttggattcatttgtgcctgcaggaaggaaaaacagaagagagagcaggagaaatcacccgtgagttcaggtgacatattacagctaccttgcaggcttctgttatgcaccagaacaaacagatgccgttgaaagcggcggtagaggccgtttgccgcagtttccgcaaagcagttcttgccgggcaatccggaccgtatgaaccatgggttatgacaactataaaatgggatggctagttgtgttctttgatcttcccacaaccacgccggaagataaaaaaactatcagtatttccgtaaggctcttttggaagacggctatacgatgattcagtatagcgtctatgcccgtgcgtgcgttactcaggaaagaatggctacccactcccgcagaatccagaaaatgataccgcctgacggctctgtccggtgtcttttcgtcacgaatatccagtgggataagatgtttgtttttcatggcaggtcttgtccccggcaggatgtttccatgcctcagcaaatgctcttttggtaaaaatatcggacgctgtatttttttataagtcgctgaacataaaaataaggcacagtatctattgtactgtgccttattttggattcaaggcaaaactagacctctacacctcacacggatatgttcattgtactgtgccttattttggattcaaggcaaaacgccggtgtatgtggttgtgggcaacttaatattgtactgtgccttattttggattcaaggcaaaacatggtaaggtagataaaggaccacacccacagaacgatgaggacgagaatgagtgagaagatgagagaggcaaggattggcatgccattgaccagaaggcccataaatagggagaggtaatagatgccaatgtaggggaatatctctgctagttctttcataatttaatatctcatccagtggtagcaaagtgcaggaattacgaagacggcacctacataggtgacaatcgcaaagaataaagaatccttcttcggaatggagaccaccgttacaccaaagagaatctgaatcacgtgcatgccgagcacagctaagaagcacatcgtcattgtacattcaggatgaagctcgaaaagcttcaaagtcaatacaggagggatgattgagaaatacggaagagcctccaacgtggcatcaaggttttccttaaatctttcagaataggtcatggctccctccttcttagtattcggcttcttcggcttcttgcaggtcgataatccagtcaagactgtcattgtactgtgccttattttggattcaaggcaaaaccgagccgctcatctggcacaattgcgagccattgtactgtgccttattttggattcaaggcaaaacccatgcaatatcgtgcatttgccgggtagtattgtactgtgccttattttggattcaaggcaaaacaaatgcgcctccggtctgatggagcaggggattgctccgcctttggccgcgcaattccagacggatttttgtcagtctttctttaacggagcgggaggaatgaaactgtgcgtccagaacatggcgccggttgcggaggtgattccgtccatgttaagatagcgggccaaaagcagggagggggaggagtgccccatctccttctgaagaaggttttgattgcagaaatgggccaggtggtaggaggcgtaggtatgcctcagcacgtcctgcacccatccgctttttttcaggatgccggaccggcgccttacttccctccatttcttttcccagttgggcgggcaaacgggacgggagggggaaccggcggaagacgtccggctgaggatggcgcccagcacgggaaggatggaaacatggcggctcccgcctgttttggtatggctgggcgccagtgaaaccaggccggatttcaggttgatgtgcttccaggtcagccttttgacttcgtgggggcgtatgcccgcgtacagcatcagggcgcaggccggcaggcatgccccgtggaacaactgttccgcggtgtggagaagccgttttgcctcgtacagggaaagggccctgatgcgtttttccctgaggatggggggaggaaccagaaaggccgcgtttctgcggcaccacccgcgcttcagggaaaaattcaggatgccgctcaggatcagccgccccttgtgccgctggcggggagtggaaaagcttttgcggagataacgcccgcaatcttccggcgtgatggaacggacttgttttcttgccagttccgggcattttttcatcatccgggcagccatatagcggatttcctgcagggtgcggggccggcggtgttttcttgcttccaggctggcgcggacagcctgggaaaacggcacgcttgtttccctgtcggcaagggcctctcctcccagccgtatgcatcgtttggcccgggttattctgtcgcctcttccgcggctggtgtccaggaggtcctttagaagaaggaaagcgtccatgggaggaatgcccagggaacggatgaggaggattcctgtctgatccgtgtcggtggggaaagaggaagtcggtatgttcatgaagaacgttgtagcagaggattcccaatccgtacacaagtctaaaatgtgatgataacagctataaagatcaaacaggaacggaaaaggaaatgaaagatgataaacaatgattcataaaaatatgttagatttttttctacattattcgatataaatgtacggattgggaatccgttagaacaggcaaaaaatgaatgtttctatttccttattaatcatatttggaacagtctttctggtgggagaacatgttttggctcgaactttggaaacgggaagagcgggtggctattacactcattccgggaaaggggacagaagcgccagagccaggtttgaacggttcaaaagcagaaaaacgcctacaactagaaccagcataaccccgatttccgtttcagaccaatatgggaacagatatcgtggggatttaattaccagcacttatgacccttcagccaaagccagggcgggagctgccgcctgggataaacgtcaaagcgccaaagccaagacaatcatcaaccaggcggaacatgaagcccagtcaaaaattgccagggaagaagaagctcaggtctttcgcgcatctctgtcacgccttcaggaagccgtaaaacagggaaaggtggacaaggttcttgcagacaagatggtaaaggttttgtccctgcgcgtcaaacagggaataatgaatagaagggaggccgctggcgctattgattatttgattctcaataataaaattaatattaaataacggaatcatcaggataaatgggtgaaagctggtataaatattgattgttaatgagtatgcttcatgcaatattaagtattttggttggagcgctgggagggttgagcgccagggtgattttttcttttgcggcttccgtcgtcctgctgcccctgtctttattctcttcaagaagggaaactcaagtttctacagtacaagccgctttggctttgtgcttactggttattgctgtttccctgtatgattttgcagtaataaaaagctggaaaggaatagtggaacatttgacgtggggagactatataggaattgttgttttctgtgtatcttctgcctgtattcctgacagccgtgcagcggacatggcaggagactgcaagtataacagtatgatattaaatgcgggcgtttatttttccttatttattcctgtaggttttttattgatggactgttctgaaaatatgtggtcttacttatctttcatcatcgtctttctgctgttctcgtttttcctgatagattttcattgttctaaaaaaagcatgaaacaaatatttgcggatggaaataattatccggaaatagagatagagaaaaaacggtgggcaggaagaaaatggcggatgattgcaatcatcatttccgtatgttttttaacggcttttagtgttgtacagctatttaatggaaaaaaatacgcccatgagaacgagacagtagaactggatcatacccgcctgatggatttgggggagcagtatttgaataaaggagatgtggagagagctgtctcatgtttcaaaaaatcggcggagtttggaaacgcgaaagcccaaaggatgctgggcgattgttattatgttggagaaggaatcagggaggacaaacaggaggcggtgaagtggttccgcctggccgccgaacagggggacgcggcagcccagaggatgttgggagcctgttattatgttggagaaggaatcagggaagacaagcgggaggcggtgaagtggtaccgcctggccgccgaacagggggacgcggaagcccagaggatgctgggagtctgttattatgttggagaaggaatcagggaggacaagagggaggcggtgaagtggttccgcctggccgccgaacaggaggacgcggcagcccagtggatgctgggagactgttattattttggaacaggaatcagggaggacaaacaggaggcggtgaagtggttccgcttggccgccgaacaggaggacgcggaagcccagtggatgctgggcgattgttattttttcggacacggagttgggaagaataaaagagaagccgtaaactggtattttttgtcagccaaaaaaggaaatgcagaagctcaaagaagattgggcgcgtgtttttattttgggcatggagttgctaaaaacaggcaggaagcgatacgctggtatcgtctggctgcggaacagggaaattccgttgccatctccatgctgaagaagctgggagtaatgtaaagggaagagcgaagagcatagtaactgtatttataaaaagatgaaagttatggaacagtcggaagaaaggctatcccgtattaatgcatataataaacttgtagatgccgcaatattgacaaaaacaagttctaagtcagttgcagacatcgtgaaccatgagttgggaatagagtgtaatgcagctaacgtccaggagattttgaagtcttccgtatctgcttccgatatgcataaaatccgcagagagatagagggaaatgcttctataaaaatggagaatgcgaatggaacttcatttttaagaaaatatgtcagtttttccggtcgtatttccagatctgaatattgggcgctgaagttgctgatattgccaattatggttattattcttcttaatggagttgcaatggtgtgggataaaacagggaatgattcaggaatattagttttgtttgtaattatttttatttcttatatatatttcaatattgttgcagatgtcaggaggcttcatgacataggagagagcggatggttggtgcttttagaactagttcctttggccaacattgtcattgcggcatttctttttttaaaggtagccaatcagctggtaatcaacataaagacttaaaatcttctcactgaaaaacggttgagtatttggtatttgccctgggacggacagggcattttttgatgtaataccaaacggattttgtcagtttttttcggaatggatagcaggcgtttcctcttttcccgctgaaggtgctggggaggcgtcccgaagggttttcagcagggccgccatagtgtctatgtcctcatccgtcatggaggaaaggtcgtccagtttctttttgatggcttcaatttcctcttcccggtacggcagcgcttctccgccgtggggactcagaaagaaggacgtgatggtgctggtgagcgttcccacgaatccgatgcccgtgagcatcaggaatacagccagaaatttgcctgaagtggtgaccggataggtatccccgtagcctacggtggtagccgtgacgaaggaccaccagatgccgttgggcaggctcatgccctccgccagatggatgcctacggcccccagcaggatgatgaccagggcggcgatgcagatatacttgaatccgttcgtgttgaagaaacgccggatgcgcgtggtgaacctcatggcataggaaaacaggtccagatacctggcgagccttaaaatttcccccagcgaggcgaacctgaacaggcggaacagggcgtcaaagggaataatggccaacaaatcccaggggtgttccttaacgaagagccatttggaccggctgatggagaagcggaccacataatccagcacaaaaatccagtagatgacgcggtccgccgtgacttcccattccgccgcttccgtggtcaggtcaatggcggtcagcgttacggcgaccagggccagcaggcacatgcccgcttgataggccagcctcaggaacagaacgtggcggggcatgcggcgtaatgcgttcatggcgggaggagaaatgaaaaagccgcccccggcggggtgggcagggagcggcttggggaaagaggctgtttcctccggaccccttacttcagcaggagctgttccatcagggcctgggaggactgggccagcacggcgggatcgtccagcatgccggcgcggagcagggcggtattcgcgatctggtccgccaccatttgcgccagttccgggttttccgtccgcagggcggaaagctttttcaccagcgggttggaggggttcagttccagctgcggatggctttccggcacttcctgccccatggctttcatgtacgccctcatttccggccccatgtcattgccgctttgcagggctacggcggctccgctgaccaggcgcttgcccagggtgactttggagaatttgtccgggtacagccctttcagccattcttccagggccgcggcttcctcctggggcagggcgtccttctgttcctcttccagggcggggagttccacgtcggcgcggtcgatcatcgtgacgggcttgccgtccacgctggacagggagtccagcacgaattcgtccccgtggtccgtgaagaaggccacttcatagccgcgggccttgaaggcttccaggtacgggctgttttccagatgggaacgggaggggccggtaagcgcgtaaatggccgtctgcccttccttcatgcgggtgacgtagtcttcaaatgaggtcgtttcccccggttccgtggccgtggattcaaaacggagcagcttgcccagggattccttattcggccaggaggtgacgacgccttctttcagatagcgggagaattgcgcgtagaattccctgtaggtttcctgatcgtccttcgccagtttttccagatgcttgatgaagcgtttggtgatgatgtcgctgattttgcgcaccagggagttgtcctgaagcatttcgcgggaaatgttcaggggcaggtcctcgctgtccaccacgccgttcaggaagcggagccattccggcagcaggccttccggcttggcgtcaatcagcacgcgcttgcagtacagggccacgttggcgtccacgcggccgaatccgaacatttccggattgcgcctggggatgaaaagcagggcattcagggcaataggggcgtccgcgctgaagtgcatgtaggacaggggtttttcatccgtgtgggcaatgaactggtaaaattcatcatattcctccggtttcacgtcggatttggacttggaccagatggcctgaacggtgttgacgcgctctccgttgaagttgagagggaaccccacgaagttggagtagcggcgcaggagctccttcacgcggtattcctgggagaactcttcatattcgtctttcaggcggatgacgatgcgggtgccccggtccagcggttccgccagcgtctcgatgctgtagccttcccgtccgtcagaagaccagcgcagggaggcggcttccggttcataggaatgggtgaacacttccacccggtccgccaccataaacgagctgtagaagcccacgccgaactggccgatcaggtccgctccgccttcctgcttctgcttgagggcctccatgaattttttggtgccggagtgggcgatggttcccaggttttccaccaggtccgcttccgtcatcccgatgccggtgtccgcaatggtgatggtcttgttttccttatccgtggtgacggtgatttccaggggcttgtccggctggtaaatattagaatccgtcagctgcttcagacgcagtttttccagggcgtcggaagcgttggaaacaagctcgcggacaaagatttcacggtcgctgtaaagggcgttgatgacaatgtccagcagctgccggacttccgcctgaaattgatgtgtttctgtattcatatggaaaaatgttttgcgagcgtcattatacggcccccgtcaagggggatggacagtttttctccctgggcccgggcgtcccatgtcacacaaaaaggctttttcacaggcatgggggccgggcgtttttccttgaaacaattccggaaaccgaacagtattatttaacaaatgattttctcaccattgttgaaaaaggggattcttttactggccttctgcggcgtgctgggcggaggcgtgctttccgcccaggaaacagggggctcgccgattacggaggagggtttgaaggcattggattccaatgtgttcgccaatgaatacatgcttgcattgaagcccaatgtcacgcgcgaccgcatcgccaaaattaaggatccctttgtgcgtgggctcgccgagcagatggcggagaagaaatttgaccgcaaggcccgcgccctgacggcggagccgtatgaaccggtcaaggatctggcggaacgcctgcgcaccagccagtacagcaaatttgaaaatcccaccggcatcttttttgaagagggggaggacgtattgctggtcatgggggatcccaaaggtgaaaaactgaatctggttatccacaatttcgggcgggacggaggacacagctcctatccgctgaaagagggggtcaacatcatcagggcgaagaacaaggggcttggctatattgagtatttcacatccaattacaagaaggcacccaaggtgcatttgtccattctgtccggcaaggtgaatggagttttcgtgggaggcgtcagcaaaaacagcgactggaagaggatgctggaaaactcccccacggaagttgtggacatcgtgggcaaccgcgtgcatctggtgtatccggtggaggaacttaaacaattctgcccggacaagggggaggaacttattgccctgtacgac

SEQ ID NO: 2557 - DNA, 16068 bp, synthetic construct
  source 1..16068: mol_type = other DNA
  misc_feature 1..16068: note = Synthetic
cgagcgctgcgcagtacgccaccagctccttcagttcctgtttggtgtacatcccctcgtgggggattccgtctccgaagctttccgcccgcctggaggcgacgcttttcaatttggggtaaccgggcacgggcagcctccagccctggttgtccgtcagatgcaggtgcagcttgttgaatttgtagtaggccatgaggtccacgaatttttccaggtccttgacggggatgaaatgccgcgcggggtccaccatgaggccgcgccaggggtagcgcggctcgtccgtaatgacgccgcaggggatgccctccggctgctccgccaactggtcccgaagctggcggagggttgccagcccgtaaattctgccctcctttcctccggaagcgaggtgcgctccctgcggggtgaccgtgagccggtaggcgtccgttctcagggacggagcttcccggtcggaaagaagctgtaaagttgttgctgtttcttgcttgagttccgttctggacggctcagggataatgctgtattgggctgccgcttctgccggaggggagaaggagagcagaatgccgccgagaaggaataaaagacgtgccatatttccaatataaacggggaggaaacaggttctgtcaaagaatcatcttttgcttccagattttttaccgtctccttgttgtccgggtttgggggaaggggcggacctgggaaataaaaagaaaataaaagagccgtctctggagagacggctcttttattagaagtggtagccctatgaggactcgaaccccaaaatacggaaccagaatccgctgtgttaccgattacactatagggctatgtaacgggcgcttttgcagcgcgggcgcattaaagcggaagaggctgttttttgcaagtttttttttactcaaagatatgttttgattggaaaaaggctgtacaggaaagcggcaggctgttttttccggaattatccggccaggcttttaaagtacgcctgtacgtgctcctctgtgatttgctggcggtgcgcctgttcatgcctgccctgggattgcttccatggagaggacggggcggtgttgatgcgtccgagctgctgggccgtatatttgccatagacgttccagatatgctccagaaaaggaataatgtccgtttcctcctccaaagggggctggcggcggctgggatgttctatggaagagtagggcggctgatccttgtattcatgataaatggaagggagtaccggaccggaaggccaggcttccacccgttcattgatcaggaaaccgccagtccggtgcagatgccaccagtccgccagaatgaccagatggttcagtttgacgggcgtcaggacgagtcccttggcgttcgcctgctgaatgaaccagttgcagagtttttgcgtggtagtggagtttgccatgctgaaatgggttgcctccattataaaaggccgcaggtatttctcaacactaaatccgcttgcagttccagcgctctggcggtcgggataggcaaatggctgtgcgggattcggcaggtccccggcatgctgcttcctgctccgcaggcggaatgcctgaaaatatggcgcaggttgttctagcgggggagggagccggagattcccctctcccgggcagctgatggtgatgtacttccccctccggagatttccgggtcaggccgtgtgcatggcagcggagttgctttcctgggaaaataagactgtcaaagggaaagaaagcgcgccctgcggacaacgtcttccggagaaagggcgtaaaggctgtccagcaatgatacggcaaaggaaccggggaaggggctttgttcaaaggccatttctccggcaatgcccatgagtacggccgtggaaacggccgcctgcaagggggtgggggagacggcggcacaggcggcggacagtgctcccatggaacagcccacgcccgtgacccgggacatcatggcgtgtccgttttccgtggcggttacctggcggccgtccgtggaataatccgtacgccctgtaacgagcacggccgcccctgtgtgcagggccagttccctggccgcatgcagggcgtctgcgctggagctggtgctttccggccctttcgtgacggaggaatagccggccagggccatgatttcagaagcgtttccgcggatgatgcggggggattgttccttcaattgccccgccagccgcgtgcgcagggaaagagcccctacggccacaggatccagcacccaggggatattcagcctattggcttcccgcaccgctgtttgcatggcggctccctgttcgcgcgtcacggtgcccaggttgaccagcagggcgcctgttccgctgcggagcatgtccgccgcttcttccgcgtcgttgagcatggcggggacggcgcctatggccagcaggagattggccgtcaggggctggacgacggaattggtcagggagagaaccagcggggccgtttcccggattttttccagatcggcggcaacggcttgaacaaggtctgtcggtgaaagcatggcgtaaaaaagtgcttgattgtccggtgtttcctgcggttcgtccgtcaggcaagagcccgtgcggcggcttccggattctccgctccgcaaatggcggagacaacggcaattccggaggcggttcccgtggcgcgcacttgccgggcccgttccgcgtccaggccgccgatggcgacaacaggcaggggagattgggaagccagagcggcgaagccttccacgctcagcacgggaggggcgttcagcttggaaatggtgggaaagacggggcccatgcccaggtagtccaccagggatgcatccacggcgcggagctgttccttattggagacggacagtcccaggattttatccgggccgatcatggctctgacggagggaaccggaagatccctctggccgatgtggacgccgtctgcttccagcgccagagccaggtcaatgcggttgttgacgatgaagggaataccgcgggaggccaggaaatcccgtatgggcaaagcttcccggtaacaggttcccgcatccggattggtggagcggtactgcaccatggtaactcctccgtccgccgctttccggacggtttccagaaggctgtagcggcatttggacgcttcatccgtgaccaggtagagatggagattgaattttttcatggcagggaatggaaggaatcagtccgtaaacagaggggtggaaagatagcggtctcccgtgtccggcagcaggacgacgatggtcttgccttcattctccgggcgccgcgccacctgtgtggcggcccagagagcagcgccggaggaaatgcccgccagcacgccgtccgtgcgcgccagttccttccctgtggagaaagcgtcttcattggtgacggtgatgacttcatcgtacacggaggtatccagcgtttccggcacgaagcccgcgccaatgccctgaatcttgtgggggccggccgtgccctgggtaagcacgggggaggagaacggctccacagcaacgacccggatgcccggattacgggatttaaggtacttgcccacgcctgtgatggtgcctccggtacccacgcccgccacaaaaatatccgctttgccttctgtatcattccagatttccgggcctgtggtgcggaaatgagcttccgggttggccgggttggcgaactggccgggaataaagctgttgggcagtcccgcggccagttcctccgccttggcgatggcttccttcatgcccagcgcgccgtccgtcagcaccagttccgcgccgtaggctttcaggaggttgcggcgttccacgctcatcgtctccggcatggtcaatataatccggtacccgcgtgaagcggccaccgccgccaggccgatgcccgtgtttccgctggtgggctcaatgatgacggaatccggcttcagcttcccggcggcttccgccgcatcaatcatggcctgggcaatgcggtctttcacgctgccggcggggttcaggtattccagcttggccaggatggtggcgttcaggccattcctgcgttcgtaattggtcagttccagcaacggggtgccgccgatcagttccgtaatgtttttgtaaattctcatggcttgtaggaaaagagcgttgctgccgtcaaatcgttagagaatggcgcggaagccttgttccagatcttccagaatgtcgtcgatatgttccgtcccgatggagagccgcacagtggatggcgtaattcctcccgccttcagttcctcctccgtcatctgggaatgggtggtggaggccggatgaatcaccagggacttgacgtccgccacgttcgcgagcagggagaatagttccaggctttcgcagaacttgcgagctttttccgcgccgcccttgatttcaaaggtgaagatggagccgcccccgttcgggtaatatctcttgtaaaggtcgtggttcggatggtccggcagggaggggtggttcactttttccacctggggatgggaggacagatagtccgctacgcgcaaagcgttctgcacatggcgttccacccgcagggagagtgtttccagcccctggagaagcaggaaggaattgaacgggctgatggtggctcccgtgtcccgcagcagggtggcccggattttgacgatataggccagattgccgcatacctccgcgaacacggctccgtggtaattggggttgggcttgctgatgcctgggaacttgtcgttctgcgtccagtcgaatttgccgccgtccacaatcacgccgcccatcaccgtgccgtggccgccgatgaatttggtagcggaatgcaccacgatgtccgctccgtgttccaaggggcggaacaggaagggcgtggcaaacgtgctgtccacaatgagcgggatgccgtgggcgtgcgccacttccgccagcgcttccatatccacaatgtcgcaattcgggttgcccaggctttccacgtacagggccttggtattgttccggatggccctggaaaaattctgaacgtccctcgcgtccacgaaagtggtttctatgccggcatccgccagcgtattggcgaaaagattgtacgttccgccatatacggtggaggaagaaacaatgtgatccccggcccgggcgatgttctggatggcatacgtgactgcggcggctccggtggatacggccagcgcggccgcccctccttccagggaggcgatgcgttgttcaaaaacatctgcggtagggttcatcaggcggttataaatattgcccggctccgccagggcaaaacgggccgccgcctgttccgagtttttgaagacataggaagtggtggcgtaaataggtacggcgcgcgcgtcggtggacggatccggactttcctgacccacgtggatctggcgtgtttcaaatcgatggttcttgctcatgtttttatattcctatcggaaaactaggaaatggataacgaaaagaaaagcccatgtcaagctccgggtaaaaaaaacgggacatgggccggaatgggaaaaggtggagaaatgttcaggcccgcggccgctgcttaaatgccggctccgtagtcgcagccgatttccttctgctgctcggccagatcttccagcgttacgcggcgcaaataattctcaatgacttgctggagcccgcgccagaaaggcagcgtggcgcatcctgccgcccgcgggcacggattttcgtggggagccgtgcaggaaataggcagaagggagccttccgtcagtttcaggatttcttccgtggtgtattcgcgcggatgtctggaaaggcggtatcctcccgcctttccccggaagctctggacaaatcccgctttcaggaggatggcgataatctgttccagataacgtacggtaatgtcctgcctggcggaaatctccttcagggaaacgtagccttcgttgcggtggtgggcgagatcaatcatcaggcgcaatgcgtaacgtcctctggtggaaaccttcatcatatcggttaaataaacgatatttccggatgcccgtcaatagggaatgaaggttccacgcggaatggcgggcttcttccccggttgaaagtctaataattgtaatggcggggaacccgggggcctattccggtaaaaatttcccaggaaatggtgccggccttttcagccagttccgtcacgggaatattcggccccatgatttctgcggtcatgcccggttccgcgtgaggcgcccggctgacgtccacgatgatctgatccatcgtcacgcgcccgagaagggggcaggaaaccccgtccaccatgacgcgggcgcccttatgggccagggaacgcaggtagccgtccgcgtagcctatgcccacggtcgccaccctggtgggatggtccgtcacataggtgcccccgtaggaaatgccgtggccttccggcagcgtgcgcaccaccgtcaggcgggaaaaaagagccatggccggccttaattgagaggcccatggggagtcaatgggggaaaacccgtacagcaccagcccggggcggcacatgttgttggaggggatttcataatccagggaggcggcgctgttggccaggtggcaatacttcaagggcagtttctcccggatgcgggcggccatccgttcaaagagggcgatttgcctgagcgtgatttcccggtcctcgtccgcgcagggcaggtgtgctcccaggccttccggatgcaggctgtccagttctcccaggcgggaaagcagttcttcaagctggtccggcaggaatcctccgcggcccattcccgtatccacggaaaggtggatgggcagcgtctttccgtacagccgcgccagggaattgtaatgctctgcttcctccatggtggaaatgaaggagcgccagccgttcagcacgatttcctcccgttcctccgggaacgcggggcccaggatgtaagggcgggtgcggcagcccgcctggctgatgcgccgggcttcccccacattggccaccccgaagaaagcgatgccttccgaatccagcgtgcggcaaacctgttccagcccgtggccgtaggcgcctgccttcacgacgggcatgtaatattcccctttggccgcctgcttgacgacattcaggttatggcggatggccccgaggtctatttcggcccaggcgcggggagggctggttgctggcatggttggaaaatggcggaaaggttggaaaaagaggggcgccggacgttcccggcgcagggaattgtccgtctttggccgcgcaattccagacggatttttgtcagtctttcgaactttcagaaggtgtaaaaactgccatgtgctgaaacacatggcagtttgataaaaatgcttttgttaccggtgtgactggctggcagtcaggaaaatcggtttgcatttcaaattttgtcttgaatccgttgggaattaaagtgatgttcagatgttttgtcaactgtttttttctgaatggaataatttttaaaatacttgatggaatgcaatattggcatataatatgaattaaagcagtttttttgtgatgtcgcgttctctcactttttcgtttgatattggttatgcatccattggatgggctgtcattgcttccgcatcccatgatgatgcggatccctcggtttgcggttgcggtacggttctgtttccgaaagatgattgtcaggcatttaaaaggcgtgaatacagacgtttgagacgcaatatccgctcccggcgcgttcgcatcgatcgtatcggcagattgctggttcaggcgcaaatcatcacgccggaaatgaaagaaacttccgggcaccccgctcccttttatttggcgtcagaagcgttaaaagggcatcgaactctcgccccgattgagctttggcatgttctccgctggtatgctcataaccgggggtacgacaataatgtctcatggtctaacagcctttcagaagatggcgggaacggtgaggataccgagagagtgaagcatgctcaagatttgatggataaacatgggacggcgaccatggcggaaaccatttgccgggagttgaaactggaagaaggcaaagcggatgctccgatggaggtttcaacgccggcttataaaaatctcaataccgcctttcctcgcttaatcgtggaaaaggaggtacggcgcatattggagctttccgcgcctctgattcctgggctgactgcggagatcatagagttgattgcgcagcatcatcccctgacaacggaacagcgcggcgtgttgcttcagtacgggataaaattggctcggcgttatcgtggaagtcttttgttcgggcagttaatcccccgttttgataaccgcatcatcagccgctgccctgtcacgtgggcgcaggtgtatgaagctgagttgaagaaaggcaattctgagcaaagcgcccgtgaacgggcagaaaaactatccaaggtgcccacggcgaattgcccggaattttatgaataccgcatggcccggattttatgcaatatccgcgcagacggagaacctctttctgcagagatacgcagagaattgatgaatcaggcccgacaggaaggcaagttgaccaaagcctctctggagaaggctatttcttcccgtctgggaaaggagacagagactaatgtaagcaactattttactttgcatcctgacagtgaagaggctctttacctgaaccctgccgtggaagttctgcaaagaagcggcatcgggcaaattctttcgccgtctgtgtatcgaattgccgccaatcgcctgcgtcgcgggaagtccgttactccaaactatttgttgaatttgcttaagtcccgtggggaatctggcgaggcgttggaaaagaaaacaggccaatcgaaagaaagccaagaagacagatccggattatgccgccacgccgttaaaacccaggtatgcgacggggcgagcgccgtatgcccgccccgtcttgaaaaaagtggtggaagaaattcttgatggagaagatccgacgcgtcctgcccggggggaagcgcatccggatggggaactgaaagcgcatgacggttgcctgtattgcctccttgatacggattcttccgtgaatcagcaccagaaagagcgccgtcttgatacgatgaccaacaaccaccttgtgcgtcaccgtatgttgattctggatcgcttgctgaaggatttgattcaagatttcgccggcgggcaaaaagacagaatctcccgcgtttgcgtggaagttggcaaggagctgacaacgttttccgccatggacagcaaaaagattcagagagaactaactctgcgccagaaaagccatacggatgccgtcaatagattaaaacgggagttgccggggaaagcgctttctgccaacctgatacgcaagtgccgcattgccatggacatgaattggacatgcccgttcaccggcgcaacgtatggcacgcatgagctggaaaatctggagctggaacatatcgtgccccattctttccggcagtctaacgcgctttcttctctggttcttacctggccgggagtcaacaggatgaaaggtcagcgcaccgggtacgactttgtggagcaggagcaggagaatcctgtgccggataaacccaacctgcatattcgttccctgaataagtacagggaattggttgaaaagttggatgacaagaaggggcatgaagatgaccgcaggcgcaaaaagaagcgcaaagccttactgatggtgaggggattgtctcataaacatcaatcacaaaatcacgaggccatgaaggaaataggcatgacggaaggcatgatgacgcagagttcccacctaatgaaactggcatgcaagtctattaaaacctctctgccggatgcgcacatcgacatgattcccggcgctgttactgctgaagttcgcaaggcgtgggatgtttttggggtcttcaaggaattgtgcccggaggctgcagacccggtcaacggcaggattattaaggaagatctgcgttctctcacgcatctgcatcatgccctggatgcctgtgtgctggggcttatctcagaaattattcctgcggacagaaaaaacgtgttgagacgcgccattatcaagcgccgtctggatcaaaagatgaaacaggacttcctggaactcaggaagaaacgttattataagttgcgtgagaaggctggccagacgggagcatcattggtggatttgcctagtgggatcaaagaaaatatccgcgagaaattgatggagcagagggtcattcagcatgtccctgcagacatgggcggcgctttactcaaggaaaccatacagagagtgctttctgttgatggaagcggggaggatgccatggtttctctttccaaaaagaaagatgggaagaaggaaaaaaatcaggtaaaagcaagcaaattggtcggagtgtttccggaaggcccgtcaaaattgaaggctcttaaggcggccatagaaattgatggcaattatggagtggcgttagatcccaagccggtggtgatcagacatattaaggtgtttaagcgaatcatggccctgaaagaacagaacggcggcaagccggtgcgtatcttgaaaaaaggcatgttgattcatttaacctcctccaaagatcccaagcgtacaggcgtatggagaattgcatccataaaagataatgagagaggcatagctattgatcttcaaatacctcattccgcagttcccggggccaaaactcatgaatttaattggattaatgtaaaacttgatacactattaacaaagtatcgattggagatataccccacttcttatacgggaactccacgataaggcgttttacatgtcataccatattctgagcatagatgcctgcacatgccatctgagctgcgacaagggtcagctcagatgcgtggatggagagaatcctccccggacgattccgctggaggatgtgggggctgttgtgctcagttcttttaaggcgacgctcacgagcaatttgctgatagaactggccaggaagagaatagggttcgtgctgtgtgaaagctacaggcctgccgtgctgcttctgccggcggatcgggctacggataccgctctgttaagacatctggcggatatgccggcccgtttgcggaaccgcctctggcaaaagactctggatgccaagtgtgggaatcagacggcgctggcgcaggtatggaatccgcatcatcccgccattgcggagctgaagagaatggccgtgacggaaaagacggcgagggaagcagagtgcgcccgcctgttctggagcgtatttgcggatacatgggcaaactccgattttcgcagaggacgtcatgaggaggggtttaataacctcttcaactatgcgtacgctgttctgttgtcttgcgtattgcaatatctctttgcgctggggctggatccctgcttcggcatttttcatcaatcccgggaacatgcggcgcctttggcttatgatctgatggaacccttcaggcctgcctttgacgccaatgtggcccgttggattcatttgtgcctgcaggaaggaaaaacagaagagagagcaggagaaatcacccgtgagttcaggcgacatattacagctaccttgcaggcttctgttatgcaccagaacaaacagatgccgttgaaagcggcggtagaggccgtttgccgcagtttccgcaaagcagttcttgccgggcaatccggaccgtatgaaccatggcatatgacaactataaaatgggctggctagttgtgttctttgatcttcccacaaccacgccggaagataaaaaaaactatcagtatttccgtaaggctcttttagaagacggctatacgatgattcagtatagcgtctatgcccgcgcgtgtgttactcaggaaagaatagctacccactcccgcagaatccagaaaatgataccgcctgatggttctgtccgctgtcttttcgttacgaatatccagtgggataagatgttcgtttttcatggcaggtcttgtccccgacaggaggtttcccttcctcagcagatgctcctctggtaaaaatatcggacgccgtatttttttataagtcgctgaacataaaaataaggcacagtatctattgtactgtgccttattttggattcaaggcaaaacgcaagtgtgcgctggacggatgacgcaaccattgtactgtgccttattttggattcaaggcaaaactataaaggggaatcatggataccggggaatattgtactgtgccttattttggattcaaggcaaaaccgcggatttcggaacgcgctgcttgtaaaaattgtactgtgccttattttggattcaaggcaaaactgttccggggttgtcccccttggatgattattgtactgtgccttattttggattcaagacaaaataaatacgcctccggtttgatgacgcaaggtggatgtccgtctttggccacgcaattccagacggatttttgtcagtctttctttaacggagcgggaggaatgaagctgtacgtccagaacatggcgccggttgcggaggtgattccgtccatgttaagataacgggccaaaagcagggagggggaggagtgccccatctccttctgaagaaggttttgattgcagaaatgggccaggtgataggaggcgtaggtatgcctcagcacgtcctgcacccatccgctttttttcaggatgccggaccggcgccttacttccctccatttcttttcccagttgggcgggcaaacgggacgggagggggaaccggcggaagacgtccggctgaggatggcgcccagcacgggaaggatggaaacgtggcggctcccgcctgttttggtatggcagggcgccagtgaaaccaggccggatttcaggttgatgttcttccaggtcagccttttgacctcgtgggggcgtatgcccgcgtacagcatcagggcgcaggccggcaggcatgctccgtggaacaactgttccgcggtgtggagaagccgttttgcctcgtacagggaaagggccctgatgcgtttttccctgaggatagggggaggaaccagaaaggccgcgtttctgcggcaccacccgcgcttcagggaaaaattcaggatgccgctcaggatcagccgccccttgtgccgctggcggggagtggaaaagcttttgcggagataacgctcgcaatcttccggcgtgatggaacggacctgttttcttgccagttccgggcattttttcatcatccgggcagccatatagcggatttcctgcagggtgcggggccggcggtgtttccttgcttccaggctggcgcggacagcctgggaaaacggcacgcttgtttccctgtcggcaagagcctctcctcccagccgtatgcatcgtttggcccgggttattctgtcgcctcttccgcggctggtgtccaggaggtcctttagaagaaggaaagcgtccatgggaggaatgcccagggaacggatgaggaggattcctgtctgatccgtgtcggtggggaaagaggaagtcggtatgttcatgaagaacgttgtagcagaggattcccaatccgtacacaagtctaaaatgtgatgataacagctataaagatcaaacaggaacggaaaaggaaatgaaagatgataaacaatgattcataaaaatatgttagatttttttctacattattcgatataaatgtacggattgggaatccgttagaacaggcaaaaaatgaatgtttctatttccttattaatcatatttggaacagtctttctggtgggagaacatgttttggctcgaactttggaaacgggaagagcgggtggctattacactcattccgggaaaggggacagaagcgccagagccaggtttgaacggttcaaaagcagaaaaacgcctacaactagaaccagcataaccccgatttccgtttcagaccaatatgggaacaggtatcgtggggatttaattaccagcacttatgacccttcagccaaagccagggcgggagctgccgcctgggataaacgtcaaagcgccaaagccaagacaatcatcaaccaggcggaacatgaagcccagtcaaaaattgccagggaagaagaagctcaggtctttcgcgcatctctgtcacgccttcaggaagccgtaaaacagggaaaggtggacaaggttcttgcagacaagatggtaaaggttttgtccctgcgcgtcaaacagggaataatggatagaagggaggccgctggcgctattgattatttgattctcaataataaaattaatattaaataacggaatcatcaggataaatgggtgaaagctggtataaatattgattgttaatgagtatgcttcatgcaatattaagtatttttgttggagggctgggagggttgagcgccagggtgattttttcttttgcggcttccgtcgtcctgctgcccctgtctttattctcttcaagaagggaaactcaagtttctacagtacaagccgctttggctttgtgcttactggttattgctgtttccctgtatgattttgcagtaataaaaagctggaaaggaatagtggaacatttgacgtggggagactatataggaattgttgttttctgtgtatcttctgcctgtattcctgacagccgtgcagcggacatggcaggagactgcaagtataacagtatgatattaaatgcgggcgtttatttttccttatttattcctgtaggttttttattgatggactgttctgaaaatatgtggtcttacttatctttcatcatcgtctttctgctgttctcgtttttcctgatagattttcattgttctaaaaaaagcatgaaacaaatatttgcggatggaaataattatccggaaatagagatagagaaaaaacggtgggcaggaagaaaatggcggatgattgcaatcatcatttccgtatgttttttaacggcttttagtgttgtacagctatttaatggaaaaaaatacgcccatgagaacgagacagtagaactggatcatacccgcctgatggatttgggggagcagtatttgaataaaggagatgtggagagagctgtctcatgtttcaaaaaatcggcggagtttggaaacgcgaaagcccagaggaggctgggatacttttatttttggggaaaaggaatcagggaggacaagcgggaggcggtgaagtggtaccgtttggctgccgggcaggggaacgcggaagcccagaggaggctgggatactgttatttttggggagaaggaatcagggaggacaagcgggaggcggtgaagtggtaccgtttggccgccgatcaggggaacgcggaagcccagaggaggctgggatactgttatttttggggagaaggaatcagggaggacaagcgggaggcggtgaagtggtaccgtttggccgccgatcaggggaacgcggaagcccagtggaggctgggatactgttattatgttggaaaaggaatcagagaagacaagcgggaggcggtgaagtggtaccgtttggccgccgatcaggggaacgcggaagcccagtggaggctgggatactgttattatgttggaaaaggaatcagggaagacaagcgggaggcggtgaagtggtaccgtttggctgccgggcaggggaacgcggaagcccagaggaggctgggatactgttattatgttggaaaaggaatcagagaagacaagcgggaggcggtgaagtggtaccgtttggccgccgatcaggggaacgcggaagcccagtggaggctgggagacttttatttttggggagaaggaatcagggaggacaagcaggaggcggtgaagtggtaccgtttggccgccgatcaggggaacgcggaagcccag

SEQ ID NO: 2558 - DNA, 14860 bp, synthetic construct
  misc_feature 1..14860: note = Synthetic
  source 1..14860: mol_type = other DNA
caagagccattgaagccacgctggacggcattaacccgctgaatgccggaaagaaaaaagaggaagccctctccatgctgaaaaagtggttcccacagatggggaatttctccgggcagttgaaaaaatacaaggtcacaatcaatgacctgttagcggaaaatgaaaagctggaagcaagggcaaaagccagtgaaaaaggcaagatgaaagatacgatggaacgggcaaagttggaaagcgagctgcacgacattcagcggctggtagaccgtatcccgcaggaaatccgcagggaattagaacgggcacagcgaccccgccaggggcgtgatctttgacaatccgatcaggtacttttttctgtcttgttttcatagacatagacaaagggcagacagcaagagggaggtgggaatgctgctgtgaaagaacggaaactcaattaccggttccataacccaaacccaacggcagctaccgccgattacttactgaaaatttttatggaagtaaaccaggaaaaggtacagcttgccgtacaggctgccgcagatacggcggatagttcctgcgaaaaggatgacaaggggcgccctgcataaacggggcgcccctttccctattgcaatcccaaacagcacatgataaaatagggttgtaacagaacggcctgattttaacagagaggttttgccatgaacatcgccgcctactgccgtgtttccaccgataaggaagatcagctcaacagcttggaagcgcagaaagaatttttttccgaatataccaagcgcaccggggacaaccttgtgcgcctttacgcagacgaggggatttccgggacgaaaatcaagaaccggaaagagtttttgcgcatgatggcggatgcggagcacggcctctttgatatggtcgtagtcaaggatatttcccgctttgccagaaataccgttgaccttttgcagaatgtccgcaagctgaaatctttgggaattgaaacgcagtttttgaccgctaacatgaccagcatggggaacagtgaatttgtgctgacgatttttggggcattggcacaggaggaaagtgcgaatacctcaaagcgtgtgaaatttggaaaaaagatgaatgctgaaaaaggtcgtgtcccgaatatcgtttatggatatgataagacgattggagattattttaaccttgcaatcaatgaagaagaagctgcggttgtccgccagatttatgagtggtatatcaaagacgggtatggtgctgctaaaatttctattttcttaaatgaacgaggattgcggacaaaacggaattgccagtggagtcagaatggggtttgccgtattcttacgaatgaactttatacgggtaaaattattaacggcaaacaggaagtaaccgactttctgaccgggcagagggcagacaaagatgaaaccgagtggatggtcgtggagcgtccagatttgcgtattattgagccggaggtttttgaacaggcacaacagattatgcagtccagaggcaaagcatttaaggtggataaggaacgccaaagcaataaatatctgttctctactcttatcaaatgcaaggaatgtggctggtccttccggcgtacagtccgcacatataaaaacacttatgtccgctgggtgtgttccgggcataacgggcgtggtgcagacaactgccccaatgctgtgacggtagatgaagaagaattgattgaagttttgcaggaatattttgctgaacttctgaaagcaaagaagaatgtgatccgttatgtggtcggagaattccagcgggtttataaggcaaaggacgaaaacctgaattatgaaaaagagctgaatgcccagcttgcaaagctgcaaaaaatccggcaaaaatatatggatatgtacgcagatgatttgatttccagagaggaactgaataataaaatcggcggcatgagaaaagaaattgaacggctggaaaacgaactgaaaatggtgtcctaccatctgacaaagggcgagcagttggaaggtgttatgcaacagactttcaaggagatcgaggacatcacggatatgcggcaaatgacaaacgcccaactcaagcggatcatccagaagattgaagtggacaaggatgggaatgtggacatttacctccggctgcttggcgatttaggcttggacgaaaccgttctaattcgtgacaacgaaacagcgcggcgtgttgcttcagtacgggataaaattggctcggcgttatcgtggaagtcttttgttcgggcagttaatcccccgttttgataaccgcatcatcagccgctgccctgtcacgtgggcgcaggtgtatgaagctgagttgaagaaaggcaattctgagcaaagcgcccgtgaacgggcagaaaaactatccaaggtgcccacggcgaattgcccggaattttatgaataccgcatggcccggattttatgcaatatccgcgcagacggagaacctctttctgcagagatacgcagagaattgatgaatcaggcccgacaggaaggcaagttgaccaaagcctctctggagaaggctatttcttcccgtctgggaaaggagacagagactaatgtaagcaactattttactttgcatcctgacagtgaagaggctctttacctgaaccctgccgtggaagttctgcaaagaagcggcatcgggcaaattctttcgccgtctgtgtatcgaattgccgccaatcgcctgcgtcgcgggaagtccgttactccaaactatttgttgaatttgcttaagtctcgtggggaatctggcgaggcgttagaaaagaaaatagagaaagaacgccatcaacaggccaatcgaaagaaagccaagaagacagatctggattatgccgccacgccgttaaaacccaaatatgcgacggggcgtgcgccgtatgcccgcaccgtcttgaaaaaagtggtggaagaaattcttgatggagaggacccgacgcgtcctgcccggagagaagcgcatccggatggggaactgaaagcgcatgacggttgcctgtattgcctccttgatacggattcttccgtgaatcagcaccagaaagagcgccgtcttgatacgatgaccaacaaccaccttgtgcgtcaccgtatgttgattctggatcgcttgctgaaggatttgattcaagatttcgccggcgggcaaaaagacagaatctcccgcgtttgcgtggaagttggcaaggagctgacaacgttttccgccatggacagcaaaaagattcagagagaactaactctgcgccagaaaagccatacggatgccgtcaatagattaaaacgggagttgccggggaaagcgctttctgccaacctgatacgcaagtgccgcattgccatggacatgaattggacatgcccgttcaccggcgcaacgtatggcacgcatgagctggaaaatctggagctggaacatatcgtgccccattctttccggcagtctaacgcgctttcttctctggttcttacctggccgggagtcaacaggatgaaaggtcagcgcaccgggtacgactttgtggagcaggagcaggagaatcctgtgccggataaacccaacctgcatattcgttccctgaataagtacagggaattggttgaaaagttggatgacaagaaggggcatgaagatgaccgcaggcgcaaaaagaagcgcaaagccttactgatggtgaggggattgtctcataaacatcaatcacaaaatcacgaggccatgaaggaaataggcatgacggaaggcatgatgacgcagagttcccacctaatgaaactggcatgcaagtctattaaaacctctctgccggatgcgcacatcgacatgattcccggcgctgttactgctgaagttcgcaaggcgtgggatgtttttggggtcttcaaggaattgtgcccggaggctgcagacccggtcaacggcaggattattaaggaagatctgcgttctctcacgcatctgcatcatgccctggatgcctgtgtgctggggcttatctcagaaattattcctgcggacagaaaaaacgtgttgagacgcgccattatcaagcgccgtctggatcaaaagatgaaacaggacttcctggaactcaggaagaaacgttattataagttgcgtgagaaggatggccagacgggagcatcattggtggatttgcctagtgggatcaaagaaaatatccgcgagaaattgatggagcagagggtcattcagcatgtccctgcagacatgggcggcgctttactcaaggaaaccatacagagagtgctttctgttgatggaagcggggaggatgccatggtttctctttccaaaaagaaagatgggaagaaggaaaaaaatcaggtaaaagcaagcaaattggtcggagtgtttccggaaggcccgtcaaaattgaaggctcttaaggcggccatagaaattgatggcaattatggagtggcgttagatcccaagccggtggtgatcagacatattaaggtgtttaagcgaatcatggccctgaaagaacagaacggcggcaagccggtgcgtatcttgaaaaaaggcatgttgattcatttaacctcctccaaagatcccaagcgtacaggcgtatggagaattgcatccataaaagataatgagagaggcatagctattgatcttcaaatacctcattccgcagttcccggggccaaaactcatgaatttaattggattaatgtaaaacttgatacactattaacaaagtatcgattggagatataccccacttcttatacgggaactccacgataaggcgttttacatgtcataccatattctgagcatagatgcctgcacatgccatctgagctgcgacaagggtcagctcagatgcgtggatggagagaatcctccccggacgattccgctggaggatgtgggggctgttgtgctcagttcttttaaggcgacgctcacgagcaatttgctgatagaactggccaggaagagaatagggttcgtgctgtgtgaaagctacaggcctgccgtgctgcttctgccggcggatcgggctacggataccgctctgttaagacatctggcggatatgccggcccgtttgcggaaccgcctctggcaaaagactctggatgccaagtgtgggaatcagacggcgctggcgcaggtatggaatccgcatcatcccgccattgcggagctgaagagaatggccgtgacggaaaagacggcgagggaagcagagtgcgcccgcctgttctggagcgtatttgcggatacatgggcaaactccgattttcgcagaggacgtcatgaggaggggtttaataacctcttcaactatgcgtacgctgttctgttgtcttgcgtattgcaatatctctttgcgctggggctggatccctgcttcggcatttttcatcaatcccgggaacatgcggcgcctttggcttatgatctgatggaacccttcaggcctgcctttgacgccaatgtggcccgttggattcatttgtgcctgcaggaaggaaaaacagaagagagagcaggagaaatcacccgtgagttcaggcgacatattacagctaccttgcaggcttctgttatgcaccagaacaaacagatgccgttgaaagcggcggtagaggccgtttgccgcagtttccgcaaagcagttcttgccgggcaatccggaccgtatgaaccatggcatacgacaactataaaatgggctggctagttgtgttctttgatcttcccacaaccacgccggaagataaaaaaaactatcagtatttccgtaaggctcttttagaagacggctatacgatgattcagtatagcgtctatgcccgcgcgtgtgttactcaggaaagaatagctacccactcccgcagaatccagaaaatgataccgcctgatggttctgtccgctgtcttttcgttacgaatatccagtgggataagatgttcgtttttcatggcaggtcttgtccccgacaggaggtttcccttcctcagcagatgctcctctggtaaaaatatcggacgccgtatttttttataagtcgctgaacataaaaataaggcacagtatctaattgtactgtgccttattttggattcaaggcaaaataaatacgcctccggtttgatgacgcaaggtggatgtccgtctttggccgcgcaattccagacggatttttgtcagtctttctttaacggagcgggaggaatgaagctgtacgtccagaacatggcgccggttgcggaggtgattccgtccatgttaagataacgggccaaaagcagggagggggaggagtgccccatctccttctgaagaaggttttgattgcagaaatgggccaggtgataggaggcgtaggtatgcctcagcacgtcctgcacccatccgctttttttcaggatgccggaccggcgccttacttccctccatttcttttcccagttgggcgggcaaacgggacgggagggggaaccggcggaagacgtccggctgaggatggcgcccagcacgggaaggatggaaacgtggcggctcccgcctgttttggtatggctgggcgccagtgaaaccaggccggatttcaggttgatgttcttccaggtcagccttttgacttcgtgggggcgtatgcccgcgtacagcatcagggcgcaggccggcaggcatgccccgtggaacaactgttccgcggtgtggagaagccgttttgcctcgtacagggaaagggccctgatgcgtttttccctgaggatggggggaggaaccagaaaggccgcgtttctgcggcaccacccgcgcttcagggaaaaattcaggatgccgctcaggatcagccgccccttgtgccgctggcggggagtggaaaagcttttgcggagataacgctcgcaatcttccggcgtgatggaacgaacctgttttcttgtcagttccgggcattttttcatcatccgggcagccatatagcggatttcctgcagggtgcggggccggcggtgtttccttgcttccaggctggcgcggacagcctgggaaaacggcacgcttgtttccctgtcggcaagggcctctcctcccagccgtatgcatcgtttggcccgggttattctgtcgcctctgccgcggctggtgtccaggaggtcttttagaagaaggaaagcgtccatgggaggaatgcccagggaacggatgagtaggattcctgtctgatccgtgtcggtgaggaaagaggaagtcggtatgttcatgaagaacgttgtagcagaggattcctaatccgtatgcaagcttgaaatgtgatgaggataaatatgaaaatcagacaagaacgaaaatatctagggcaatgattacagcagagtataagggcgaatatgttggattttgttctaaatccttgaagaagtgtgtacggattaggaatccgttatacctctgcccatggaacaatatttcaaaaatttattagggaaaatggcgaaaacggctcttctaagtgtttttcttcactttggttttttgggaggagtttgccgggcaagtgaaatctacatagagaaaagtatctggaatgatgatcaggctgtttatgaggatattgatgggacggtaatgaataatgattctgattggtatttgaaaggatgcaatactatatatttggggaatcattataatggtacctccggctatcaccctcgtttatctttagttaatttaactttgcatgcggagctgggagagcgaaatttgagtgaagctgttttatcttttaatttttttggacagtatacggtacttatggaatggcaggaaattaaatgggatataacggcttctgccgatttgaagccgggacgttacctgctgtttacaactacaaaatcaacagttgtgtcagtgcttcacgtggtgaattggaagaatccacacgttgaagcggaggaatatggcaatggcatggtttccatatattataaccatcttggttcccaggtgcctgagcctggtgcggcggggttatccctgctggggattacggcggcgttgtggcgccgaaggagggaataggggactttttataattccgcagatttgttcgcgcctctgaggaagccctgtcgtcaggttgtggaagagccgggcggtgatgttttcttttctgcttcagtaggggaatggggagcgtcccgaagggttttcagcagggccgccatggtgtctatgtcctcatccgtcatggaggaaaggtcgtccagtttctttttaatgtcttcaatttcctcttcccggtacggcagcgcttctccgccgtggggactcagaaagaaggacgtgatggtgctggtgagcgttcccacgaatccgatgcccgtgagcatcaggaatacagccagaaatttgcctgaagtagtgaccggataggtatccccatagcctacggtggtagccgtgacgaaggaccaccagataccgttgggcaggctcatgccttccgccagatggatgcctacggcccccagcaggatgatgaccagggcggcgatgcagatatacttgaatccgttcgtgttgaagaaacgccggatgcgcgtggtgaacctcatggcataggaaaacaggtccagatacctggcgagccttaagatttcccccagcgaggcgaacctgaacaggcggaacagggcgtcaaagggaataatggccagtaaatcccaggggtgttccttaatgaagagccatttggaccggctgatggagaagcggaccacataatccagcacaaaaatccagtagatgacgcggtccgccgtgacttcccattccgccgcttccgtggtcaggtcaatggcggtcagcgttacggcgaccagggccagcaggcacatgcccgcttgataggccagcctcaggaacagaatgtggcggggcatgcggcgtaacgcgttcatggcgggaagagaaatgaaaaagccgccccccggcggggtgggcagggagcggcttggggaaagaggctgtttcctccgggccccttacttcagcaggagctgttccatcagggcctgggaggactgggccagcacggcgggatcgtccagcatgccggcgcggagcagggcggtattcgcgatctgatccgccaccatttgcgccagttccgggttttccgtccgcagggcggaaagctttttcaccagcgggttggaggggttcagttccagctgcgggtggctttccggcacttcctgccccatggctttcatgtacgccctcatttccggccccatgtcattgccgctttgcagggctacggcggctccgctgaccaggcgcttgcccagggtgactttggagaatttgtccgggtacagccctttcagccattcttccagggccgcggcttcctcctggggcagggcgtccttctgttcctcttccagggcggggagttccacgtcggcgcggtcgatcatcgtgacgggcttgccgtccacgctggacagggagtccagcacgaattcgtccccatggtccgtgaagaaggccacttcatagccgcgggctttgaaggcttccaggtacgggctgttttccagatgggagcgggaggggccggtaagcgcgtaaatggccgtctgcccttccttcatgcgggtgacgtagtcttcaaatgaggtcgtttcccccggttccgtggccgtggattcaaaacggagcagcttgcccagggattccttattcggccaggaggtgacgacgccttctttcagatagcgggagaattgcgcgtagaattccctgtaggtttcctgatcgtccttcgccagtttttccagatgcttgatgaagcgtttggtgatgatgtcgctgattttgcgcaccagggagttgtcctgaagcatttcgcgggaaatgttcaggggcaggtcctcgctgtccaccacgccgttcaggaagcggagccattccggcagcaggccttccggcttggcgtcaatcagcacgcgcttgcagtacagggccacgttggcgtccacgcggccgaatccgaacatttccggattgcgcctggggatgaaaagcagggcattcagggcaataggggcgtccgcgctgaagtgcatgtaggacaggggtttttcatccgtgtgggcaatgaactggtaaaattcatcatattcctccggtttcacgtcggatttggacttggaccagatggcctggacggtgttgacgtgctctccgttgaagttgagagggaaccccacgaagttggagtagcggcgcaggagctccttcacgcggtattcctgggagaactcttcatattcgtctttcaggcggatgacgatgcgggtgccccggtccagcggttccgccagcgtttcgatgctgtagccttcccgtccgtcggaagaccagcgcagggaggcggcttccggttcataggaatgggtgaacacttccacccggtccgccaccataaacgagctgtagaagcccactccgaactggccgatcaggtccgctccgccttcctgcttctgcttgagggcctccatgaattttttggtgccggagtgggcgatggttcccaggttttccaccagatccgcttccgtcatcccgatgccggtgtccgcaatggtgatggtcttgttttccttatccgtggtgacggtgatttccaggggcttgtccggctggtaaatattagaatccgtcagctgcttcagacgcagtttttccagggcgtcggaagcgttggaaacaagctcgcggacaaagatttcacggtcgctgtaaagggcgttgatgacaatgtccagcagctgccggacttccgcctgaaattgatgtgtttctgtattcatatggaaaaatgttttgcgagcgtcattatacggcccccgtcaagggggatggacagtttttctccctgggcccgggcgtcccatgtcacacaaaaaggctttttcacaggcatgggggccgggcgtttttccttgaaacaattccggaaaccgaacagtattatttaacaaatgattttctcaccattgttgaaaaaggggattcttttactggccttctgcggcgtgttgggcggcggcgttctttccgcccaggaaacagggggctcgccgattacggaggagggtttgaaggcattggattccaatgtgttcgccaatgaatacatgcttgcattgaagcccaatgtcacgcgcgaccgcatcgccaaaatcaaggatccctttgtgcgtgggctcgccgagcagatggcggagaagaaatttgaccgcaaggcccgcgccctgacggcggagccgtatgaaccggtcaaggatctggcggaacgcctgcgtaccagccagtacagcaaatttgaaaatcccaccggcatcttttttgaagagggggaggacgtattgctggtcatgggggatcccaaaggtgaaaaactgaatctggttatccacaatttcgggcgggacggaggccacagctcctatccgctgaaagagggggtcaacatcatcagggcgaagaacaaggggcttggctatattgagtatttcacatccaattacaagaaggcgcccaaggtgcatctgtccattctgtccggcaaggtgaatggagttttcgtgggaggcgtcagcaaaaacagcgactggaagaggatgctggaaaactcccccacggaagttgtggacatcgtgggcaaccgcgtgcatctggtgtatccggtggaggaacttaaacaattctgcccggacaaaggggaggagctcattgccctgtacgacaggattatcggcatggagcagcagatcatgggcctgtacaagtacaggatgctgcccaaaaaccggatgttcggccgtgtgatctggaacgggttcatgcatgcggacggtacgggagccgcgttccataacggtaccatgaaggaggtcggcaatccggacaagattcccggcagcgcctgggggattgcccatgagttcggccacgtcaaccaggtgcgccccgccatgaaatgggtatccaccggagaagtgaccaataacatttactccgcttacgtgaattacatgctgaatccctccagcatgcgcctggagcatgaacgcatcaacggcggggacggcaacatgattggcggccgcttcaacgcctacttgaacaacggcattttgaagggggaaaactggcttgtccagagcggtccggacaagcgttccggcggggataaccgtccgatggtgcacgaccattttgtcaagctggctcccctgtggcagctggagctgtacttcaagatagccgggaagggcaatcccgacttttatccggatatcttttataaggccatcaagatggataccaggggcaagaaggatggagagctccagcttgcgttcatgaagaacgcctgcgacgccgccagacaggacctgacggattttttccggaaaacgggcatgctcaagcccattgaccaggaactggacgactacacctgcgcccgcatgaccatcacggaggccgactgcaagaacctgattgcctatgccaggaagtacaaaaagccggaaagccccgtcatttactatatttccgtcaatagcgcggaagcatataagaaccgcctgcctgtccgcggcgtctataaccagggcgttacggagcaggtcaatcgtcgcattatttcccatgacgtgtggaaaaacgccgtcgtctttgaaacctacaaagacagggagatggtccgcatcaccatggcggggacggattccagggataattcctccaccacggtcccctatccggaaggctctacgcggattgaggccgtttcctgggacggcaggcgtacgctggtgtacggcagacgccctgacaaatgaaagcttaagaggttagcgtgttcgggcgccgccgttctccgggacggcggcgctttttcatgacagggggggcggatggaaaaccgcaaggggattgctcatcctgatggtcttttctccataccgtatcttccggactgctgacagccggaaggctgttgcttttgaacaggggcgggggagaggctgtataacatgggatggataaggcaggaacttccggaggcatcaggggaaagatgctgttgtttgccgcctttttaatcgtgtgctttaatctgcgtaccgggtttgattctcccgatccgctgttgggaacgattgaaagggatatggggctttccctggaaaattcagggctgttcgccctgctgcccgtctttgtgctgggggtggcggctcccatttctccgcgcgtggcgcgccggatgacgccgtggaaaatcattttctggttccagcttctggcggtggccggaattttctggcgcagctgggacggagtggcggggttatacggcggcatggttctgatggggctgggcatggggattgccggagcggccattcccggactgatcaagcaccagtttcctgaccgtgcttccgccatgatgggcgtttacagcgccatgatcggcgtgggcagcgctgcggcttccggcctgtccgttcccctttccaatatgctgggaggctggcgtttcggcctggggatctggattattcccatcctgctggggatgctggtatggggcgcttattttctcaggcatccggacggcgtgtttcaaaacgatccggcggcatccggacgcagcctgctgcgcagcggcaaggcatggcaggttaccgttttttatttgagccgcgttggggctgcctatttcttttatacctggattcccatctttctgaggcagcggggcatgagctatgaggacgccggtttcatcctttccgtggccatgttcgcccagctgcccgctacgctctccgctcacgtgctggaaaaagctatgggagggcggggcctcctcatcgtgatggccatggcgttggcggccctttcctgctggggcatcctgtatcttccgctggactgggccgtctggatggcgattctgttcggcctggcgacgggaaccgtattcagccgcggaatggcgctgatggtggaacgggcccggacgccttccgaatcaatcaggctttccggcatgtcccagggaatcggctttaccatgggtgccctgttgagcctgctgtttacctccttcctgcatcagggaggctccttcctgccgttctgcctggtttataccttgttctgcgtgctcggcatggtttccggccgcatgtcctcccggccgggatacgtgtaatataagatttcggaattatgcagaatgtcttgccttaagatttttagaatattttaattattgatattcagtaaattgctccgatgaaaaaatcggaaagatcaacgaaacaagactaaagtaaataatgctgtaaattttaattattcctaatctattattttttttctttacaaaaatataaaatttgtatttgttttctatgtaaaaaccaaatatcaatacatgaaatcaaataatcaaaaaatgaaggaagatgttttttgtgtggttgaatctgtctctgagcaaccctcctattctcaagccgattttattaagttttatgagaaacaaaagaaaaatggagattggactttttatgatgaaagacagtttatggaaaatctgttttgtactagactgaactatttttttattattttttcgttaattttaatggctgctgtaacagtaag

SEQ ID NO: 2559 - DNA, 10963 bp, synthetic construct
  misc_feature 1..10963: note = Synthetic
  source 1..10963: mol_type = other DNA
tccgtttccagggacggagcctcctggtcggaaagaagctgtaaagttttagctgttttttgcttgagttccgttctggacggctcagggataatgctgtattgggctgttgcctctgccggaggggagaaggagagcagaatgccgccgagaatggataagggacgtgccatatttccaatataaacggggaggaaacaggttctgtcaaagaatcatcttttgcttccagatttttttgccgtctccttgttgcccggcgcggagccggtaatagaaaaaaataaaaggccgcctccggagagatggcctttttattagaagtggtagccctatgaggactcgaaccccaaaatacggaaccagaatccgctgtgttaccgattacactatagggctatgtaacgggcgcttttgcagcgcgggcgcattaaagcggaagaggctgttttttgcaagtttttttttactcaaagatatgttttgattggaaaaaggctgtacaggaaagcggcaggctgttttttccggaattatccggccaggcttttaaagtatgcctgtacgtgcttctctgtgatttgctggcggtgcgcctgttcatgcctgccctgggattgcttccatggggaggacggggcggtgttgatgcgtccgagctgctgggccgtatatttgccatagacgttccagatatgctccagaaaaggaataatgtccgtttcctcctccaaagggggctggcggcggctgggatgttctatggaagagtagggcggctgatccttgtattcatgataaatggaagggagtaccggaccggaaggccaggcttccacccgttcattgatcaggaaaccgccagtccggtgcagatgccaccagtccgccagaatgaccagatggttcagtttgacgggcgtcaggacgagtcccttggcgttcgcctgctgaatgaaccagttgcagagtttttgcgtggtagtggagtttgccatgctgaaatgggttgcctctattataaaaggccgcaggtatttctcaacactaaatccgcttgcagttccagcgctctggcggtcgggataggcaaatggctgtgcgggattcggcaggtccccggcatgctgcttcctgctccgcaggcggaatgcctgaaaatatggcgcaggttgttctagcgggggagggagccggagattcccctctcccgggcagctgatggtgatgtacttccccctccggagatttccgggtcaggccgtgtgcatggcagcggagttgctttcctgggaaaataagactgtcaaagggaaagaaagcgcgccctgcggacaacgtcttccggagaaagggcgtaaaggctgtccagcaatgatacggcaaaggaaccggggaaggggctttgttcaaaggccatttctccggcaatgcccatgagtacggccgtggaaacggccgcctgcaagggggtgggggagacggcggcacaggcggcggacagtgctcccatggaacagcccacgcccgtgacccgggacatcatggcgtgtccgttttccgtggcggttacctggcggccgtccgtggaataatccgtacgccctgtaacgagcacggccgcccctgtgtgcagggccagttccctggccgcatgcagggcgtctgcgctggagctggtgctttccggccctttcgtgacggaggaatagccggccagggccatgatttcagaagcgtttccgcggatgatgcggggggattgttccttcaattgccccgccagccgcgtgcgcagggaaagagcccctacggccacaggatccagcacccaggggatattcagcctattggcttcccgcaccgctgtttgcatggcggctccctgttcgcgcgtcacggtgcccaggttgaccagcagggcgcctgttccgctgcggagcatgtccgccgcttcttccgcgtcgttgagcatggcggggacggcgcctatggccagcaggagattggccgtcaggggctggacgacggaattggtcagggagagaaccagcggggccgtttcccggattttttccagatcggcggcaacggcttgaacaaggtctgtcggtgaaagcatggcgtaaaaaagtgcttgattgtccggtgtttcctgcggttcgtccgtcaggcaagagcccgtgcggcggcttccggattctccgctccgcaaatggcggagacaacggcaattccggaggcggttcccgtggcgcgcacttgccgggcccgttccgcgtccaggccgccgatagcgacaacaggcaggggagattgggaagccagagcggcgaagccttccacgctcagcacgggaggggcgttcagtttggaaatggtgggaaagacggggcccatgcccaggtagtccaccagggatgcatccacggcgcggagctgttccttattggagacggacagtcccaggattttatccgggccgatcatggctctgacggagggaaccggaagatccctctggccgatgtggacgccgtctgcttccagcgccagagccaggtcaatgcggttgttgacgatgaagggaataccgcgggaggccaggaaatcccgtatgggcaaagcttcccggtaacaggttcccgcatccggattggtggagcggtactgcaccatggtaactcctccgtccgccgctttccggacggtttccagaaggctgtagcggcatttggacgcttcatccgtgaccaggtagagatggagattgaattttttcatggcagggaatggaaggaatcagtccgtaaacagaggggtggaaagatagcggtctcccgtgtccggcagcaggacgacgatggtcttgccttcattctccgggcgccgcgccacctgtgtggcggcccagagagcagcgccggaggaaatgcccgtcagcacgccgtccgtgcgcgccagttccttccctgtggagaaagcgtcttcattggtgacggtgatgacttcatcgtacacggaggtatccagcgtttccggcacgaagcccgcgccaatgccctgaatcttgtgggggccggccgtgccctgggtcagcacgggggaggagaacggctccacagcaacgacccggatgcccggattacgggatttaaggtacttgcccacgcctgtgatggtgcctccggtacccacgcccgccacaaaaatatccgctttgccttctgtatcattccagatttccgggcctgtggtgcggaaatgcgcttccgggttggccgggttggcgaactggccgggaataaagctgttgggcagtcccgcggccagttcctccgccttggcgatggctcccttcatgcccagcgcgccgtccgtcagcaccagttccgcgccgtaggctttcaggaggttgcggcgttccacgctcatcgtctccggcatggtcaatataatccggtacccgcgtgaagcggccaccgccgccaggccgatgcccgtgtttccgctggtgggctcaatgatgacggaatccggcttcagcttcccggcggcttccgccgcatcaatcatggcctgggcaatgcggtctttcacgctgccggcggggttcaggtattccagcttggccaggatagtggcgttcaggccattcctgcgttcgtaattggtcagttccagcaacggggtgccgccgatcagttccgtaatgtttttgtaaattctcatggcttgtaggaaaagagcgttgttgccgttaaatcgttagagaatggcgcggaagccttgttccaaatcttccagaatatcgtcgatatgttccgtcccgatggagagccgcacagtggatggcgtaattcctcccgccttcagttcctcctccgtcatctgggaatgggtggtggaggccggatgaatcaccagggacttgacgtccgccacgttcgcgagcagggagaatagttccaggctttcgcagaacttgcgagctttttccgcgccgcccttgatttcaaaggtgaagatggagccgcccccgttcgggtaatatctcttgtaaaggtcgtggttcggatggtccggcagggaggggtggttcactttttccacctggggatgggaggacagatagtccgctacgcgcaaagcgttctgcacatggcgttccacccgcagggagagtgtttccagcccctggagaagcaggaaggaattgaacgggctgatggtggctcccgtgtcccgcagcagggtggcccggattttgacgatataggccagattgccgcatacctccgcgaacacggctccgtggtaattggggttgggcttgctgatgcctgggaacttgtcgttctgcgtccagtcgaatttgccgccgtccacaatcacgccgcccatcaccgtgccgtggccgccgatgaatttggtagcggaatgcaccacgatgtccgctccgtgttccaaggggcggaacaggaagggcgtggcaaacgtgctgtccacaatgagcgggatgccgtgggcgtgcgccacttccgccagcgcttccatatccacaatgtcgcaattcgggttgcccaggctttccacgtacagggccttggtattgttccggatggccctggaaaaattctgaacgtccctcgcgtccacgaaagtggtttctatgccggcatccgccagcgtattggcgaaaagattgtacgttccgccatatacggtggaggaagaaacaatgtggtccccggcccgggcgatgttctggatggcatacgtgactgcggcggccccggtggatacggccagcgcggccgcccctccttccagggaggcgatgcgttgttcaaaaacatctgcggttgggttcatcaggcggttataaatattgcccggctccgccagggcaaaacgggccgccgcctgttccgagtctttgaagacataggaagtggtggcgtaaataggtacggcgcgcgcatcggtggccgggtccggactttcctgacccacgtggatctggcgtgtttcaaatcgatggttcttgctcatgtttttatattcctatcggaaaactaggaaatggataacgaaaagaaaagaccatgtcaagctccgggtaaaaaaaacgggacatgggccggaatgggaaaaggtggagaaatgttcaggcccgcggccgctgcttaaatgccggctccgtagtcgcagccgatttccttctgctgctcggccagatcttccagcgttacgcggcgcaaataattctcaatgacttgctggagcccgcgccagaaaggcagcgtggcgcatcctgccgcccgtgggcacggattttcgtggggagccgtgcaggaaataggcagaagggagccttccgtcagtttcaggatttcttccgtggtgtattcgcgcggatgtctggaaaggcggtatcctcccgcctttccccggaagctctggacaaatcccgctttcaggaggatggcgataatctgttccagataacgtacggtaatgtcctgcctggcggaaatctccttcagggaaacgtagccttcgttgcggtggtgggcgagatcaatcatcaggcgcaatgcgtaacgtcctctggtggaaaccttcatcatatcggttaaataaacgatatttccggatgcccgtcaatagggaatgaaggttccacgcggaatggcgggcttcttccccggttgaaagtttaataattgtaatggcggggaacccgggggcctattccggtaaaaatttcccaggaaatggtgccggccttttcagccagttccgtcacggggatatgcggccccatgatttctgcggtcatgcccggttccgcgtgcggcgcccggctgacgtccacgatgatttgatccatcgtcacgcgcccgagaagggggcaggaaaccccgtccaccatgacgcgggcgcccttatgggccagggaacgcagatagccgtccgcgtagcctatgcccacggtcgccaccctggtgggatggtccgtcacataagtgcccccgtaggaaatgccgtggccttccggcagcgtgcgcaccaccgtcaggcgggaaaaaagagccatggccggccttaattgagaggcccatggggagtcaatgggggaaaacccgtacagcaccagcccggggcggcacatgttgttggagggaatttcataatccagggaggcggcgctgttggccaggtggcaatacttcaagggcagtttctcccggatgcgggcggccatccgttcaaagagggcgatttgcctgagcgtgatttcccggtcctcgtccgcgcagggcaggtgtgctcccaggccttccggatgcaggctgtccagttctcccaggcgggaaagcagttcttcaagctggtccggcaggaatccgccgcggcccattcccgtatccacggaaaggtggatgggcagcgtctttccgtacagccgcgccagggaattgtaatgctctgcctcctccatggtggaaatgaaggagcgccagccgttcagcacgatttcctcccgttcctccgggaacgcggggcccaggatgtaagggcgggtgcggcagcccgcctggctgatgcgccgggcttcccccacattggccaccccgaagaaagcgatgccttccgaatccagcgtgcggcaaacctgttccagcccgtggccgtaggcgcctgccttcacgacgggcatgtaatattcccctttggccgcctgcttgacgacattcaggttatggcggatggccccgaggtcgatttcggcccaggcgcggggagggctggttgctggcatggttggaaaatggcggaaaggttggaaaaagaggggcgccggatgctcccggcgcaggggattgtccgtctttggccgcgcaattccagacggatttttgtcagtctttcgaactttcagaaggtataaaaactgccatgtgctgaaacacatggcagtttgataaaaatgcttttgttaccggtgtgactggctggcagtcaggaaaatcggtttgcatttcaaattttgtcttgaatccgttgggaattaaagtgatgttcagatgttttgtcaactgtttttttctgaatggaataatttttaaaatacttgatggaatgcaatattggcatataatatgaattaaagcagtttttttgtgatgtcgcgttctctcactttttcgtttgatattggttatgcatccattggatgggctgtcattgcttccgcatcccatgatgatgcggatccctcggtttgcggttgcggtacggttctgtttccgaaagatgattgtcaggcatttaaaaggcgtgaatacagacgtttgagacgcaatatccgctcccggcgcgttcgcatcgatcgtatcggcagattgctggttcaggcgcaaatcatcacgccggaaatgaaagaaacttccgggcaccccgctcccttttatttggcgtcagaagcgttaaaagggcatcgaactctcgccccgattgagctttggcatgttctccgctggtatgctcataacagagggtacgacaataatgcctcatggtctaacagcctttcagaagatggcgggaacggggaggataccgagagagtgaagcatgctcaagatttgatggataaacatgggacggcgaccatggcggaaaccatttgccgggaattgaaactggaagagggcaaagcggatgctccgatgaatgtttcaacgccggcttataaaaatctcaataccgcttttccccgtttaatcgtggaaaaggaagtacgacgtatattggagctttccgcgcctctgattccggggctgacttcggaaatcatggagttgattgcccagcatcatcccctgacaacgaaacaacgcggcgtgttgattcattacgggataaaattggcccggtgttatcgtgggagtcttttgttcggtcagttaatcccccgttttgataaccgtatcatcagccgttgccctgtctcgtgggctcaggtgtacgaagctgagctaaagaaaggaaattctgagcaaaatgcccgtgaacgggcagaaaaactatccaaggttccgacggcgaattgcccggaattttatgaataccgcatggcccggattttatgtaacatccgtgcggacggagagcctctttctgcagagatacgcagagaattgatgaatcaggcccgacaggaaggaaagttgaccaaagcgtctctggagaaggccatctcttctcgtctgggagagacagagactaatgtagccaactattttactttgcatcctgacagcgaagaggctctttacctggatcctgccgtggaagttctgaaaagaagcggcatcggggaaactctttctccatctgtttaccggcttgccgccaatcgtctgcgtcgcgggaagtccgttaccccgaattatttgttgaatttgcttaagtcccgtggggaatctgtcgaggcgttggaaaagaagatagagaaagaacgccatcaacaggccaatcgaaagaaagccaagaagacagatccggattatgccgccacgccgttaaaacccaggtatgcgacgggacgagcgccgtatgcccgccccgtcttgaaaaaagttgtggaagaaacccttgacggggaagacccgacgcgtcctgcccggggagaagcgcatccggatggggaactgaaagcgcatgacggttgtctgtattgcctccttgacgcggattcttccgtgaatcaataccagaaagaacgccgtcttgatacgatgaccaacaaccaccttgtccgtcaccgtatgttgattctggatcgcttgctgaaagatttgattcaggatttcgccgacgggcaaaaagacagaatttcccgcatttgtgtggaagttggcaaggagctgacaacgttttccggcatgggcagcaaaaagattcagacagaactgaatctgcgtcagaaaagccatacggaagccgtcaataaattaaaacgggatttaccggggaaagcgctttctgccaatctgatacgcaagtgccgcatcgccatggacatgaactggacatgcccgtttaccggtgagcggtatggcactcatgagctggaaaatatggagatggaacatatcgtcccctattctttccggcagtctaacgcgctttcttctctggttctcacgaggaaagaggttaacaagatgaaaggtcagcgtaccgggtacgattttgtggagcaggagcagggtaagccggttacgggacgaacgaacctgcatatttgttcctttaataattatagggaatttgttgagaagttggacgacaagaagtggcatgaagatgaccgcaagcgcaaaaagaagcgcaaggccttactgatggtgaggggattgtcccataggcatcaattacaaaatcacgatgccatgaaggaaataggcatgacggaaggcatgatgacgcagagttcccacctgatgaaactggcatgcaagtctattaaaacctctctgccggatgcgcacatcgacatgattcccggcgctgttactgctgaagttcgcaaggcgtgggatgtttttggggtctttaaggaattatgcccggaagctgccgacccggactccggcaagattcttaaggaaaacctgcgttctctcactcatttgcatcatgccttggatgcctgtgtgctggggcttattccctatatcatacccgctcatcataatggtttgctgagacgtgcgccgaattccggaaaaactgatacctcaagtcaggcctgttgcgaatcagcgtcattatgtcctgaatgatgatggacgcatgatgttgcgtgatctttccgcctctcttaaagaaaatattcgtgaacaattgatggagcagagggtcattcagcatgtccctgcagacatgggcggcgctttactcaaggaaaccatgcagagagtgctttctgttgatggaagcggggaggatgccatggtttctctttccaaaaagaaagatgggaagaagaaaaaaaatcaggtaaaagcaagcaaattggtcggagtgtttccggaaggcccgtcaaaattgaaggctcttaaggcagccatagaaattgatggcaattatggagtggcgttagatcccaagccggtggtgatcagacatattaaggtgtttaagcgaatcatggccctgaaagaacagaacggcggcaagccggtgcgcattttgaaaaaaggcatgttgattcatttaacctcgtctaaagatcccaagcatgcaggtgtatggagaattgaatccatacaggattcaaaaggtggcgtaaaattagatcttcagagagcgcattgcgctgtacctaaaaataagacgcatgaatgtaattggcgtgaagtagatctcatttctttattaaaaaaataccagatgaaaagataccctacttcttatacgggaactccacgataaggcattttacatgtcataccatattctaagcatagatgcctatacatgccatctgagctgcgacaagggccaactcagatgcgcggatggagagaattctccccggacgattccgctggaggatgtgggggctgttgtgctcagttcttttaaggcgacgctcacgagcaatttgctgatagaactggccaggaagagaataggatttgtgctgtgtgaaagctacaggcctgccgtgctgctcctgccagcggatcggtctacggataccggtctgctaagacatctggcggatatgccggcccgtttgcggaaccgcctttggcaaaagactttggatgccaagtgtgggaatcagacggctctggcccaagcatggaatccgcatcatcccgccattgcggagctgaagagaatggccgtgacggaaaagacggcgagggaagcagag

SEQ ID NO: 2560 - DNA, 10718 bp, synthetic construct
  misc_feature 1..10718: note = Synthetic
  source 1..10718: mol_type = other DNA
gcttgaacaaggtctgtcggtgaaagcatggcgtaaaaaagtgcttgattgtccggtgtttcctgcggttcgtccgtcaggcaagagcccgtgcggcggcttccggattctccgctccgcaaatggcggagacaacggcaattccggaggcggttcccgtggcgcgcacttgccgggcccgttccgcgtccaggccgccgatggcgacaacaggcaggggagattgggaagccagagcggcgaagccttccacgctcagcacgggaggggcgttcagtttggaaatggtgggaaagacggggcccatgcccaccagggatgcatccacggcgcggagctgttccttattggagacggacagtcccaggattttatccgggccgatcatggctctgacggagggaaccggaagatccctctggccgatgtggacgccgtctgcttccagcgccagagccaggtcaatgcggttgttgacgatgaagggaataccgcgggaggccaggaaatcccgtatgggcaaagcttcccggtaacaggttcccgcatccggattggtggagcggtactgcaccatggtaactcctccgtccgccgctttccggacggtttccagaaggctgtagcggcatttggacgcttcatccgtgaccaggtagagatggagattgaattttttcatggcagggaatggaaggaatcagtccgtaaacagaggggtggaaagatagcggtctcccgtgtccggcagcaggacgacgatggtcttgccttcattctccgggcgccgcgccacctgtgtggcggcccagagagcagcgccggaggaaatgcccgtcagcacgccgtccgtgcgcgccagttccttccctgtggagaaagcgtcttcattggtgacggtgatgacttcatcgtacacggaggtatccagcgtttccggcacgaagcccgcgccaatgccctgaatcttgtgggggccggccgtgccctgggtcagcacgggggaggagaacggctccacagcaacgacccggatgcccggattacgggatttaaggtacttgcccacgcctgtgatggtgcctccggtacccacgcccgccacaaaaatatccgctttgccttctgtatcattccagatttccgggcctgtggtgcggaaatgcgcttccgggttggccgggttggcgaactggccgggaataaagctgttgggcagtcccgcggccagttcctccgccttggcgatggctcccttcatgcccagcgcgccgtccgtcagcaccagttccgcgccgtaggctttcaggaggttgcggcgttccacgctcatcgtctccggcatggtcaatataatccggtacccgcgtgaagcggccaccgccgccaggccgatgcccgtgtttccgctggtgggctcaatgatgacggaatccggcttcagcttcccggcggcttccgccgcatcaatcatggcctgggcaatgcggtctttcacgctgccggcggggttcaggtattccagcttggccaggatagtggcgttcaggccattcctgcgttcgtaattggtcagttccagcaacggggtgccgccgatcagttccgtaatgtttttgtaaattctcatggcttgtaggaaaagagcgttgttgccgttaaatcgttagagaatggcgcggaagccttgttccaaatcttccagaatatcgtcgatatgttccgtcccgatggagagccgcacagtggatggcgtaatgccccccgccttcagttcctcctccgtcatctgggaatgggtggtggaggccggatgaatcaccagggacttgacgtccgccacgttcgcgagcagggagaatagttccaggctttcgcagaacttgcgagctttttccgcgccgcccttgatttcaaaggtgaagatggagccgcccccgttcgggtaatatctcttgtaaaggtcgtggtccggatggtccggcagggaggggtggttcactttttccacctggggatgggaggacagatagtccgctacgcgcaaagcgttctgcacatggcgttccacccgcagggagagtgtttccagcccctggagaagcaggaaggaattgaacgggctgatggtggctcccgtatcccgcagcagggtggcccggattttgacgatataggccagattgccgcatacctcagcgaacacggctccgtggtaattggggttgggcttgctgatgccggggaacttgtcgttctgcgtccagtcgaatttgccgccgtccacaatcacgccgcccatcaccgtgccgtggccgccgatgaatttggtagcggaatgcaccacgatgtccgctccgtgttccagggggcggaacaggaagggcgtggcgaacgtgctgtccacaatgagcgggatgccgtgggcgtgcgccacttccgccagcgcttccatatccacgatgtcgcagttcgggttgcccaggctttccacgtacagggccttggtattgttccggatggccctggaaaaattctgaacgtccctcgcgtccacaaaagaggtttctatgccggcgtccgccagcgtattggcaaagagattgtacgttccgccatatacggtggaggaagaaacgatgtggtccccggcccgggcgatgttctggatggcatacgtgactgcggcggccccggtggagacggccagcgcggccgcccctccttccagggaggcgatgcgttgttcaaaaacatctgcggtagggttcatcaggcggttataaatattgcccggctccgccagggcaaaacgggccgccgcctgttccgagtctttgaagacataggaagtggtggcgtaaataggcacggcgcgcgcatcggtggccgggtccggactttcctgacccacgtggatctggcgtgtttcaaatcgatggttcttgctcatgtttttatattcctatcggaaaactaggaaatagataatgaaaaggaaagcccatgtcaagctccgggtaaaaaaaacgggacatgggccggaatgggaaaaggtggagaaatgttcaggcccgcggccgctgattaaatgccggctccgtagtcgcagccgatttccttctgctgctcggccagatcttccagcgttacgcggcgcaaataattctcaatgacttgctgaagcccgcgccagaaaggcagcgtggcgcatcctgccgcccgcgggcacggattttcgtggggagccgtgcaggaaataggcagaagggagccttccgtcagtttcaggatttcttccgtggtgtattctcgcggatgtctggaaaggcggtatcctcccgcctttccccggaagctctggacaaatcccgctttcaagaggatggcgataatctgttccagataacgtacggtaatgtcctgcctggcggaaatctccttcagggaaacgtagccttcgttgcggtgatgggcgagatcgatcatcaggcgcagcgcgtaacgtcctctggtggaaaccttcatcatatcggttaaataaacgatatttccggatgcccgtcaatagggaatgaaggttccacgcggaatgacgggcttcttccccggttgaaagtttaataattgtaatggcggggaacccgggggcctattccggtaaaaatttcccaggaaatggtgccggccttttcagccagttccgtcacggggatatgcggccccatgatttctgcggtcatgcccggttccgcgtgcggcgcccggctgacgtccacgatgatttgatccatcgtcacgcgcccgagaagggggcaggaaaccccgtccaccatgacgcgggcgcccttatgggccagggaacgcagatagccgtccgcgtagcctatgcccacggtcgccaccctggtgggatggtccgtcacataagtgcccccgtaggaaatgccgtggccttccggcagcgtgcgcaccaccgtcaggcgggaaaaaagagccatggccggccttaattgagaggcccatggggagtcaatgggggaaaacccgtacagcaccagcccggggcggcacatgttgttggagggaatttcataatccagggaggcggcgctgttggccaggtggcaatacttcaagggcagtttctcccggatgcgggcggccatccgttcaaagagggcgatttgcctgagcgtgatttcccggtcctcgtccgcgcagggcaggtgtgctcccaggccttccggatgcaggctgtccagttctcccaggcgggaaagcagttcttcaagctggtccggcaggaatccgccgcggcccattcccgtatccacggaaaggtggatgggcagcgtctttccgtacagccgcgccagggaattgtaatgctctgcctcctccatggtggaaatgaaggagcgccagccgttcagcacgatttcctcccgttcctccgggaacgcggggcccaggatgtaagggcgggtgcggcagcccgcctggctgatgcgccgggcttcccccacattggccaccccgaatccagcgtgcggcaaacctgttccagcccgtggccgtaggcgcctgccttcacgacgggcatgtaatattcccctttggccgcctgcttgacgacattcaggttatggcggatggccccgaggtcgatttcggcccaagcgcggggagggctggttgctggcatggttggaaaatggcggaaaggttggaaaaagaggggcgccggatgctcccggcgcaggggattgtccgtctttggccgcgcaattccagacggatttttgtcagtctttcgaactttcagaaggtgtaaaaactgccatgtgctgaaacacatggcagtttgataaaaatgcttttgttaccggtgtgactggctggcagtcaggaaaatcggtttgcatttcaaattttgtcttgaatccgttgggaattaaagtgatgttcagatgttttgtcaactgtttttttctgaatggaataatttttaaaatacttgatggaatgcaatattggcatataatatgaattaaagcagtttttttgtgatgtcgcgttctctcactttttcgtttgatattggttacgcctccattgggtgggctgtcattgcttccgcatcccatgatgatgcggatccctcggtttgcggttgcggtacggttctgtttccgaaagatgattgtcaggcatttaaaaggcgtgaatacagacgtttgagacgcaatatccgctcccggcgcgttcgcatcgatcgtatcggcagattgctggttcaggcgcaaatcatcacgccggaaatgaaagaaacttccgggcaccccgctcccttttatttggcgtcagaagcgttaaaagggcatcgaactctcgccccgattgagctttggcatgttctccgctggtatgctcataacagagggtacgacaataatgcctcatggtctaacagcctttcagaagatggcgggaacggggaggataccgagagagtgaagcatgctcaagatttgatggataaacatgggacggcgaccatggcggaaaccatttgccgggaattgaaactggaagagggcaaagcggatgctccgatggaggtttcaacgccggcttataaaaatctcaataccgcctttcctcgcttaatcgtggaaaaggaggtacggcgcatattggagctttccgcgcctctgattcctgggctgactgcggagatcatagagttgatcatcctctgacaacggaacagcgcggcgtgttgcttcagtacgggataaaattggctcggcgttatcgtggaagtcttttgttcgggcagttaatcccccgttttgataaccgcatcatcagctgctgccctgtcacgtgggcgcaggtgtatgaagctgagttgaagaaaggcaattctgagcaaagcgcccgtgaacgggcagaaaaactatccaaggtgcccacggcgaattgcccggaattttatgaataccgcatggcccggattttatgcaatatccgcgcagacggagaacctctttctgcagagatacgcagagaattgatgaatcaggcccgacaggaaggcaagttgaccaaagcctctctggagaaggctatttcttcccgtctgggaaaggagacagagactaatgtaagcaactattttactttgcatcctgacagcgaagaggctctttacctgaaccctgccgtggaagttctgcaaagaagcggcatcgggcaaattctttcgccgtctgtgtatcgaattgccgccaatcgcctgcgtcgcgggaagtccgttactccaaactatttgttgaatttgcttaagtctcgtggggaatctggcgaggcgttggaaaagaaaatagagaaagaatctaaaaagaaagctaaaaagaaagaggcggattatgccgacactccgttaaaacccaaatatgcgacggggcgtgcgccgtatgcccgtaccgtcttgaaaaaagtggtggaagaaattcttgatggagaagatccgacgcgtcctgcccggggggaagcgcatccggatggggaactgaaagcgcatgacggttgcctgtattgcctccttgatacggattcttccgtgaatcaataccagaaagaacgccgtcttgatacgatgaccaacaaccaccttgtccgtcaccgtatgttgattctggatcgcttgctgaaagatttgattcaagatttcgctgacgggcaaaaagacagaatctcccgtatttgcgtagaagttggcaaggagctgacgacgttttccgccatggacagcaaaaagattcagagagaactaactctgcgccagaaaagccatacggatgccgtcaatagattaaaacgggatttgccggggaaagcgctttctgccaacctgatacgcaagtgccgcattgccatggacatgaactgggcatgcccgttcaccggcgcaacgtatggcacgcatgagctggaaaatctggaactggaacatatcgtgccccattctttcaggcagtctaacgcactttcttctctggttcttacctggccgggagtcaacaggatgaaaggtcagcgcaccgggtacgactttgtggagcaggagcaggagaatcctgtgccggataaacccaacctgcatatttgttccctgaataattacagggaattggttgaaaagttggatgacaagaaggggcatgaagatgaccgcaggcgcaaaaagaagcgcaaagccttactgatggtgaggggattgtctcataaacatcaatcacaaaatcacgaggccatgaaggaaataggcatgacggaaggcatgatgacgcagagttcccacctgatgaaactggcatgcaagtctattaaaacctctctgccggatgcgcacatcgacatgattcccggcgctgttactgctgaagttcgcaaggcgtgggatgtttttggggtctttaaggaattatgcccggaagctgccgacccggactccggcaagattcttaaggaaaacctgcgttctctcactcatttgcatcatgccttggatgcctgtgtactggggcttattcctgatatcatccctgctcatcataatggtttgctgagacgtgttcttgccatgcgccgaattccggaaaaactgatacctcaagtcaggcctgttgcgaatcagcgtcattacgtcctgaatgatgatggacgcatgatgttgcgtgatctttccgcctctcttaaagaaaatattcgtgaacaattgatggagcagagggtcattcagcatgtccctgcagacatgggcggcgctttactcaaggaaaccatgcagagagtgctttctgttgatggaagcggggaggatgccatggtttctctttccaaaaagaaagatgggaagaaggaaaaaaatcaggtaaaagcaagcaaattggtcggagtgtttccggaaggcccgtcaaaattgaaggctcttaaggcagccatagaaattgatggcaattatggagtggcgttagatcccaagccggtggtgatcagacatattaaggtgtttaagcgaatcatggccctgaaagaacagaacggcggcaagccggtgcgcattttgaaaaaaggcatgttgattcatttaacctcgtctaaagatcccaagcatgcgggtgtatggagaattgaatccatacaggattcaaaaggtggcgtaaaattagatcttcagagagcgcattgcgctgtacctaaaaataagacgcatgaatgtaattggcgtgaagtagatctcatttctttattaaaaaaataccagatgaaaagataccctacttcttatacgggaactccacgataaggcattttacatgtcataccatattctaagcatagatgcctatacatgccatctgagctgcgacaagggccaactcagatgcgcggatggagagaattctccccggacgattccgctggaggatgtgggggctgttgtgctcagttcttttaaggcgacgctcacgagcaatttgctgatagaactggccaggaagagaataggatttgtgctgtgtgaaagctacaggcctgccgtgctgcttctgccagcggatcggtctacggataccggtctgctaagacatctggcggatatgccggcccgtttgcggaaccgcctttggcaaaagactttggatgccaagtgtgggaatcagacggctctggcccaagcatggaatccgcatcatcccgccattgcggagctgaagagaatggccgtgacggaaaagacggcgagggaagcagagtgcgcccgcctgttctggagcgtatttgcggatacatgggcaaactccgattttcgcaggggacgtcatgaggaggggtttaataacctcttcaactatgcgtacgctattctgttgtcttgcatattgcaatatctctttgctctggggctggatccctgcttcggcatttttcatcaatcccgggaacatgcagcgcctttggcttatgatctgatggaacccttcaggcctgcctttgacgccaatgtggcccgttggattcatttgtgcctgcgggaaggaaaaacagaagagagagcaggagaaatcacccgtgagttcaggcaacatattacagccaccttgcaggcttctgtcatgtaccgggataaacagctgccgttgaaagcggcggtagaggccgtttgccgcagtttccgcaaagcagttcttgccggacaatccggaccgtatgaaccatggcttatgacaactataaaatgggctggctagttgtgttctttgatcttcccacaaccacgccggaagataaaaaaaactatcaatatttccgtaaggctcttttagaagacggctatacgatgattcagtatagcgtctatgcccgcgcgtgcgttactcaggaaagaatggctacccactcccgcagaatccagaaaatgataccgcctgatggttctgtccgctgtcttttcgttacgaatatccagtgggataagatgttcgtttttcatggcaggtcttgtccccgacaggaggtttccctgcctcagcagatgctcctctggtaaaaatatcggatgccgtatttttttataagtcgctgaacataaaaataaggcacagtatctattgtactgtgccttattttggattcaaggcaaaacagtcccatgaggcaggggcctgtgcgttgtattgtactgtgccttattttggattcaaggcaaaacactgcaggtcttgttttaaaacgggcagatattgtactgtgccttattttggattcaaggcaaaacaaatgtttggagacacttcgagtgtgttcaattgtactgtgccttattttggattcaaggcaaaacagctctttgtcgggaactggatttattgttattgtactgtgccttattttggattcaaggcaaaacgtaagtcgcaacggattccatatcgtagctattgtactgtgccttattttggattcaaggcaaaacgtttgaccccagcaacgaaaagctggacccattgtactgtgccttattttggattcaaggcaaaacgtcgagggtggagggaaggaaccgggacagattgtactgtgccttattttggattcaaggcaaaaccattaccgtgggcggggtcatgacgtccagattgtactgtgccttattttggattcaaggcaaaaccgtggctcccaatgatacggacacgaagggattgtactgtgccttattttggattcaaggcaaaaccgtctccagtccctcggaaatagtcatcagattgtactgtgccttattttggattcaaggcaaaaccctctacataggcgaaaaggtctgccctctattgtactgtgccttattttggattcaaggcaaaaccatgagactggtagaacgtgatgaatatttattgtactgtgccttattttggattcaaggcaaaacggatgacgcagaccccaccgagatacatgtattgtactgtgccttattttggattcaaggcaaaacgactacgcatacttctccgtcaatccgcaattgtactgtgccttattttggattcaaggcaaaaccctatctagttagtgttttattgttccggattgtactgtgccttattttggattcaaggcaaaaccgcccgctt

SEQ ID NO: 2561 - DNA, 8299 bp, synthetic construct
  source 1..8299: mol_type = other DNA
  misc_feature 1..8299: note = Synthetic
ggaaatggtgccggccttttcagccagttccgtcacgggaatatgcggccccatgatttctgcggtcatgcccggttccgcgtgaggcgcccggctgacgtccacgatgatttgatccatcgtcacgcgcccgagaagggggcaggaaaccccgtccaccatgacgcgggcgcccttatgggccagggaacgcaggtagccgtccgcgtagcctatgcccacggtcgccaccctggtgggatggtccgtcacataggtgcccccgtaggaaatgccgtggccttccggcagcgtgcgcaccaccgtcaggcgggaaaaaagagccatggccggccttaattgagaggcccatggggagtcaatgggggaaaacccgtacagcaccagcccggggcggcacatgttgttggaggggatttcataatccagggaggcggcgctgttggccaggtggcaatacttcaagggcagtttctcccggatgcgggcggccatccgttcaaagagggcgatttgcctgagcgtgatttcccggtcctcgtccgcgcagggcaggtgtgctcccaggccttccggatgcaggctgtccagttctcccaggcgggaaagcagttcttcaagctggtccggcaggaatcctccgcggcccattcccgtatccacggaaaggtggatgggcagcgtctttccgtacagccgcgccagggaattgtaatgctctgcttcctccatggtggaaatgaaggagcgccagccgttcagcacgatttcctcccgttcctccgggaacgcggggcccaggatgtaagggcgggtgcggcagcccgcctggctgatgcgccgggcttcccccacattggccaccccgaagaaagcgatgccttccgaatccagcgtgcggcaaacctgttccagcccgtggccgtaggcgcctgccttcacgacgggcatgtaatattcccctttggccgcctgcttgacgacattcaggttatggcggatggccccgaggtcgatttcggcccaggcgcggggagggctggttgctggcatggttggaaaatggcggaaaggttggaaaaagaggggcgccggacgttcccggcgcaggggattgtccgcctttggccacgcaattccagacggatttttgtcagtctttcgaactttcagaaggtgtaaaaactgccatgtgctgaaacacatggcagtttgataaaaatgcttttgttaccggtgtgactggctggcagtcaggaaaatcggtttgcatttcaaattttgtcttgaatccgttgggaattaaagtgatgttcagatgttttgtcaactgtttttttctgaatggaataatttttaaaatacttgatggaatgcaatattggcatataatatgaattaaagcagtttttttgtgatgtcgcgttctctcactttttcgtttgatattggttacgcctccattgggtgggctgtcattgcttccgtatcccatgatgatgcggatccctctgtttgcggttgcggtacggttctgtttccgaaagatgattgtcaggcatttaaaaggcgtgaatacaggcgtttgagacgcaatatccgctcccggcgtgttcgcattgagcgtatcggcagattgctggttcaggcgcaaatcatcacgccggaaatgaaagaaacttccgggcaccccgctcccttttatttggcgtcagaagcgttaaaagggcatcgaactctcgccccgattgagctttggcatgttctccgctggtatgctcataacagagggtacgacaataatgcctcatggtctaacagcctttcagaagatggcgggaacggtgaggataccgagagagtgaagcatgctcaagatttgatggataaacatgggacggcgaccatggcggaaaccatttgccgggagttgaaactggaagaaggcaaagcggatgctccgatggaggtttcaacgccggcttataaaaatctcaataccgcctttcctcgcttaatcgtggaaaaggaggtacggcgcatattggagctttccgcgcctctgattcctgggctgactgcggagatcatagagttgattgcgcagcatcatcctctgacaacggaacagcgcggcgtgttgcttcagtacgggataaaattggctcggcgttatcgtggaagtcttttgttcgggcagttaatcccccgttttgataaccgcatcatcagctgctgccctgtcacgtgggcgcaggtgtatgaagctgagttgaagaaaggcaattctgagcaaagcgcccgtgaacgggcagaaaaactatccaaggtgcccacggcgaattgcccggaattttatgaataccgcatggcccggattttatgcaatatccgcgcagacggagaacctctttctgcagagatacgcagagaattgatgaatcaggcccgacaggaaggcaagttgaccaaagcctctctggagaaggctatttcttcccgtctgggaaaggagacagagactaatgtaagcaactattttactttgcatcctgacagcgaagaggctctttacctgaaccctgccgtggaagttctgcaaagaagcggcatcgggcaaattctttcgccgtctgtgtatcgaattgccgccaatcgcctgcgtcgcgggaagtccgttactccaaactatttgttgaatttgcttaagtctcgtggggaatctggcgaggcgttggaaaagaaaatagagaaagaatctaaaaagaaagctaaaaagaaagaggcggattatgccgacactccgttaaaacccaaatatgcgacggggcgtgcgccgtatgcccgtaccgtcttgaaaaaagtggtggaagaaattcttgatggagaagatccgacgcgtcctgcccggggggaagcgcatccggatggggaactgaaagcgcatgacggttgcctgtattgcctccttgatacggattcttccgtgaatcaataccagaaagaacgccgtcttgatacgatgaccaacaaccaccttgtccgtcaccgtatgttgattctggatcgcttgctgaaagatttgattcaagatttcgctgacgggcaaaaagacagaatctcccgtatttgcgtagaagttggcaaggagctgacgacgttttccgccatggacagcaaaaagattcagagagaactaactctgcgccagaaaagccatacggatgccgtcaatagattaaaacgggatttgccggggaaagcgctttctgccaacctgatacgcaagtgccgcattgccatggacatgaactgggcatgcccgttcaccggcgcaacgtatggcacgcatgagctggaaaatctggaactggaacatatcgtgccccattctttcaggcagtctaacgcactttcttctctggttcttacctggccgggagtcaacaggatgaaaggtcagcgcaccgggtacgactttgtggagcaggagcaggagaatcctgtgccggataaacccaacctgcatatttgttccctgaataattacagggaattggttgaaaagttggatgacaagaaggggcatgaagatgaccgcaggcgcaaaaagaagcgcaaagccttactgatggtctcataaacatcaatcacaaaatcacgaggccatgaaggaaataggcatgacggaaggcatgatgacgcagagttcccacctgatgaaactggcatgcaagtctattaaaacctctctgccggatgcgcacatcgacatgattcccggcgctgttactgctgaagttcgcaaggcgtgggatgtttttggggtctttaaggaattatgcccggaagctgccgacccggactccggcaagattcttaaggaaaacctgcgttctctcactcatttgcatcatgccttggatgcctgtgtactggggcttattcctgatatcatccctgctcatcataatggtttgctgagacgtgttcttgccatgcgccgaattccggaaaaactgatacctcaagtcaggcctgttgcgaatcagcgtcattacgtcctgaatgatgatggacgcatgatgttgcgtgatctttccgcctctcttaaagaaaatattcgtgaacaattgatggagcagagggtcattcagcatgtccctgcagacatgggcggcgctttactcaaggaaaccatgcagagagtgctttctgttgatggaagcggggaggatgccatggtttctctttccaaaaagaaagatgggaagaaggaaaaaaatcaggtaaaagcaagcaaattggtcggagtgtttccggaaggcccgtcaaaattgaaggctcttaaggcagccatagaaattgatggcaattatggagtggcgttagatcccaagccggtggtgatcagacatattaaggtgtttaagcgaatcatggccctgaaagaacagaacggcggcaagccggtgcgcattttgaaaaaaggcatgttgattcatttaacctcgtctaaagatcccaagcatgcgggtgtatggagaattgaatccatacaggattcaaaaggtggcgtaaaattagatcttcagagagcgcattgcgctgtacctaaaaataagacgcatgaatgtaattggcgtgaagtagatctcatttctttattaaaaaaataccagatgaaaagataccctacttcttatacgggaactccacgataaggcattttacatgtcataccatattctaagcatagatgcctatacatgccatctgagctgcgacaagggccaactcagatgcgcggatggagagaattctccccggacgattccgctggaggatgtgggggctgttgtgctcagttcttttaaggcgacgctcacgagcaatttgctgatagaactggccaggaagagaataggatttgtgctgtgtgaaagctacaggcctgccgtgctgcttctgccagcggatcggtctacggataccggtctgctaagacatctggcggatatgccggcccgtttgcggaaccgcctttggcaaaagactttggatgccaagtgtgggaatcagacggctctggcccaagcatggaatccgcatcatcccgccattgcggagctgaagagaatggccgtgacggaaaagacggcgagggaagcagagtgcgcccgcctgttctggagcgtatttgcggatacatgggcaaactccgattttcgcaggggacgtcatgaggaggggtttaataacctcttcaactatgcgtacgctattctgttgtcttgcatattgcaatatctctttgctctggggctggatccctgcttcggcatttttcatcaatcccgggaacatgcagcgcctttggcttatgatctgatggaacccttcaggcctgcctttgacgccaatgtggcccgttggattcatttgtgcctgcgggaaggaaaaacagaagagagagcaggagaaatcacccgtgagttcaggcaacatattacagccaccttgcaggcttctgtcatgtaccgggataaacagctgccgttgaaagcggcggtagaggccgtttgccgcagtttccgcaaagcagttcttgccggacaatccggaccgtatgaaccatggcttatgacaactataaaatgggctggctagttgtgttctttgatcttcccacaaccacgccggaagataaaaaaaactatcaatatttccgtaaggctcttttagaagacggctatacgatgattcagtatagcgtctatgcccgcgcgtgcgttactcaggaaagaatggctacccactcccgcagaatccagaaaatgataccgcctgatggttctgtccgctgtcttttcgttacgaatatccagtgggataagatgttcgtttttcatggcaggtcttgtccccgacaggaggtttccctgcctcagcagatgctcctctggtaaaaatatcggatgccgtatttttttataagtcgctgaacataaaaataaggcacagtatctattgtactgtgccttattttggattcaaggcaaaactgcggcggtgcttgccgcctcgcggcctttattgtactgtgccttattttggattcaaggcaaaactcgtcctgtttgccgaaacaatcgcacacgattgtactgtgccttattttggattcaaggcaaaaccgccgtagacgggggcaatgaggatgacgtattgtactgtgccttattttggattcaaggcaaaactattttctttctattgttttattgttccagattgtactgtgccttattttggattcaaggcaaaacgcctgtgtaaatcagattgcggcacttatcattgtactgtgccttattttggattcaaggcaaaacgaagcgcaagtagcacatcaccccggagggattgtactgtgccttattttggattcaaggcaaaacaaccccatgcgaagcacctaccgatgatgaattgtactgtgccttattttggattcaaggcaaaacaaatgcgcctccggtctgatggagcaggggattgctccgcctttggccacgcaattccagacggatttttgtcagtctttctttaacggaacgggagaaacaaagctgtgcgtccagaacatggcgccggttgcggaggtgatgccctccatattaagatagcgggccagcagcagggagggggaggagtgtcccatctccttctggagaaggttttgattgcagaaatgggccaggtggtaggaggcgtaggtatgtctcagcacgtcctgaacccatccgctttttttcaggatgccggaccggcgccttacttccctccatttcttttcccagttgggcgggcagacggaacgggcgggggaaccggcggaagacatccggctgaggatggaacccagcacgggaaggatggaaacatggcggctccctcccgttttggtatgggtgggcgccagtgaaaccaggccggatttcagattgatatgcttccacgtcagccttttgacctcgtgggggcgtatgcccgcgtacagcatcagggcgcaggccggcaggcatgctccgtggaacaactgttccgcggtgtggagaagccgttttgcctcgtacagggaaagggccctgatgcgtttttccctgaggatagggggaggaaccagaaaggccgcgtttctgcggcaccacccgcgcttcaggtaaaaattcaggatgccgctcaggatcagccgccccttgtgccgctggcggggagtggaaaagcttttgcggagataacgctcgcaatcttccggcgtgatggaacggacctgttttcttgccagttccgggcattttttcatcatccgggcagccatatagcggatttcctgcagggtgcggggccggcggtgtttccttgcttccaggctggcgcggacagcctgggaaaacggcacgcttgtttccctgtcggcaagagcctctcctcccagccgtatgcatcgtttggcccgggttattctgtcgcctcttccgcggctggtgtccaggaggtcctttagaagaaggaaagcgtccatgggaggaatgcccagggaacggatgaggaggattcctgtctgatccgtgtcggtggggaaagaggaagtcggtatgttcatgaagaacgttgtagcagaggattcccaatccgtacacaagtctaaaatgtgatgataacagctataaagatcaaacaggaacggaaaaggaaatgaaagatgataaacaatgattcataaaaatatgttagatttttttctacattattcgatataaatgtacggattgggaatccgttagaacaggcaaaaaatgaatgtttttatttccttattaatcatatttggaacagtctttctggtgggagaacatgttttggctcgaactttggaaacgggaagagcgggtggctattacactcattccgggaaaggggatagaagcgccagagccaggtttgaacggttcaaaagcagaaaaacgcctacaactagaaccagcataaccccgatttccgtttcagaccaatatgggaacaggtatcgtggggatttaattaccagcacttatgacccttcagccaaagccagggcgggagctgccgcctgggataaacgtcaaagcgccaaagccaagacaatcatcaaccaggcggaacatgaagcccagtcaaaaattgccagggaagaagaagctcaggtctttcgcgcatctctgtcacgccttcaggaagccgtaaaacagggaag

SEQ ID NO: 2562 - DNA, 18148 bp, synthetic construct
  source 1..18148: mol_type = other DNA
  misc_feature 1..18148: note = Synthetic
cgcgagccgccgtccgatcggttccgccgctccgcgcccttttcccatccttacgttgacagtaaatatccatagcaccgcccgggccggataagcaagcgattttttgtatccaaaataaaaatctttggcgggttcgaccattcgtttattgattgcttgttggcttggtgtgaaggtcaaaatcgaggatatacctcggctaagcgctttcatcggccggaatcaacgcgcctccctctgatcagttacggcttttggaaaagttggtctggttgctttctttatccaaatgtgtacacttttcagcccaaggggtcggctgccagtcgcgcaggcagccgatccgtatttaaaacgaacaagggaggcgtcctcgtgaaacgaactttactatcgctgatcgctctgtcattgctgttgtttgccgccgccgctcaggccgattttttcggcgaacggacctacctccgcatcgaagcgccgagcgtcgaagatcgcacggtattggccaatcttggtttctcgatcgattacgtgaatctcgaagaaggatacctcaccgcctgggtgccgaacgatctgcttcccaaaatcaaggaacttggctttttgtatgaaagtccggtggtggataccaaggatttccccgccaattacgcgccctatcacaactacaacgaacaactgaccgccttgcaggatttgaatacgcagcatcccgaaatcacggacctgttcactttcggacaaaccgtggaaggccggaatctctggtgtctgaagatcagcgccaacccgctgcaggatgacccgtcgctgccggcggtggtgattgtcgccgagcaccatgcgcgggaaatactcactccggaagtggccttgtacacggcgacccagctcgtcgaaggttacgggaccgatgagaagatgaccgcatacgtggacaatcacgagatttacgtgatcacgaccctcaatcccgacggcagccttttcgacattcaaggcggatcgtttcacatgtggcggaaaaatcgccaggtcaacgccggatcggcctgcctgggcgtcgatctgaaccgcaattacggttacaaatggggcggcgtcggttcctccgggatggcttgcgccgacacctatcacggcaccgcggcgttctcggaaccggagacggccgcgttgcgggatctggtcaacgcgcatgccaatatcaccacgatcctctcgttgcactcgcacgccaaactcgttttatatccgttcggctacacgtacgaacacatcgccgatcaaatcgactattacacccacaaaaccctggccgaatacatggccgccgaaacgaagttcacgccgacccaatcctccggcctgtacctgaccaccggcgatacgatggattgggcttacggcgtcaagggaatcatcagcttcacgttcgaactcggcccgagccagttggatgtgacgggcttttatccgaaaccctcgttcatcgaaccgtcctgccaggcggcgttcaatgcgatcgatgtcctgatcggtttctccagcgagccttcctacgtcctggccaccaatgtctggaaattcaccgccgaatacaaagccccggatgccgcggttctgaaatgggcgtccgtgcgcgaaacccggccgcaaggctggaaggtgttgcgcgccgaaaccgaagacggcgattaccaggccgtcaacgacggtttcatccagccgaaccaggcggcctatgaatataccgacgagggattggaagccggccagacctactactatctcttgcactacgagggcaccggccagaacgacgtcgatttcggcccggtgtcggtggaagtgcccggcgcggatgacgacgacgcctcgcccgccgacgacgatgacaacgacgacaacgattccgccgacagcggaaccgcggatgacgacgacaacgacgacgaaggcggttgcggctgctaaaaacgcttgatttggcggagtcgggttggactgcatagggcttacccggctccgtttctttatttaatggcgcccgctacaatacctaaaaacccaaaacggcgggcgaaaccttggacgatacggcggccaaacgcgcattcggctgggagacggcgttgcttttgctggggctcgccgccggcctgggatggctcgcctggtacggcggacagcttccgtccgggtgggacgccgacgcgaccggccgtgtggaggcggcgatccggtgggcgcggggtgacggccagccgccttttacacagggcccggtgcactttcttctgctgcggttggcgctgaccgccggcgtccccggaccgcaactccgcatcgtcgatctcggttgcgcggcgctgtttctctggttgttttttgccgtcaatcgcgcgctcttcgggccggcgatcgccggcggcgcgacgatcgcgctgccgcttcacccgttcttcgccaaactggccgccgcgacgaccggcttcatgccgtttttcgcgctgctctggctgggcttttggctactgatcccgtattggcgaaacgacggggacgacaggaaaatcggccgggcgttcgcggccggcgtggccctcggcgcggcgacgctgacgcgctttgaagggttgttcgtcgtggcgtgtctcggcgcggcgtttctaggatcgcgccgctggaaaccggcgctgtcagtattcgccggattcgcggcactggcgggggccgttttcgcgtccacctatttttcactcgccgacttccttcgcggcggtttctattacaccgtccatcccgaaccggtgccgccgccgcattgggcggtttttccggcgtatttggccggtgcgctcgggatcgtgccgttgctgggaggattggccggaacctggtcggcggtgaaggaaaaatcgcggcgcgccctggcgggtttgttgtggctctatctggcgatggtttacggctattacctcgccggccggctggactgccattggtcgcgctattattcgctgctgttgccgctgttgctgccgtttttcggcgcggcggtcgcgcgggcgttgcccgcggaaaagccgcttcggcgcggcgccgtgatcgtggccgcgttcctgatctgcgccggtttttatttcgtcgcggccggtcaggaactgtatgtgctgcaaaccatcggtgggaaataaccccatgacgcggccgcaaaccatcttctcgaactgggcggcgcgggcggcgctgatcctcgccgcgctgattctctccttcgtgctgtatccgttcgcgcgcgtccggccgttcaacgagcggatgatcctcgccgccgggatcgccgacccgcgcgctcggttggcggcttacgccacgctcgccgccgacgatcggttgcgcgcggtcgatcgcttcgatgccgccgccgccgccgcgcgccaggccaaggaactgggcgaccggccggcagcccgtcactggttggaagcggcattggcccagccggggacgaatccggattttcgggagaacgtcgagctggaatacgcggatttgctgatcgcgctaaaggaatgggacgaggcgcgggcgcggctggattcgctgatcgggcggacgccggacccgcaacgccgccgcacggcgcaaggtctgctggtcgccgttttacggcaaagcggccgggtcgatgaagccgcgcgcttgctggaggaattgaccggggatcccgcggcggccgatcggctgtcgtggcggattcaattgatcgaatgctgggcggaactcgggcggcgcgacgcggccctggagttgctgcgggaagcgcgggccgacaccacggcgaatgactcggcgatccgcgcggcgctcgacgcagtctgccggcgactggattgtccgccggcagaataaatcgagggccggttccagcggaagcgcaacaaaacgcttgcagttcatttacgtcgcgatatgattcgcccgaggattctccgcaaacaccgaaaatcacggagtcgtgggatgatcaaggtctcgaaatggttttatggcggcggaacgggcgtttttctgttgttggcggcgatctcccgcatcaccgggtcggccgccggccggggaaagacgggcctgtcgcagttgttacttttcatcgccatgttgttcggactggcgctctttcacaaagcctggttggcgattcaggacggcttcgcccgcaccacgccgggccgcgcggtcggttattcgttcatcccgattttcaacctctactggatgttcgtggtcatggtcggttttgccgccgactacaattccttcatcgaacgcaaaaagctggaccgccgcccgctgtcggcctggcttttctgggcgctggccgtcacctgggcgctgtcgtggctcccgcgcctgccggtcggcggcctcatcattctcctgacgatgatcctgcaagtctgggccgtatttaaaatcgccgccgccgtcgacggcctgccgattcccgaaccgctgcccgagcccgccgccgaaccgcaacccggcccggcgcccgcggccgagggcggagaagtcaagcaaggcgaggccgcgccgccaaccgaatagcggcgacttcatactattcaatgtgccattaaatcggtcgccccgccggaaggcggggcggagcctacggtcggcccttgcgggccttgttgcgataagatccctgaaacggaatggttacaagtcatctatacacattattcattttgcttgtcaatcattttatttcagaattaatatgatttttttataaatcaccatttcactaataggtgaaaaacttctttttaattttccattaaaataggccttttttattcgaatcaattcctctatcctatttattctttccactatttttcaggagttagggaaatgaagtatattcttgggattgatttaggtgaaagctctttgggttgggcggtcatccggattgaaaaggatgccccaagggaattggtggatgctggggtccgagtttttccggccggcgcggaaatcgaagccaagaaaattgatttgaaaacaaaaaacgcggaacggcggaccagtcgcggtagccgtcgggtaaaagaacgccgggctcggcgaaaaacgaaggtattgcatctcctgcagaggatgaatctgttacccaaggacgaagcggaacttcgccaggtctttaatctcgatccttatctttgtcgcgcccgggccttggatgaaaaactggcgccgttcgaattgggacgggccttttaccatttggcgcagcggcgtggtttcaaatccaatcggaaaagcgaaaaggaaaaaaaagacagcggagatatcgccaaggcaatcggcgcgttgaccgccgacatggccacggcgaaaagccggacagtcggcgagtatttcagtttgcgtgccagggaaccctttttattggcgacggcgcaagtcccgcgcattcgcaaacaacatacctgccggagcatgtacgaggaagaattcgcttcgatctgggagaggcaagcgaaatttcacgccgatctgttgacgcccgagcgacaggaagaccttcgtcaagccatcttttttcaacggccgttcgaagtaaccgaggaaagacggcaggccctaccgccgcgcgccaacgctttgcgcgcgccgcaattagccgactgttcgttgattcccggtgaaaaacggtgtgccgtgggttcgtggatcgcacagcagttccgtctcctcaaagaggtcaacaatctgcgcctcaataacaatcgcggcgaatcgcgcgccttgaccgtcgaagagcgcgaaaaaattcttcaccagttgagccgccaaaaggaaatgaagttcaccaagatgagaaaaatgcttggcgtaccggatggctggaccttcaatctcgaagccgcgaagcggctcgctatgaagggtaatctagtggacgccgcgctgatcaaagcttttagcgaggatcattggcaagccttgcgagaggaagatcgcgaacttctgcgacggatcattgtcgaggaggaagacccgggaaagctggccgattgcctccgcgcttttccgcttgaacccgaaaaaatcgccgatctgcaaggcttttccgccccggacggctatctgcgtttctccgcgaaggcgatggaaatattattgccctacctggaagccgggttgatcgagaccgacgccattgacgaggcgaaaaaggacggcaagctgcaaacgaccgagaatgatcaagtccacgatttactgcccaagccgcccaccggcatcaccaatccactcgtcaggcggtgccttaccgaaacccgccgggtggtcaatgccttgatccgcgaatacggcaaacccgagcgcatcgtggtggaactcgcccggcaattgaaaatgaaccgcgacgaccgcgaccatgccgtcaccctcaatcgcgacaacgaggcgcgaaacaagattgccgaggattggtacaaggatcacggccgcgccaatccgaaaaacgaggataagttgcgcttccgcctgtggcaggatcaacattggcaatgcccctataccggcaaggcgatcggcgccgccgatttgctgtcaattgccaatgtcgtcgaagtcgatcacatcctgccgttttcgcgcagcctggataacggctacgagaacaaggtgctcgctttcaccgaggccaaccgcgaaaagggtaatcgcacgcccttcgaatggaagaatgggccggatggcgaagcgttccaggaaatgatcgtccgcatttccgaaatgagtttttcgcacggcaagaaaaaacggttcagccaggccgagctggacgccgatgaggccatcgatcgccgtttggtcgatacgcaatacgccagccgcgaattggccgattacctgaatctgctttatcccaaggaattacgcgtcggccagcgtgccgtcttgaccacgccgggaagggtcacggcgatcctgcgccgccgttggggcctcaatctcgtgctgggttacgacgacggcgaaaaaaatcgcgaggaccatcggcaccacgcggtggacgccgtggtcatcggttgcaccagccgcaaggcgatcaaggccctgtccgatgccgtccggcgcgatgacgatccgcaccaggtgccgttgttgccgccttgggaaggcttcagggagaatgtcgtcgaggtcatctgccgccgcgaacgcgtttggcaaattggtgagcgggaaataaaaactacaggtttattagtctcacatgttgctaacacaagtatctcgggcctatttcataaattaacaaattatggaccgactagtgattcgaaagaaattgcctatcgtgttaaagttaatgaactgactggggcaatggtagaggaaataccaaatgataatataaaaaaaataatactcgatcatattagaaggaatgggggtgacccaaaccaaaagggtttgtttccgaaaaaaatttgggaaacttgtcctcaactgccaatatcggaaaaaaagcggctgaagaatccggcgcttccggagtccattccaataagaaaagtaagaatacatcaaagtatttcatcggaagatatggtgtatccattgaaaaaaaatattaaggattccagaaaagacctgcttcatgagccggtgacaaaaccgtatcgagtcgtaaaacctgggaataatcatgaaatgtcgttttttgaaaaacaaacgaaaaacggcaaggccgtctggacatttcgtgtaacaacaacgatggaggcggctcgaagaaaattaaataatgaaccaattggcagcccgattcaggaaaacgatgggaaactggtcatgtcattgcaaatcaatgagatgatagttgttgaacatgagaatgagcagttgcttttacgtgtgcaaaaaatttgccaggacggacggatagattttcggcaccacgtttttgcaggcactccaagtgaaagtcacaaacctccgattcattttcaagtaaaaagcgaagcacttcgaaaaagaaatgcggtaaaagtcatggttgatccattgggccgattactgccgttcaatgattaaacgcactgtcgaggccggttggcgctgcacccacgtgaaaacgcgggacaagcagatcgtcttttgcgccgaggcggaggaaacgggcgcggtgcccagcgaggacatcggcctgttgatcctggattcgttgcggatgacctgcactcagcgcgccctggcgcaagtgctggccgacggcggggcggtattggtttgcggcgaggatcatttgccggccgggctcttgctgccgctggagggcaacgaactgttgaccgaacggctccggacgcagatcgccgccggcaagccgcaggccaagcaactctggcggcagatcgtgcaagccaagctgcgcgcccaggctgggttgttgccgtgggaaagcgcggcgcggttgcggctggcgcgactttcccaaacggtcaaatcgggcgacgaggaaaataccgaggcccagggcgcccggttttactggccggaactcttcggcgccgatttccgccgcgaccgcgagggcgcgccgcccaacaacctgctgaacttcggctacatgaccctgcgcgcggctatggcgcgtgccgtcgtcggggccgggctgcacccggcgatcggcctgcaccaccgcaatcggcaaaacgcgttttgcctcgccgacgacctgctcgaaccctaccggccgttggtcgacgcgcgggtgcatcaattgtggcttcaaggggtcatggaactcgataaggaaagcaaggcgagtctgttgcggattttgggtgagccgatccgcctggaaagcggccaggggccggtgcaagtggcgatgcagaaaaccgccgcctcgctcgccgcctgtctggcgggcgagcggcgcaagttggatcttccggcgtcatgatcgtcagcggataccgtaccatgtgggtgatggtgttgttcgatttgccgaccgacagcaaaaaggcgcggcgggagtacacgcgttttcgttcgcgcttgaagaaggacggcttcaccatgttgcaatattcggtgtacggccgcgcctgcccgagcgaggaaaacgccgtggtgcacgaaaaccgcgtgcagaaaaatctgccgccggccggacaggtgagggtgctcaccctgaccgataaacaattcacgcggatgcggatctactacgggaaaaaacgggagaaaaatgaaaaagcagccgaacaactatcgtttttttaaacctatattgcctttaacccgccaaaatcacccctgttttagtgtcgtctagtgtaaccgttccgaatcagagatcaaaccgcaactgccgttgacgattcccgacataggccggcagtgtaaccgttccgaatcagagatcaaaccgcaacgagtcgacttagcgaagccgcgcggtgctgagtgtaaccgttccgaatcagagatcaaaccgcaaccaacgcccccacggattgcgaggtaatttagtgtaaccgttccgaatcagagatcaaaccgcaaccgtttcgcatgttgctactcggcggtgtgtagtgtaaccgttccgaatcagagatcaaaccgcaacacatccagttaattgtcgtcggcaccatcaagtgtaaccgttccgaatcagagatcaaaccgcaacaacagttattgaatctcccggaatatattaagtgtaaccgttccgaatcagagatcaaaccgcaacggattgaccgtgaacgacacggtttcgagagtgtaaccgttccgaatcagagatcaaaccgcaacggccggggaagtgaccgacgaactgtatttagtgtaaccgttccgaatcagagatcaaaccgcaacaatcgttggtcgtcggcggcgcggcgtcttagtgtaaccgttccgaatcagagatcaaaccgcaacgttacaatgcgatcgacacctggcgccggcagtgtaaccgttccgaatcagagatcaaaccgcaaccattcccctcctgtttctattttattcgcagtgtaaccgttccgaatcagagatcaaaccgcaactcgatgttgcaatagtcgtcgtcctgtagaagtgtaaccgttccgaatcagagatcaaaccgcaactgcaaatcaacaaataaggagagaggtccaagtgtaaccgttccgaatcagagatcaaaccgcaacaggctcatcaaaaccggccgggtgaaacagagtgtaaccgttccgaatcagagatcaaaccgcaactcctggcggcgatggccgcccaggcaatggagtgtaaccgttccgaatcagagatcaaaccgcaacgagaggggtcgagcggtgcgaaccggacggagtgtaaccgttccgaatcagagatcaaaccgcaacactggaatattccgaacgcgacgccgccgagtgtaaccgttccgaatcagagatcaaaccgcaaccggtcgatctgatttgcttctcgatctggtagtgtaaccgttccgaatcagagatcaaaccgcaaccccggccggcgctctcgcgatatgcgattgagtgtaaccgttccgaatcagagatcaaaccgcaaccagcttgaactacctgttccgctgtaaattagtgtaaccgttccgaatcagagatcaaaccgcaaccgcggcgctttgtggccggcgaattcgtccagtgtaaccgttccgaatcagagatcaaaccgcaacggcgtcgccatgtacgcccgctgatattccagtgtaaccgttccgaatcagagatcaaaccgcaacatggcgactcaagagaagcgatgtacgcatagtgtaaccgttccgaatcagagatcaaaccgcaacaatcatgtgcccttaccgtctgataacgcagtgtaaccgttccgaatcagagatcaaaccgcaacccggctgaaattttctatgagttttgaaacagtgaaacggaaaaacctgggggggaaggtattttgcaaacgcggcggggaggaatccccgccgcgcgcattttgaaatgggcctttcggttcagcagccgcaggagccgctgtcctcgtcgtcgtcgcccgcgttgggaagcggcgagtcgtcgtcgggcagcaccacgtcgtcgttgtcgtcgttatcgttgtcgtcatcgtcgtcgtccgccgaatcgtcgtcgacgggcgcggtgtcgtcatcgtcgtcgccgggcagggcatcggccttgatgtagtcggttttcagggccgcatcggtgccgccgggcgcggtgacggtcagggtcaccgagtaaatccccgccgtttcgtaggtgtgctgcggattcttttccgtcgaggtgccgccgtcgccgaagtcccattcgtaggcggtgatttcgcagccgccgaaatcggccgaggcgtcggcgaactgcacggtgagggggatgtatcccgctttcggtacggcggtgaagtcggcgaccggctcgccgcagaagatctcgaagccgtcttcgatggtcgcggcgccgtagggcgtttcgacgaccacgtcccagtcgccgggccgctcgtttttcaggttgaagacggccgtcgcggcggtcgtgtcggtcagttcgacgccgctcgccacgatgtcccactcgccgtcgcgcttcaggctgacggtcatgtcgagggtgaaatagttgccggacagttcgaccgcgaacgcggtttcgtcgttgccgccgctggcgggggcgatcgaggtcagttccggcgacagcgtggtgacggtgaaggcgttttccagggtggtcgtgccggcctggttggaaacctgcagggcgtaaacgcccggcagcacgccggccagttcgaagtcgcaggtcagggattgcccggagaggacggttacgttttcgcccgcgatcgtcaccttgctgtcgggccgcaccaaggccacctcgctggcggcttcgaagcggtcgccggtgacggcggcgccggtcagcgggccggtgttgggcgcgttgtccggatcgatggccgcgacggccggcggatcgagcacgaagacgaatttcacgtccttggcggtgctgtcgtaatagacgaagtacggatgggcgtcgccgtcgagcgccaggccgacgaacaggcccgtgacgccggtttcgtcgatgaccgagatatcccagccgtcaggggtttccaccgcgtaattgaggcggtcggcgccgtaatacgccaggtgcagcgcgtcgttgccgtcgacagccacgctggtgtattggccgaaattgcccgcgccgcattcgacgttttccagcgcccagtcgccggcgaccttcgaaatgatgcaggcgcattcgtcgccgatcgtctcggtgttgtaagagctgatgaagacgttgtcgccgctgtccagggcgagcgagggctgttcgccggcctgttcccaatcgagggcgatttcgaagtgccagccgccgccgtccagccagccgaatttctggtaaccgaggatgtcgtcgcggtaggcgatctgcggccggttcgcggtggacatggcgatcgccgtatggcggccgaagttggtgacgccggcggtgctgaggatcacgtcgaggtcgtggatggaccaggtattgggagcggtgcgccaggcgacgcgcgttcccatgttttcgaaccacgattcgtcgaagtgataggaaatgtacggcgttccgtcggcgttgaacgtcaggtcgcagtagtcgccgatgtagccgtcgtcctcgttctcgtcgatcacctcgatgttccagtcgtcgccgtcccaataggcatagcgcaggcggccgccctcctggtcgtagtaggcgatcgccggatagtcgttgaccgggttgatcgcgatttgggcgtagtcgccgcgattgccgctatcgacatcgctgacgtgccagccggcgaaatcgcggtagccgtagcggagcttgccgttcgaggcgtcatagaaggcgacgtgcggcgtgttggcgctgtccagggccaacgaggaatactgcccctgatcgccggtgctggcgacggtttcgtatatccaggcggcgcgcgccggagtggaaaaaacgaggacgcccgtcaggaaggttaaaaacaacacgaaaaagggcagccgaccggtgaaattcatgttggttatcctccatgggttgggttgaaagcgcgaaccgcttcaccatggcaaaattccgataaaaattcaaccggtttgcggcgattgtatctcggcggaaaaatcattaaaacaaccgtgaaccctaacgccaacggcaagcgaggcccgtttcgatgaaagccatccgcattgcgatcgtcttgctacttttcggctcgttttgggcactctcgtccggctgcggcatgccgcgggtcgagttgaaaccggagggccagccgccgacgctcgagcaggcattgaaaaatttcgcctacgaaaagaagccgttcgacgtgcaaatgcagttcatggaggatcggccgggttacgagatttttcgcgtcacctttccgtcctatttccaggatcagctcgacgccaaggaagtggtcgcctggtattatcgcgtcaaggatccgcaccggcgcgccggcatcatccaggttcccatcctgggcggcgattattccgaatcgatctggttcgccgagttttacgcccgcgagggcttccacgtgttgcgcttcgaacgcaaggccgagttgttcgagcccgataccggcctgccgaaaacccggacggtgctaatcggcacggtggtcgacatgcaacggggcctcgactggtgggaaacgctgcccgagatcgacgcgaaacgcatcggcgtcagcgggatttcgatgggcggttttttctccagcatgttgctggcggtcgacgaccggccggcggcggcggttctgatgctcaacgggggcaatctggcgaaactgatcgtgatcagccaggaagaggaagtcgtcctggtgcgcaacgcctataaaaagcggaccggctgggacgaccaggcattttatcgcgaggcctacaaagccaccgccgacctggatccggcggtgttggcgccgcgcctggacccgaaaaagatccttttcgtttcgccgcgcttcgatcaggtcgtgccgtgggaattgtcgagcctgtggtggaacgccgcgcatcagccccggcggatcgtcatcccgaccgggcactattcgtcggtcttcttcattttctatatccagaagcaggccgtcgaacacttccgccggcaattcggctatccggtacaacaataaaaaacccgggaagcggggtgctttccgggttttgtagatctgcggggactcgaaccccgaaccaacggattaagagtccgctgctctaccgattgagctacagatccgttccgccgcgcatcatacagagacgcgactttctgtcaagcggaaaatggcccggccggttcccggcgcggccgcgggagattttgccggccgccggtcgggtgatggttgttttcccgccgggcgttttcgattaatgtagagccgattcggacatttccccgaccgcggaaaggatgagaccggatgaaaaaagccatcgttgtcgcctgctggctgttggcggtgctttgcctgccgctgctggcgcagacccgcgaggaagaggccgagctgcccgattaccaggggccggatatgacgctgacccccgacaagctgttcggcgcctacaccttctggcaacaaaccgacgcgggctacgagtatggttttctggaattccgccacgaccatacctggacctgggtgattcatctggatcgcgatcgcgaccggctgtcggatcagtacgaggtccggcggggcgagtacgcgatcggccgccgcgacgacggggccgtcggggtctggctggcgggcgagggcgtcgccaaaaccttcgccgccgatttgcggatcgtcggcggccgggcgcagacgttgcggatcttcgaccggcagttcacccgccgtcaaccgggcggcacctatttcgtgctcgacaacgatctgccggatctcgccaaggaattgcggatcgaatcggcgcccgccggcgccgccgttttcatcgacaatcagcaactcgccgatgccacgccgctttccgtcaaaaagccgcgcgccaatgctcccctggaagtgcgggtcgtcaaacccggctaccagcccgtgcagaaggtggtaacgctggcgaaagaccagaccgaaatcctgacctttaccctggtgcagggcgaggcgggattgcgcgtgaccagcctgccgcgcgtctacgtcaaattggacggcaaagtcctggggtccacgccggtgaccaaggaggaaatccccgccggccaacaccaactcgaattgatcaacgaaacgctgggtatccatcaccacgaggaaatcgtgctggccaagggcgaggtctggaagaagaacttccgcttcaccggcaaggtgcggatcgacgtcggccggcactgcacgatctaccggcaggggaaaaaagtcggcgaaacgccgttcgatgccgaggtgccggtcggccgccacgtgctggttctggtcgacgaccgcggcgaacgccggcaactgctgatcgaggtcgagcagggtagtgagtcgcggatcgaaaaaacgtttgactcgcttccgaaagcggattattagtctgtccgaaaatcggccgggttcggccgattcgccgcaccgtgtttcatgcatcgaggttcgggaaaggaggggtggccatgccggtaaaatttcgcgaggccgagcgcacgtattttccggatagttggggcaatggctacttttcgatcaacaacaagggccacgtccaggtcgatgtgaacgcggacggccatcagcggctggacttgtacgatctggtggaccaggtacagaacaagggcctgaccccgccgtacctgttccgctttccgcagatcctcgaacaccgcatcgaaatgctgcacacggccttcgccaacgccattcaggaattccaatacccgagccattatcagggcgtttttccgatgaaggtgaaccatcgacgcgaagtgatggaaaccattctgaaggtcggccggcggttcaattacggcatcgaggtcggctccaagcccgaggtttacgtcggcctggccctgccgttcagcgagtcagccctgttcgtctgcaacgggttcaaagacgacgactacctgaccgtggcgatggacgccaagcggatgggccgcaacgtgatcgtcatcatcgaatcggttcccgaggcgcatcgcgcgctggccatcgcggagcgcgaggacgtgacggtctcgctgggcatgcgcgtccgcctggacgcgcggggcagcggccgctgggaggaatcgggcggcgtgcaaagcaagttcgggctgtccacggcggaggtgctggagatcatccgcatcctcgacgaggcggacaagatcgattcgctcgagatgctgcatttccatgccggcagccagatcaccgagatcaaacgcatcaagaacatgatcaaggaagcgtcgcgggtctacgccaagctgaagaagaaggtgccttccttgaaatacctgaacgtcggcggtgggctcggtgtcgattacgacggctcgaagaccagcagcgacgcctcgatgaactactcgatccaggaatacgccaacgacgtggtctataccgtcatggacgtctgttccactgaaaacatcgagccgccggtcctggtatccgaatccggccgttcggtgacggcccaccatgcggtcgccgtggtcaacgtgcaccgggcgcccgagaccatcatcgatcccgaaaagctggccgtgaccgacgacgacccgcaggtcattcacgagctgtacgacatctgggacaacatctcgcagaagaactaccgcgagtattatcacgacgcgctcgaacatcgcgacgaactgacctcgctgttcaacctggggttcatcgagctggaagaccgggcgcgcggcgaggcctggtttctggacatctgcctcaaggctgtgcggttcgccaagcgcgagcgggggccgctccgcgaggaattcgacgacctgcagcgcgatctggcctatcgcttcatctgcaatttttcggtcttccaatcgatgcccgacgcctgggccatcgagcagttgtttccgatcatgccgatccaccgcctggacgaaacgcccgacaccggcgcgattctctgcgacatcacctgcgactcggacggcgtgatcgatcatttcatcgacgtgcacgacgaacgccgcttcctggaattgcacaaaaccggcaagggcctttactggatcggctttttcctcgtcggtgcgtaccaggacatcatcggcgatttccacaacctgttcggcaaggtcaacgaggtcatcgtggtggtcggcgacgacgggcgggcgcacgtccagaaaatcgtccgcggcgacaccatccgcgaatcgatcagcttcgtgcgctacgaccccgacgaattggagcgcaattattcgatcgaactcgagcgcaagctgaaggaagaaaagctgacgcccgccgaggccaaacggatgaaagcgtcgttcacccgcggcttgtcgggcacgacctacctgattccgttggtggaaaacggcaaacggaccggaaaaaagccgaaaaaatgaccgttgacggccggatgggatcacgatatagtccaaaccttggaacgtttatcatctggcattcaggagacgatttcgattcttcagactaatcccaaacaggtggagcgactctcatgattatcggcgtacccaaggaaattaaaacggaagaaaagcgggtggcgatcaccccggccggcgtgtcggccttgaacgcgcacggtcaccaaatctacatcgagaagaacgccggcgtcggtagcggcatcaccgacgaagagtacaaggcggccggcgccacgatcttgcccaaagccgcggaagtctggggcaaggccgaaatgatc

SEQ ID NO: 2563 - DNA, 15301 bp, synthetic construct
  source 1..15301: mol_type = other DNA
  misc_feature 1..15301: note = Synthetic
attaaagaatggtgggaagaacaggattcgaacctatgtagcccgaaggcgacagatttacagtctgttgcttttgaccgctcagccatcttcccaacgatggatatataatactgatttttggtataaagtcaagataattttacttaaatttatatgatttatataatgaattcatttctgtcggtgtcatattgcggtgaaaggcatcaatatcattgtatttatttttatcaatttcttcccaaccagtaattgtattataaagtttatatgcctctggcaaatgtttatttttttgaagttgttcaacaattgatttcggataagtgattcctaaataagcaggaagcccataaattccaccaaaaacacatactgctccacttacccatggaagcccacgaacagcaagttttacacctgcacttatttgtttatgattgtttgcagcaaagcctaaaaatccttcaagtaaacccataataactccttgtttttctttaactttaacacaaaatagcttttttgtaaataatttattatttttttcaataaaaaatgaaatttttgttttaaatgaaattttatagtgctataaataaaagaaaaaaatataagttataaaaatgattgatttaaataatttaaaattaaaaattgataaacccatagtcatagtaggtcttatgggcgcaggaaaaacatctgttggaaaattactttcaaaaaaattgtgttttccattcattgattctgacagtgagattgttaaggccgcgggctgttctgttgtggatattttttccatttacggggaaaaggaatttagacgtgttgaggacaaggttataaacagactcctttccgataatcaaataaaggttttatcaactggggaaggggcttttataattgataatgtaagaaaacttacaaaggaaaaggctattacaatatggcttaaagcggatttacctttgcttgtaaaaagaacaagttttaaggatacacgtcctcttcttcttaattatgattccagcaagattttgcaaaaacttattgatgaaagatatcctatttatgcaaaggctgatattactgttgaaacaagggacgagccaacatttaaaactgcctctaatgtgataaaggctctttataattatattgaaaaagaaaaggtaagaaatgagaaaaatttttaatattgttatttgcatatttctttgctcttgtggatttaaaccactttaccaaaaaactgcttataatgatttagcagataaaacaagtgagattgtaattgctcctgttcaagattttgatggtgcaaggggtgttgatttaagaaataatcttcttaataaacttacacctgatggaaaacctgataatccaaaatatcaattaaacattacactttcacaaccaaaaattactgactacactataaaaaatgatggtattgcttcgtcttatttaattacaatgaatgcaaaatataatttaaaagatataaaaaataataatgtgattttggaaaaaacagcaaactcccaaatttcatataatattttaaaggatcaattttcaacagaaatgttgaaaaataacgctataaaattggcaataaacgatattgcagagcaaatttatttttcaataataatttattttacagaaaagacaaatggcaaaatttaaacaaggtgattttaataatgctttgaaaaataagttttcaaacttatctggcatccttttttatggaccagatagggggcaagtccttgaaaactttaatatggcatctgatgcaatcgcaccagacagcgatgatggcttttccgtatttgaatttaaggcggaggatataaaggaagacccatcaaagttatttgatgaggcaacaacaatttccttcctttcttcacgaaaggttataaagataaaagatgcaacaaacgatgtcgccgatacgttaaaggatttgcttaaatctacggataaattagaagcttttattattatgtccgccgacgagcttactccatcttctaaacttaggattttatttgaaacaaatccaaagcttgccatacttccaagctataccgatgatggcgaaaatttatcaaatataataaggtccactttggtaaaaaatggaattaaaaaaattccagatgaagttttgttatatctgcgtgaaaattttggtgaaaacagagctactacaaaaatggaacttgaaaaactttgtctttatctatatggcaaagattctattacccttgatgatgcaatgaattgtattatggattcatccgttttaaatatgtctgatttgtctatgtccgtggcggagggaaacaacaaaaagttatcatctgttttaaacagacttttaaatgaaggagtttatccagtccagcttttacgaacagttttataccattttaaaaatctttattttatggcgggcgaggttgaaaagggacaaaccatttcatctgttattgaaaatacaagacctgtaatatttttcaaattaaaaccaagttatgaacgccaattaaaattttggaccacagataaaatcataaaaattatttcaaaattaaacgaagcagaaattatgtgtaagacaacaaattcaccacaagaaataattctttcacaaataatatttaatatttgcgctttcgcaaataaaagagtataatatgataaaggaaaaaaatagaatcgcaaaagtaattgccgaaagtggactttgttccagacgtgaggctgaacgaaaaattcttgatggggaggtatctataaacggacatattatagactcccctgccattaatgtatcctacgatgatgttattttggtaaatagtatcccccttacaaaaaaggaggacacaaaattatacatttatcataaacccgcaggacttatcacaacccattctgatgaaaatgggcgcaaaactatctttgatgatataggtaataagtatggaaaacttctttccattggcaggttagatttaaattcagaaggactactccttcttacaaatgatggtgaatttcaacgctttatggaaagtccaaaaaatgaatttgaacgtgtttataaggttcgtgttcatggcacaccaacaaaggacgatattttaaaacttaaaaacggtattaccgttgacggaataaagtataaaaaaattgatgtgaaaattgataaagttttatcatcaaattcctggctaacagtcaaacttattgaaggcaaaaacagggaaataagaaggactttgtcttctcttggatacgaagtaaataaacttatccgcataagttatgcgggctttgaacttagaaatttggaaaaaagtggtatctatgaagtaaaaatccccaaacgcattttagataaatttgaaaataagatttaaaaaaaagcgaccaaaattatttaatcgctttttataaaatcaaaataattttatacacaggttttatttcagaatatccattccaagcaaaaacaggtttctcattttttagttaatagatttacctttttcataggcaagttttaattctttcttgtcctttatgtcgccgatagccattactccgccacaaaatatttttccaatatcggtccaatctaaatattttaccatacaatcataccaatattcacaagctttgaaatcatcaccttcggcagtcataataaacatactttcttttttcggattttcgtaattttcataacattctgctatggcaaaaagtctgtcaaatgcagttttcaattgtccacttatgttccaataatacataggcgatgccaatacaactatatctgcattttgataagtcggatatatttttaacatatcatctttttgaacacatggagagtttgtatccttaccaccacagaaacaacctttacaaccatttatattcatatcatctaaaaatatttcaacaacattatttcccgattcttttgcacccttgataaattcggctgtcaaagcagaggtgtttccatgttttcgtggacttccatttaaaataagtatatttttactcataacaactcctttcatttttatttccttgactattattttaacaagaattaaattaaaaataaatagtttttatttaaaatcctatttactaaatcccaaaaatttgatattattatatggtaataataaggagattctatggcaaaattaagaatgcttccaggccgtccatatcctcttggtgcaaattatgatggcaaagggacaaacttttctttgttttcaagaaatgcagaaaaggtagaattgtgtttctttgatgaaaagggaaaaacagaaattgcaagagtagaaatgcccgaatacactgatgaagtttggcattgctatcttccagaggtaaaaccaggtcaactttatggatatagagtttatggaaagtattctccaaacgaaggtcatagatttaacggaaataaacttttgattgacccttatgcaaaggcaacatttggaaaaattgtttggtcaagcactcttttcccatataaattaaacagcccagaaaaggacttatcctttgatgaacgtgatagtgcaagatatatgccaaaatgtgttgtcatagatgataattacaaatggcaaaccacagaaaaacctggaactcgcagaagtaattctattatttacgaggtccacgtaaagggattttcaaagcaaaattcaaaaatcccagaaaaaatccgtggcacatttgaggctttatcccataaaaatagtataaagtattttaaggatttgggtattaccgcaattgaacttcttccaacacaatgctttttcttaggttctatcccagaacgaaaaaaattatataattattggggatataatacggtaaacttcttttccccagaacctgcatacctttattcaaaagatataaatgagtttaaggaaatggtggataaatatcacgccgctggtatagaaatcataatggacgttgtatataatcatacaccagagggaaaccacctcggtccaatgttctcctttaagggaattgataattcttattattacagacttatgaaagataatccaagatattatgatgatacaacaggttgcggaaacacacttaattttgataattccagagttgtgcaaatgacaatggattcccttcgctattgggcaacagatatgaaaattgacggtttccgttttgacttggctgtatcattgggaagaaatgattatggtttcagtagtgaatcagatttctatgatgcaatgtcccaagatccagttttgcaaaaggtaaaacgaattgcagaaccttgggatgtaggaatgggcggatatcaagttggtaattttcccccaggatggagcgaatggaacggtcgttatcgtgatacagtccgccgtttttggcgtggtaatgacggacaaatcggtgatatggcaacaagatttacaggctcatccgaattatttgataaatacggacgccgtccttggtccacagtcaactttataacagcacacgacggctttactatgaacgatttagtttcttatgattataagcataacgaagcaaatggtgaagataaccgcgacggtgataataataatgaaagctataattatggtgaggaaggtccaacccgcaatgcaaaaataaatacaatccgcacaagacagatgaaaaatttctttgctacccttatgttatcacagggactccctatgatgcttggcggtgatgaaatgaaacgcacccaaggcggaaataataatgcctactgtcaggataataaaataagctggtataattggaacttattaaataaaaacaaggatctttataaatttgttaaaaagcttattgaaataagaaaaaatcacattgtctttcgccgttctaaattttttaaaggacaaagaattccaggaacacgaaataaggatataacctggcttactccagctggtgtggaaatgtcaacatctgattggcataatccaatgaataaaaccctgatttttaaaatctcgggtgaggcaggcgataaattccaccttgataaaaatggagaagcaacaccagataataacttttttgtaataatgaacgccgatacaaaaaaattaaaatctattgttccaccaacccaaccaccatacaaagaatggcgtgttatgtttgatacatcagaacttaacaaggaaaatgctctaataaaaaatacaattactataaatccaaggacttttatcctacttatcgcaaagtaggatatacccttgaaatttttgaatttaatccttatataaacggttatacttgactaggcctaaaatttttgctagctttaactctattaataaaaaggaaacaagatgttagaaaaaataaaacaaatcaaaaccgaaaaaaacaaaaaggaaaatctccaaacaataaatccaaatgatgatatttgtattcttcctcttcgtgatatagttgtattcccattaactcttgtccctatatttataggaaggggaaaatccattgctacggtagaggaggcaatgaaacgcaacaaagaaataatccttgtttctcaacgtgatggaagtataaacaatccatcaaaatctgatttgtttgaaataggtgtaaaggcaaatattatccaaatgctaaaattacaggataatacaataaaattattaatagaagctaatcaaaaggtaaaaataaaatcattggatatatcaaaaccatatttaacaacttccgttgatattatacacgaagatatacaatataataaggaagataaggaaataaaacttttaacaaaatccataataaattcattttcccgatatatgaaatttaataaagatataatggtagaggatgtttctggcttttcaaagatagaagatccaaatttacttataactactgttattatgagtatcaatacaaaaattgataagaaacaggaaattttggaacttaatacattaaaggaaaaattggaaaaagtttatcttcttttggaaaccgaacttgaatttatcaaaatggatagacgtatccgaaaccgtgtaaaggaatccattgataaaaatcaaaaggaattttatcttaacgaacaaattcgtgctattcaaaaagaacttggcgacgaagatgaagattataataatttagaggcgaaaattgatacaataggtctttcaaaggaagcttttgtaaaggcaaaaaaggaacttaaaaaattaaaaagaatgtcccctcaatcaccagaatatgcaattataagaaactatcttgattgtgtgattgaacttccttggaaaaataaatccgaacttcaaaccgatattggtttagcagaaaaaattttaaacgatgaacattatgcccttgaaaaagtaaaggaaagaattttagaatttttaagtgtgcaaaaacgtgttggctgtgcaaagggaacaatactttgctttatgggtcctcctggggttggaaaaacctcccttggaaaatctgttgcccatgccacaggaagagtttttgaaaaactatccttaggtggtgtccatgacgaggcagaaatccgcggacacagaagaacttatataggttcccaatgtggtaaaattttatcaactatgaaaaaagcaggtgttaataatccccttataatgcttgatgaaattgataaaatgggaaatgattatcatggtgatccagcaagcgctatgttagaagtccttgacccagaacaaaataatgctttcaacgatcattaccttgatttggattacgacttgtcaaatgtaatgtttattgcaactgcgaacagctataatataccaaaacctcttcttgatagaatggaaattattgaactttctggttatacagaggatgaaaaggttgaaatcgcaaagcgtcatattgttccaaaagtccttacaaaaaatggtctttcaaaggaagagttctcaattaccgatgatgcaatccgtgatatagtaagatattatactcgcgaatctggtgtccgtggattggagcgtcaaattgataaattgatgagaaagtcggttagaaaactttgcaataacacaaatgaaaactccactgatttatttattcttgataaggataaacttgataaaccaaagagtaataaagtaaaaataacctctaaaaacataactgactttttgggtattaaacgttttgatttcggaaaatccgaaaacgaagatgctgttggtgttgtaacgggtcttgcctggacagaagtaggtggtgaacttttacaaattgaatctgcggttatgatgggtaaaggtttggcagtctttactggaaaacttggtgatgtaatgaaggaaagtattgaaactgcaaaatcgtatgtaaggagcaagtctttgcactttggtatcaacccaaaaatttgggacaaagttgatattcatatccacgtcccagaaggtgcaacaccaaaggacggaccttccgctggtgtcggtatgatgacctctatcgtttcaacattaaccgaaattcctgtcagaaaggatgtcgcaatgactggcgaaattacattaaggggtagggtgcttcctatcggcggattaaaggaaaagctccttgctgcccttcgtggcggaataaagactgtccttataccagaagaaaatgtaaaggatttagaagaaatcccacaggttgtaaaggacggacttaaaatcattccagtaaaaacggcggaggaggttttgaaatatgcccttaccgaacctttcaaatcaataaaacaagacggaaatttctttgaaaatatcctaaatacaccaactcctaacccagtggtgcaataataaaaattgttatgaataaaactaaatccccctaaaaagggattttttttcaattttcttattgacatttctttttttttgtttatattaaattcataaaataaaaagaaaggtattaatatgaaaaaaattaattataaatcttttacatctgtgaatgataaatacaaggaaatgaataagatagctagggatgagggttatttttttccagcatcaaagttaaatggattctttccagaaaattattatattaataaatctcaaatttataaagaatgtttgtttggtaatatagaagaaagaaaaacatcttatataggttttaatattattgattatccatatgtttataaaagaataaaaactcgtctttctataacaaaaccaaagaaatcatatataaagaatcaaataatgtcatttatgaaattattggcaactaatcctaatgaggcaaattttgttggtagtttattgatatcaatttatgaagcaacggattttaaatcaaaggaaaatcgtggtaaagttgcaacagacgaagaaaagaaaacattgcttgatatccctcttaaaatattaaaagcaaataaggatataaagacatttaaaagaagagttttgtatgaaatgttaagtcctgatttatgtcagtttgaattgtttaacgaaaatgtattattagcttctttgttacaaaacgaagaatttcaaaataaacataaaagagaatataacttagcattagaagaaataaagaacagacataaataaaattcaattcttcaaaaaagtaatataaaaaaaagaggcttgtataccaaacctctttttttaattttgatggtaactattataaaatagttccttgttaacgatagacttaaatttcctatatgctaaattatcgtttcaaaatcaaaaccattataatcataatagttttaataatcaagaaatttttattgtgtatctgaataatattttatagaatattaaaaataaaagaaaaaggatacaaaatgtataaacttggtattgatattggaacaaattctattggctgggccattgttgaaattgaaaaacaaaatgataagattatcccactcaatttaattgattttggagtaagaatttttaataacggattaacccaagatacaaagccaaaatctcttgcatctataagaaatgaagcaaaaggagcaagagtaaatcaagatagatatctggtgcgccgtaaaaaactttttgagtcattaataaattataatcttatgccaaaggataaaaccgagcaaaaatctttggaacttttaaatccttataaatgtagagcagagtgtgtaaaaattgatttatataattcagaattagttaaaaatctaaacaatcctctttatattttaggaagagctttgttccatataaatcaacacagaggttttcaatctttatccgaagatgacacttctaaattagaaaaatcccatggaaagttgattgaggaaataaaaaataataattgtaatactctgggtgaatatcaatgggaaatgattaaaaaaggtaaaaaagttaggtttagaggacttatggacgataaaggtaaattgaaaaatggagtttcttttccaagtcgtgatatttacaggcaggaaatagaatttatttttaaaaaccaaagacaatattttccagagctttcaaaagatatggaaaaagaaataacagatattatattagaacaaagaaatttaacaaaacaaaaacccgcaaaatgtatttttgataataacaataacactcaacttgcacaactactttttcaaaggtttagaattatatcagaagtcaacaatcttgaaattatctatcctgaaaataaaaaattatctgatgaagaaaaaagaaaacttatagatgcactttataattgcaataaagatttgaaatcaaaggataatgttgtcccttatttatctattaaagaatttttagagttagattccgaaacactttttaattttgaagccacaaaaaaacacaaatacaaaggtaaaaccgaagatggtaaatcagaatatgaagaaatttataaacctttaacaagggaaggtattaaatgttctgaaacaaataaaattttgttggaagaaatcagaaattggagtagttttagtgaaaatgacaagtttaacattattgaaattttaaccgattatagtaagttcgcaaaagatagagtaaatattttaaaggaacaatatggtatagaattagataatataaaggcaaatgaaatccttaataaattaccaaagggatattctaaattatcaagggaaatattagaaacaattattccgcttatggaaaataataacttaaaatattatgaagcattggaaaaaataggagtaaatcattctttaaaggactatcaaaaggaaggttggaaacctttggaatttcttcctccttatcaagaaaaatttaaagaatatcttggaacaaatggcaggattacaaatcctactgttcatattgcacttaaccaaatacgtatagttgtaaatgaaattatttctttatatggaaatccagaatttataggagtagaggtcgctcgtgatatggcgcagggtgaaaaattaaaagcaaaaatttcccaaaaacaatttgaaaataaatctataaacgatgaagcaagaagagctattatttcttgtggtcaaaatccaagtgattataatattgaaaaatataaggtgtggcgaaatctttgcccaaatgatgaaaataaaagagtagatatatatgatatgagtgaattagctcatccaatttctttgtcagaacttttttctcctaattatgaaatagaacatatccttccattttcaaaaagtggcgatgatagctatgcaaataaaataataacacatagagattttaatggcaataaaagtgatagaacaccaagcgaatggaaagtaaatgaaccagaagatttaaagatattgcaaaaaagagctggacttattgatttttacagaaagaataaaaagggagataagcctgttctaaaagaaaataataaaaagaggagagagtataaactttctgatacctggtggcgttttttacctaatgcaatggatatttataataaattgacaggtggtttgaatgcaagagatataaatgatacaagatacattacaaaacttacaaatcaatatttaagatatatttctaataattggaataacagtactgttaatacaggtattaccacagatttatatagaaatgcttgggagttgttaaaagcagtgcctcgtgattttgatttatggattcctcaaaaatggcaacaagattttctaagtgataaattaaaagatgtgattttacttttacataaagaatataatagtaaagataaagaaattcagaaaaattttaatgaaaaggttaaagaaattattgatgatttaattaatggaaatccatcaaaatataataacttggttgatgaatttgatacatttattatgaatcaatctaatgaaataaatgatattgagttattaaatgaaaatgaaaaagatgtaaaaactcctataataaaacgaaatgcttttgacacacatagatttcaatttgtaaaagttgaaacggaaagtttatcttctgatgaaataaaagaaaattgttatcagcttttttataatttatcaagtaagcaaaaggatagggcaatccattatcatcatgcaatagatgcgatagtttgtgcttgtttggatacatctttggctcaatatcctaataaatcagaatttagaaaagaattggataaacaatattatgaaaaattaaaaaaagatgataatcttgataaagaaagattccgaaaatccttacagcaagcattaatttcttctaaattaagagatgaaaacaaaatccttccatataaaaactttgatatgaaagatttaaaagaaagatttagaaatatgcttatttcatataaagaagaagctaacaaagtgaaatatctcatacaaggaataaaagagggtaaaaataaatctaatcaaagttttttaactattatgaaagatacagcttatagtatagaaaataataagttaacaaaggatgataaaatcatattaaaaaagttaaatcgttcaaaaggtaaggttgaaactgaaacaactaacatatcttctatgattcctgtgtttagaaataaaaaacaaaagaaaatttatttagaattatttgataaatattttattgcaaagcaacaatatgtagacaagaaaattacagaagaagaatttaataatataaaaaatgcttttgaaaatagctttacaaaagataaagcttataaatggtacgcaagtgatggtaattatgaagctcagatttatatggttgacgataaatggcaaatggaaattataaatagattccgtgtctttgaacatcttgaagataaagatggctatgctttgtggaataaaatttatccaaaggccaagaaaatgatgacgcttagaataaatgatattgtaaaggcaaatattaagagaaatgatacttgtgaaagttttggcgagttaaaaaagtttattgctgacaaatttaagaattgttcaaaccttgataatatggatttctattttaaagttaagaaaatgactaatggcagaattacattattaccaatacatattgcacaggcagatggtgaacataaaatttggactggaagtatcactgctttacaaaaatataacatacaaaaagtttatttgaacgctttgggaaaggagataaataaaaactaaccaaagaggtataaaatgttaaatagtattatagagataaacgaagatggaaaaacattaactacatatagaggatttttaaggataaaggaagaaggggagattgtaagggatctcccttttgattcctttgcttgtataattatttctgcaaatcaaattgtttatacacattctttattacaacgattaatagaagaaaatatcccacttgttatatgcggaaaaaattataatccttctggtttattaattggtataaatggtaattatcaacaaactcgtatccaacaaatgcaaatttctatatcaaaaccattgcaaaaaaatttatggcaaaagataattcaggaaaaaataaaaaatcaatcaaaagttttaaaattttttaaatctgattctaaacttgattatatagcaactcaggttttatctggtgatacaacaaatcaagaggcagttgctgccagatattatttttctgctttgtttggtgatgattttattcgcgatactaacaaatctggtataaatacttttcttaattatgggtatgctattgttagaggtattattgctcgttatgtcgttgcaacaggtcttaatccttcattcggagtcaaacatcataattacctaaatcctttttgcttggttgatgatttgattgaaccatttcgtcccattgttgattttcttgtttataaactttttaatggaattgatgatagtgataaattattggatggtgatggaaaaaagtatttaatatcaaatttattgcataaggatataaaaactttggaaggagtttctgaacttcctattataattcaaaattatataagaagttttgcaaattcctgccttaataaaatgttttctcttactattacagataaacttgttgatagttttattggtgattattatgagtaatataatagatgggagaaagattatgtggatgatggttatgtttgatttacctactgatactccaaaacacaggcatgatgctcataaatttagggaatatttgttggatatgggattttcaatgaatcaatattctgtttatacaaaatttataggagcaaaagatttatgcccaagatatgtttcagcaataaagcaatatgctccaacaagcggaaatataactattttattttttacagataaacagtttgatgatataattttaattggagatttggattatagagagcttcctcaatcaccagaacaatttatgttattttaaattttagggaagtattttgcgaatcggaaaaaataaaaatgaaaaaatctaataaaaaataaagaataaattgttaaaatttatctattaaataattaaaaaatcctcaggttttctgaggattttgaagccatattatagcatataggaaatttaagtcaaatcgcaacaagtatggg

SEQ ID NO: 2564 - DNA, 23678 bp, synthetic construct
  source 1..23678: mol_type = other DNA
  misc_feature 1..23678: note = Synthetic
tgtaggagaacatggaacggtaggattcgtcgaaatccacatcgatgccgtcgggcagaattccgcccagttcctcccggatcagagagacgtcctcgcccggaggcggctgaaaataaatgccgtccgtatccatttcgatgacctgtgctccgtgagaggtcaggaagtccagcatggaagtcagaatttcccgtccgcgcgcggtgacgcgttcggccatgtcgaaatcattcaggaatccctgttcaaagcccagatacccgtagaaggaattgatgaggatcttgaaggcggactgaagggagcggtaatattcgcgttcggtcttgtcctgcgccgcacgctcggcgtccttcgcctccagacggaagctgcggagactgcggagaaaacggacaaacactcccagacggtcacgcgaaggagaccagttttcggaaagaatgatcgaaggatacagggaacggacgtcgcaatgcatcacgccgtcgaaaacgccgtcccggaaagagcgtgtcagcgctccggaaaaaggacgggcacgctcaggggaaggcagagaatggccggcatcaagatattcggcaaggaaaatggaatcgatcttcgtggcattgccccggagaatgcagttctgatagctcaaggggatgatctgtgtctgataaaacgaactgggggaaagaatgtcggagatggcgcgcgtttctcggacatcgtccagacagtagcggagaacgagcccgggatcttccgcccacaggcgcttcatgcaggaggcgtccacatagacacgctcttcggatgcgacacggaagtgacgggctatcgtcttcaatccgtatccgtccagatcacgccggacggcatcatagaaaagcgccagatggtaggtgtccgctatatgacgcccgaaaatgtcgtaacgcgtgtaattgaccgtccgttcggcaacgttgaaacgcgaagtgcgtttcttcggcacggagccgtcacgccccagcgaaagtttcacccggtgacgtttcgcacgagtctccagatacggcagatcaaaacggaaaaaattatgcccttccagaatgtccggatcgcgttctcgcagaacacggacaaactcttccagcatgaatttctccgtcccttcctcccgcacggaaagcactctctcccagccgctgctgtctgacatcgcaatcgctattacggcatcctcttcccgttccgcattcgggaaatcgtatccttccgcgcagagcgtctctatatcaatctgcatccggcgcacttcgtggaagcccatcatggaaaacaggcggatcttcagccggatcagagcctgctgtacgggatcggaaaggatcatccacggagcataaggagaaccgggggaaaatcccgtcgtctccttcagatgtttccgtgccttttcgtagtcggaaacgctctggaactccgcaagaaaggaaaaatcctcccctccttccagagaagaaatccggaacgctccgccgaacccgttcagaagagcgggatcccggagaatgataaaggggctccagtcaaactctttccgcagcacttccccttccttcgtccggatgaacgccacggccttttccccgacggtctcaagcgccaccacccgtttttccgcggaaacaaataaatccgatatcgatacagtcatagttctgtcctgtttgtttgcttcccttttcgctttcccgtctttcttccggcacaaatctccataaaagaaacggaggctctgaaccgtatacttcccggtcgtcccctctgcgctaaaagataaacggtcaaaggaattttatcaagccccttctctctgtgttcccgatcctcttcttcaaatctttcttcttttccttttttcaatatgcggcagccggtgttttctctgtttacttctgtgatctccgctcctcgaattctcatcactgcgggaatgctcttcttctcagaaggaagaggagaatgcgcctcagaaaagaaaacggcgggaagagagaatctagcactccagtcaaggataaagaaaaattccgcacttcctgcctctcctcccctcctctcctcttttccctgccgcgccgccggggaaaagctgaaaaacaggaaaggagaaaagaacgtgtgtttaggggaagaagcttctgaaaaaagatgcgtggggaaaggaaagaagagagaagagaaaattcccgggagaaaaaactccgggggaggaatggaactttctgaaaaacggcctggaaaagtctcttccgccgggaaattctgttctgaggcggaagagtacgttacgttgtgctcccgctccatcccccctcttttttcaagaggggggcggaatgggatggaaggaagaaaaagcttcctcgattcttcctcccatcctgcgggagactgggcgggagagtcccgttcaggcgaaatgctttttgatcagggagttgatttttttccggagggccaggacggcggcttctccgcggggatattccttcatgctcatgcgtcctccgggggagagtttatccagcatggcgcaaagtttttcccgcgggactttcccttccaggaggcgtaatgcgcgcaagtcctgaaggccttcggtaaaggtctcgtagtgaatggaatccaccggctgtccatccacgcccggatagaccatgaacgcatcgccgggagggaatgcgtaatcggcgtcgagcacgctccagggatcgacggatgcgacggaatggaccgtatgatagaaattgaatccccactggaggaatccggtgcagtcatagcggtagagaagcgttcccatgatgcggttccgggaggaaggcatgtggagaaaacggttgctgaccttttcaagctgtccgcagcagtaataggtccacggtttttcgattccggcctggaggaagggttcgatgtgatcttccccgggaatcggaatcgagacgagtcccttctgataatagtccacactggagagggcgtcgcagatcttgaaatccttcagatgcttccgcatgatggaaacggcttttccataggtttccagatgagcgggagcgggttcgtcggaacagtggaagaaggttttgtccttccatccgtgttcggtgaggaaggaagtcagggcggggaggaaggagtcgaggaagcttctgtatttgcgggaatcggatttgacgtcccacccgaagatacgtttttcctttccgtcgaccgtcgcgacaatcttcgggcagaaagcggccccccactgagtgaagagatgcgaaatttccaaatattcaattccagctttccgcgccatgtcgatccagcgttccagacgggagaaatcaaaggaatagcctccattttcgagcgtcacgccgaccagctgcgttgtgggtctttcccctccgacgcgggtatccagcggcggagtgaaaaccggcgtcagcagcatgttgatcccgtgagccgcggccgaacggacaaagttttccacaatgcgccagtgttcctcgctccagacaggcaccttgtaataagttgcaagacagtccgcatgaaaccattccgtatggatcagcgtctgatgcgggagcgccgcattcagcacttccagcgtgaaaacaggactttccacgctttcctccggattgtccggattgctcagacgcacggaaaccggatatttcccaggcttgcagccggcgggtacatcgaccgtcacccagagggagttccactgtcccggcgcaaagcggaaggtcccgtccaccggaagcagagcatcgggataaagcccgggatcgctgctgatgacgtcatccccctccgcccggtaccaggacgtgtagcggacgggcatcagctccacccgcttcagcgaaatccttttcttcagcggagacaggacttccgccttcagcgccctgttctccacggcgatgaaagccagctggaacgaaaaacgttcccccttcagcgccgaagcgctgcggaaagaaggctggtccggccctttcagcggaaaaatctttgccagagaactgcagagatgcatacggagttccatacgaattcacctttcttgatttttgtatttccttttatgttatgctcggattcttctttttgaattgcaatcagatcggaatttgttctgccggagtcgggaacgcgggaaagaagaggatgaagaaggctcttcactccctgctgcgcgggacaggggattcagcgtcttcctccgtcaccatggaggaggaattcaccggcaggacggacttcacttccagcgaagccggaagcagattgggccccgtcacagtcagggtgagcatccccggttttcctttccgggaacgcagatacaccacggcttctccgttgtagacatggaaatggtgctggcggaaggattccgtgcatgtgggatcgccgtttccgatggccgcaatgactccgggtccctccagagagcaggaaacccgatgcgaagcggcgggatggggattgccctcccggtcgcagacggtcacatggacaaaagccaggtcttctccgtcggcagtgatcgggccgatgttttccagttcaagccggatcacggccgcttcacccgcagtgcgccggaagcatttcatggccacggagccgtccggagcgtaggcgacggctttgagttctcccggttcatacctcacctcgtcccaacggatccggtattccagatcggcgcgggacttccggccgagggattttccgttcagaaaaagttccacctcccggaaggaggtatagcaatgcacgggagtcggcttcccgatgcggttcggaaaattccagtgcggcaaaagatgaagagtcggttctgcggaggaccagcggctccggtacagatatgcccggtccttcggcaggccggcgaggtcgaaaatgccgaaataggaggaatgcgagggccacgcgcagttatagggagtcggttccccgagatagtcgaatccggtccagacgaattcacccatgatccacgggcagagatcctgggcccggaactccgtatcgggggtgcttgcccaggggggatattcgacatcgtaggaggaggactggatttccgggtggattccgcttccttcgcatacggggaaaaaatattcaccgcggctgctgacggtggaagcggtctcgcttccatacatgggtttgccggggagaagctcgtgcagacgggcgtaattgtgcggcttgtagttgaatccgggaacatcgagttcaacggcgaaatggttttccacagcctccatatcccggttcagccccgcggtgacgggacggtccggatccatgcgccggaccatttcacgaagggcccttgccactttccagccctccttttcccgctgttccggaatctcattgccgatgctccacaggatgacgcaggggtgattccggtccctgcggatcatgtcgcagagatcggattcggcccattcggggaagagggtgtggtaatcgttcgggagtttggcgatccgccatgcgtcgaaagcctcgtcgatgacgaggaaccccatttcgtcgcagagttcgagcattccgggatccggcggattatggcttgtgcggatggcgttggctccgatgctccggagtttccggagctgacgcgcggctgcgggacgggaaaacgccgcacccagcggccccagatcatgatgcagacaaaccccgttcatccggatgggacggccgttcagaaagagccccttttccgcatcgaaacgcagttcgcggacgccgaagcgcacggtgagggaatcgccggaagtgagagtggccgtcacagcatacaagttcggtgcgtcgatgtcccagggctcaaaggaagagaggaggaacgaggcttcccccgtcgctcccctgccccggagaatcgtttctccccggggagaacggacggtatattcaaacgggagatctcccgccgaagtttcgagcgaaagatggaggaacgcgtcatgcccttcgattttttctgtccggacgcggagcccccacgggcggatgtgcacgcggtcggtcacgacgagtctcacgttgcggtagattcccgctccgggataccagcgcgaggaaaacgggggattctccaccgtgacggcaagcagattttcctcatcgaaacgcagagcatccgtgatatcgcagcagaaagaggaataaccgtaaggacgggctccgacaaatttcccgttcacgaagacgcgtgcatgactcatgactccgtcgaattcgagccaggcagaggttttatcttttttgcgcccctctgaagcggggacgaaaaaacggcggcggtagacgcctttccccacatgaggcagacctccggtgcgtcccagatgcagggattcctcattttccccgtcctcgtcgattttggtgatctgggcatcatattccctgcagaaggggcctgccgccgcccagtcatgagggacgcagacttgttcccatccggaatcgtcccactccggattcaccatttccgaattgaaagattcactgcgggtgaagcgccatgaatcccgcagacgttctgttttccgcatgctgttcctcgctgtcaaacggtcaaaaagttcaggatttttcttttcgggatcagaaaattcaataagatactctcctctttcctctcttcaactgattcccggggaaaaatggaaggattcttgaggatcgtttcaccatgattaaccgggaacctggagcctgggggatgcggagggaaaatcaggtgagggagggcgaaactgagggacaatggggaaagaaacgctccggagcggattggaaaaaagagaatgcggcagtatattcctgatgtcagattcagggaaaacgagttcgagacaaagggaggagacgcgatgaaattccggatggtccataacaacttcaatgttcttgaccttgataagagcctgaaattctacgctgaggcattcgacatgcacgaggtgcggcggatcgaggcgaaggacgggagcttcatcattgtctatctggaggacgggaacagttctcaccagctggaactcacgtggctccgggaccgcaaggagccgtacaatctcggcgacaacgaatttcacctggcattcaaggttgatgattacgcagccgcgcatacccggcatgagaagatgggctgtatttgttatgagaatcccgagatggggatttacttttgcgaagatcccgattcatactggcttgaggtgattccggaaaaacgctgaatccacaaagcttgatttcagactcggagaactatttttttataatggtgtcctcgcccttttctgagttaagagttcatcacatgaaacaaatctcaattacgatcattttcagaggctcaattccaaacgtatcagcatttcacggctgaaaaagagcagacgaaataaatgaaatggaatagaaatggcgaaaaatatagaactcggcgctgcaagacttgctaaaaaagatgaattctacacacagctcaccgatattgaaaaagaaatgtgctactacaaaaagcattttcatggaaaaactgtgctgtgtaattgcgatgatccctttgaaagtaatttttttaagtattttgttctaaacttcaaccgcctcggattgaaaaaactgattgccacctgttacaacggatcaccgattgcggggcaacaactttcgctatttgactatatggacggtgacaccagcaataaagaagaaaacagaccctataaagctgttgtaacgacagtctatgacaaaacgggcgatggcggggtggatatgctggacgtagctgaacttttcaagtccggagaaaatgaattgacagagttgatcggcaacggtgattttcgctcagaagagtgccttgctctgttggatgaagctgatattgtagttacaaatccgcccttttcattattccgggaatatgtttccgtgctgatggagcatcaaaagcattttatcatcataggaaatgtaaacgctataacctataaggaaattttccctctgataatgaagaatcaactctggtttggggcaagtattcattcgggagacaggaagttctatgttcctgatgactatccattaaatgcatctggatgtggtattgatgaggatggcaaacgcttcattcgcgtaaaaggagttcgctggtataccaatctggatttgaaacaacgccatgaagagatgatcttagttaaatattattcgcaagaacaatatccgatctttgacaattacaatgcagttgaagtgtctaaaacaacggatataccttgcgactatcctggtataatgggtgttcccatcacttttatggataaatacaaccctgatcagtttgagattatcggtgctactgaatctgaaggcaaaggattttcaaatggactttgggatgaagatagtggtattgctcaaccattgataaaaggtatacgtaaatacaaacggctttttattcgcaataaacatcctgagccaccgaaagaggtaaaatgaaatgcagattgatgaactgaaagtaactgttggtgatgtttgcgaaggctattccaacgatgcggaagaaggggttgtcggttatgatgaacgcctcgatattcggccgaaatatcaacgggagttcgtttacaaagatgcacagcgtgatgaagtgatccgtaccgttatgaaggggttgcccctgaacgttatgtattggtgcaaggtcagaaaagaggacggctctgacggattcgaggtactggacggccaacagcgcacaatctctctttgcgaatatgtggatggttcattctccgtcgacgacaaatatttctacaacctcccatcggacaaaaaacagcaaattctcaattatccactattcgtatatgtttgtgacggcactgacagcgaaaaactggaatggtttcgtattatcaacattgcgggtgaagaattgactgatcaagaactgcgtaatgctgtttatgccggcagctggactgccagtgcgaaacgatacttttccaaaacaggttgcgccgccgatactttagccggagattatctgaaaggttcctcgattcgtcaggagtaccttgaaactgcgatttcctgggccgctgatgccgaagggaaaaatattgaagcttacatggccgaacatcagaatgattccagtgcagtgcaactgtggaattacttccgctctgtgattgattgggtgcaggcaattttccccaaaaaacgaaaagagatgaaaggtcttccatggggactgttgtataaccagcacggcagacgaactgatcttgacccccaaaaacttgaaattgaaattcaaagtcttatgggagatgaggatgtaacgaaaaagtctggaatttatgagtatcttctaactggagaagaaaaaaagctgtctattcgtgcgtttgaccggcgtgacgcgcttgccgcttatgaaaagcaaaaccataaatgtgctatttgtggtgatgaatttgaatttgaacaaatgcatgcggatcatattactccttggagcaaaggtggcagaacgacaccagacaactgtcagttgctttgccgtgattgtaacctgaaaaaaggtgcacagtaaaatactaaagagtccatagcagacaagaaaacaaagcgggaaacaattctttatgcatgctccgcttgcccgattcgtactggcttgaggtgattccggaaaaattctgatacaacttccactcaaaacaacgatcacatcggtcctcctccccccggaaatcagcggaaagaggaaaacaaaccgtaacggagaagccctgctgaactcagaaatctctcaagctgaaacgccctttaccaaggcacttgcacaaacagaagaactctgatttttctctggatccagattgctttccggaaaaacaagagtacattcctcttaattcagaataaaaaaaaaggaccggcgaaccggtcccacaggtggaaatcaccttcggcatatagccttgttgtgataagacaaccttatcttatcatcaaaaaatcatatttcaagtcatttttaaaagaaagggggtggattttgagcaaaatcctcggtattgatgtcggaacgaattccctgggatgggccattctggatcctctcgagaagcgtttcacggacgcgggtgtcatcgtattccagcaggaaatcccggatgagaaaggaaccgaagcggaactttccccggccgcggacaggcggaactttcgcgcaatgcgccgtctgaaattccgccgcagactcaggaaatatcatgcactgaaaatcctgattgaaaatcacatgtgccctttgagcatgcccgaactccagaactggatccgcaaaggcgtcttccccatcggaaacagggatttcatcgcatggctcggcagcacgaaagaagccaatccctattacttccgcgctaaggccgccgaaagaaaacttcccccgatggaactcggaagagccttctatcacctcgccatccgcagaggattcaaaagctcccgcaaggatgccgacgactccggagacaaggacctgagtgaattcaaaaagggaatcagctctcttaccgaaacgctccggaaccggcaatgcaccctcgggcagtacttttatgagcttttccgcagcaatcagaagatccggaaggtcaaccgctgcggaagagtcgagcattacgaacccgaatttgaaaccatctgccgcgtacaggaacttcccgcggactttgtttccggaatgagaaaagccctctttttccaacgtcccctgcgctctcagaaacatcttgcggggcattgctccctggaaaagaaacatgtccgctgtctgatcgggcatcccctctttgaacgctaccggatgctttccttcctcaacagcatccggaaaaaggacggccgggctctgactgcggaggaacggaagaaggcggaatcggctttctacggctcaaaacccagttttgaattcaaaaaactgcttcagaaagtctatccgaaggagtacaggagtcttgcggaggaattcaattatccgccggataaatccatcgcctcctcccctgtcaccgcaaaactgcagaaggtcctggggaccgatgacctcttcgcgtggcggcacgaatatgcagggcgcgacggcaagacgagagtcatggattaccagacactgttcgacgccctcaccttcttcgacgacaacgatctattaaagaaattcgccgtcgaacgcgccggactcactccggagcaggcggaggaatttatccggatccggattccttccggctacgcgaatttcagtctctgcgcgatccggaagatcatgcctttcctggaggcggggcagattcagacccgggcactctttcttgcaaaacttccggaacttctcgggaaggaagtgttccggcaaaacagcgggaagatcatcgcagaactcgaacgcatagaagaggaatggcgttcggaccagcgggaagccctcgccgcaggaaggccgggcgcattcctttcccagacggaacgcatgaaacgctatctcgaagacgaattctccctgactcccgaccgctttgaacagctctaccgttacaacagccgttcggattatccggacaattccgcaagcgggatccttccgccggtcaatctggggatgatctacaatccgatggtctaccgttcgctgacggtcctccgccgcctggtcaaccatctccgcagaagcgggaaaatcgacgcctcgaccgaaatccatgtggaacttgcccgttccgtgaacaacaggaacacacgtcttgccatcgccgccgagcagaaggagcaggaaaaacgccgtcaggaagcccgcggccaaatcgaagccaacggcggacatcccagcgacgagatgatcctgcgctggttcctctggaaggaacagaaggaacactgcctttataccggcaaagccatcgggatcgcggatctgctgagtccggcaaacctggtggaaatcgagcataccgtcccgcgctcccgcggcggggacagcagcatggaaaatctgacgctctgtttcacggactacaaccgatacatcaagaaaaactctctcccgacggcatgcccgaattacgaatccccctggaaagactgcaattcgattcaggaaaatctcaaagccgccggatgggaggaagagcgctccgcattgatttcccgcgtggaaaaactccgtaccgccgcccgaggcaatccgcagaaacgcccggaactgatccaggctcagaaacagctggactactgggacgcgaaactggcggcgtttcagatcacggacgaggaactgaaggagaagggattttccaaacgtcagcttgtggataccggcattgtcgcccgccacgcggtcttcctgctgaagtccgtttacaggaatacctattccaggaatggcaaagtgacggaatgggcccggaaagcctggggcgtgcaggagttttacaaaccgaaagaccgttccgaccataaacaccatgccgtggacgccatgtgcgtcgccgccctgacggaaggctttttccagaggatctccactgcttaccgttccgacgagctctcggcggcccttcttgaaaaagaggacagcgatgagtccgcctcctccgacgcctcctccgacagtgtaaaaagccttccggaagcctatccgtggcccaccttcccgcaggacgtctatgaaaagacggatgaaatcctgattttccatgccgcacggcacaatgagacgaaacagagccggaagcaagtccaccttgtcataccgtaccggactccggacggacagctccaccgggtggtcacctccggcggcgactctgtccgcgggcagctgcacaaggaaagttattacgggcgcatcaaagacccctcctccggtactcagcggagcgtcatccgccaggaatttgtcataaagaacttcccctcggaagcctcttttgaggacatcgtggatcccgcggtcagggaaatgcttctggagcagatccacgcccgggaggatcagggcagaactttcaaggaggccatggatgaaggggatttccgaatgaagacaaaagacaaagtcttcaacggccctccgattcggagcgtccgctgttttgcccgtctccacgatcccctgaagatccggaaacaaacctattcctcctccgccgaatacaaaaactatctttacgcgggtaacgccaaaggaggaaatttcagggcggcgctcttccgctctccggaagggaagctcacttaccgcctccagtctctctgggaatgggcgactcagcgcaaggatccggattatgttccgccggagaaggagtccgggaaaggggaattcctcggtttcatctttcccggaacaatggtcctggcctatgagaattctccggaggagctgaaaacactctccccgcgggaacttaggaaacgcctgtacaagatcattgaaatccaaaaggcagccagcctaccctgagactccgctatcaccgcgaagccagatcctctgtggatgtgcatgacgcaatgaagaaggaaactggggtgatagaatccgcttccatcaacttcaaaaaaccggcaaagcttttgaaaatcaagagaaaggaaatctccgggcacctgatttttgaagggattgattttgccatcgccatcgacggggaaatccattttctgaaataagctcgaaaagaagaacgccccctccgtaaaaaaggggggcacacaaaaccgaaaaagcgctggagaaaaaccacaccggaatccaaacaagggggtaaaaacgcatctatgctgaaacggacactctttttcagttcgcccggccgcctgtatctcaaacagtctcttctggcatatcggcagacgcctggagagacggagacggcggcggagggggggagcaggcagaagaagaaagggagcaaagcgggagaaggggaggaggaaacgcttttcccggaggaacggacctttccgctggaagatgtcggcctgattgtgctggagtcgctgcgtctcacggtgacgacggcgtgtctgaatgcgctggcatctgcaaacatcgcgcttgtcatctgtgattcttcgcacatgccttcggcgatgctgcaggcgtattcggggcatacgctgactcagcgccatacggaagcgcagcttcaggcgtccgcgggtctgaaggcacgtttatggcgccagacggtacaggcgaagatccggaaccaggcggaatgcctgagacgcctggggcttccggattcgcgtcttcgcgtgctgtccaaagcggtgaaggcgggggatgccgggaatgcggaagcggtggcggcacggtattatttccagcagctttccacccttgcgctgcggtccgggaattcctttctgcgggatccggagggagatgcgccgaatccggcattgaactacggatacgcgattctccgagccgcggtggcgcgggcgctgacgggttcggggctgttctgtgcggcggggatccaccattcgaaccagtacaatgccttcggtctggcggatgacgtgatggaaccgttccgcgcgtttgtggacgaggcggttttttcctcactggagaccttttccgttgcggaactggggaaggatcagaaagcgcctcttcttcgtcttctggcggcggatgttcagacgggaggggagaaacgccctctgctgaacagcatcaccttagcgacggcttcgctggtacgttgttttctcggggaggagaaggcagtgagatatccggagtttgtgcgggaatgagtgcatcctatcaggcagtgagcaggtatgcggcgatgtggatttacgtgatgtttgatttgccgacgaatacgaaggggcagaggaaagcggctggggctttccggcgggatctgctgaaggacggatttcagatgctgcagttttcggtctatatccgcccctgtgtgggggaggagaatgtgcaggtgcacatcaaacggattcaggcgatggttcctgcggaagggattgtgacggtgctgaaggtgacggaccgtcagttcagcgagactcggacctttgtcggcaggaaaaccgttcctccgccgtccgcgccgatccagctggagcttttctagcgtccgcggagcggccatattccacaggaacctgtttttattaaaggacttatttagcccaataatataacacacgttcaaataacgtcaaatcacaactttccgacttgaaaagttacgccccggaaaaatataacacacgttcaaataacgtcaaatcacaactcaataaatttccgcatctttacgaccagtaatataacacacgttcaaataacgtcaaatcacaactcgctgggtgttacggaaatttgcgcgtcgaatataacacacgttcaaataacatcaaatcacaactgactcagaaactggcaaaatcgcacctggaatataacacacgttcaaataacgtcaaatcacaacttacccggccactgccgaattttgacggcgaatataacacacgttcaaataacgtcaaatcacaaccgatcgtctctgttgaaaatgatgtgctcaaatataacacacgttcaaataacgtcaaatcacaaccgaagacattattcctgtcgagtcaaaggaaatataacacacgttcaaataacgtcaaatcacaacagaagtatttttcagacgaggaagatatccaatataacacacgttcaaataacgtcaaatcacaactcgatacaattgtgtgtagctttttttctaatataacacacgttcaaataacgtcaaatcacaactaccaggtaggggaaatcttccgtcgtaataatataacacacgttcaaataacgtcaaatcacaaccaacgaagggcttgccactactttcgtataaatataacacacgttcaaataacgtcaaatcacaacctctctcaccactcctattcaacatagtgtaatataacacacgttcaaataacgtcaaatcacaacgcgaaccggtgaatctgcttacgagcagagaatataacacacgttcaaataacgtcaaatcacaacaaattctcatggttatcctcgtgttcgactaatataacacacgttcaaataacgtcaaatcacaacctctgacccatgtgagtttcatgattgtggaatataacacacgttcaaataacgtcaaatcacaactcaagaaatatagaaaaattgtctaagaaaaatataacacacgttcaaataacgtcaaatcacagatctcaacatctgtaagcatatccgcagcaaagaactatgtgaatatttcgccctttacaagatcttgttccatgtagtccgcagccgaaacggtgcattcatcgggcactattcgtggatcaataccgacaaagaggtgcttttaaattccgcgctttacaagcgtgggaaccgggttatattaaggaagatatcgtaaaagacggattacgacatatagccattgtggaggtgtgaaatgcaggaagaatggtatatcccatcaaaaatggataaactccgggctgccgcttttgccgctactcccgcgggaaaaaaatttaatgaggatcagcatgaaaagaatatgagatgcattcactggagagtcaagaaccagggtttcgttccgtctccgaagactttgaagttgtatcaggaatggctggcgaagcatccggagctttataaaagacggcttacataaagcctgaatccacaaaaaaaaacgggtatctgaagcccattccgaaaacacgctgatgaaaaaatccgcgtgttttttcgtgtcttttttttcgagcgccggaccggctgactcagactgcaacgggggaatcatgcgaatttatctttcggcggacatccgtgattttctgtccgcttccgcgaaaaggctccttgcacccctctccctcaccggatccgcatcccgcatctcggacaaatcactcccggactcccgctcaacagcaaatacagtatcccgggcactatccccagactgaaaagcagaatcagcagaatcaccgatgttcccccgcaaggcctcccctccccgcaatatccgcaattcggattcggacatatcacatgcagtccggaatccgctcccttcttccctgcacgcctccgcctgcacgccagactcctcagcacaagcagcaacagcacaatcaccgcaagcacaatcagtatctgcgaaatgtattcttcccccatttgcatatccggattccttcctttccctttctcaagattccaaaagcattccagcgctccatgcaccatatcatataagttcccgactcctttctcaactccgcagaatcattttttctccttttttccccacaggaatccggctccttcaggatccggaacttcgacgggcatgggcggcccctcctcacgaaacaaagtcccaggacagatcagaagaaaaaagaaaggaaaaaggaaaaaagaaaagcacagagataaggagggggaaaagagaaagagaaataaaagagagaaaagatcgcgtgaacgcagaagaataaaaatctctcatcacctgtttgctttccgggaattgcctgctatattagcccgtcatgaagaaaaaaagcaaatatcgattatgtctgatcgtctttttctggatgggatgcctgggagggctgcttttcccttattccggggacacatcttccttcctgaacgatccatcggcacccttttccgagcctccggaagaaaaactgcttgaaagtcgcttcgtaccctttcacgttcttttccggaaacccgcaagtgccgcttccggcttttccggggaagaatatgcggtgtccggagccatccggggcgcagagatgaaaaacgtctgccgctatcaggaggcgtgcagcgtaaaaaaatcctccctgatttttgtccctctcagatgctgatctcctccggcgcaggcaaccattgaccccgcctgccgttttatcttttgcatcgcgcatccctttttcatcgacttgccgtcgttttaagaggaatcctgggattcctgttctcagagatacataaatccacagaggagtttttttgtttttatgacacttttcattgtcagcatcgccatcgccctcggcgtttcatttttatgttccattatggaagctgctctcctgagcatcaccccgagtcagatcgccgtcatttcggagcgcgcccccgcaaaggggaaaatctgccgggacttcaaaaaggacatcgaaaaaccgatcgcagtcatcctgatcctgaacaccgccgcgcataccttcggagcctccatcgcaggcgccgaattcgacgaactcttcggaaacagctatatctggctcttttccctgattttcaccatcctgatggtccagtacacggaaatcctcccgaagacgctcggcgtccgcttcaacgccagagtcatttcctggaccgcacagacactgaagtatctcgtccgcatcatgacccccctcatcaccctcgtccacctcatcaaccgccccttcgatcccagacacagcgcgggaaaggacgataaggtcaatatcggcgaaatcaccgccctcgcctccatggcacgggaagccgaacagatcaccagcactcaggaacagatcatccggaacacccccatgctcggaaaaagaagcatcgaagaactgatgctcccgcttgataaagtctgcatcatccccgctgacgcctcccgggaagaggtcctcagccagatgcgcaacgatcagcactcccgctatcccgtcatcgacaatcagggacagatcatcggttgcctctatgcaaaagatctcctcttccacaaaaaagaggaatggaaggaactcatgcgtccagttaaattcatcgatacgcgtctctctcagcttgaactcatcgaaaacgtcgtcaagctggattccaaactcctgatggtcaggggcgaaaatcagaaaatcatcggaatgctgacggtcaatgacgcgctcctcgaactcgtaggccaggaattccccgaagcctccgccgtctctgacggcggcagcgcatcctcctcttcctctcccgcttctacgtcactcccgcttccggaacagcagaaggcgtaaaacgggcacagagaagtcctcctctctgtttcccttgttcttccgccctcttcctcccccggatttccgatttccgcggaaggagaaaaaggaaaaacggaaaaaaagacactatcagacaaaaaaagacatccccggaaaaaacttccggggatgtctctctttttccaagaaactcgaaaaacaataagaagctggctaagccttctccggaaaccggagacgccgctccatccagcacttcctcacttcatcgcctgggcaaccgccaccgcaacgtcgacagaagcgccgaccatcggattgttccccattccgatcagtcccatcatttccacgtgggcgggaacggaagaagaaccggcgaactgagcgtcggagtgcattcttcccatggtgtcggtcatgccgtaagaggcggggcctgcggccatgttgtcgggatgaagagttcttcccgttcctccgccggaggcgacggagaagaagggtttgccggcttcaatgcgttccttcttgtaggtcgccatgacgggatgctggaaacgggtcgggttcgtggagtttccggtaatggcaatgtccacgccttccttccacatgatggcgacgccttcacgcacgtcatcggccccgtagcagcggaccgcggcgcgttcgcccttggaatacgccttttcagaaaggatcttcagttctccggtgaaatagtcgaattccgtctcgactccggtgaaaccgttgattctggaaatgatctgggcggcatccttcccgagtccgttcagaatgacgcggagcggttctttgcgcgccttgttcgcactgcgcgcaagaccgatggcgccttccgccgcggcaaaggattcatgaccggcgcagaaggcgaaacacttcgtctcgtcacgcagaagcatggaggccagattgccgtgcccgagtccgactttgcggtcatccgcaaccgaaccgggaatgcagaaggactgaaggccttcgccgagagtcttggcaatctcgctggcaaccgtctgcccgcgcttgatcgccaccgccgcaccgaccagataggcccagcaggcgttctcaaaacagatcggctgaatgtccttcactctcttgtaaatgtcaagccccttccccttcgtgatccgttcggcttcctccagagaggaaatcccgttgtcgttcaggaacttattgatctgaacaattctgcgctcatagctttcaaaaagtgccatttcaacgtactccctcattactgctgacgcgggttgatggttttcaccgcatcggcaaaacgcccgtaagtgccggtgaatttcttaacagcctcgttcgcatccatgcctttctgaatggcatcaagcatctggccgattttgatgaactggtagccgatcaccttgtcttcctcatccagagcaatcgcggtgacatagccttcggccatctccagataacgcacgcccttggcgctcgtgccgtacatggtcccggtgatgctgcgaagccctttgccgaggtcttccagacccgctccgatgggaaggccgccttccgaaaacgccgtctgggtccgcccgtagacaatctgaagaaagagttcacgcatcgcggtgttgatcgcatcgcagaccaaatcggtgttcagcgcttccagaatcgtcttcccgggaagaatttccgccgccatcgccgcggaatgggtcattcccgaacagccgatcgtttccaccagtgcttcctcgatcactccgttcttgacattcagagtcagtttgcaggcgccctgctgaggcgcacaccagccgactccgtgtgtaaggccggaaatatccttgacttccttcgccttggtccatgcgccttcctgcggaatcggcgcaggcccatgcttcggcccttttgcgacgcagaccatctgctcgacttcgtgcgtgaagttcatcgctttcctcctgatatgattaggtttggtttctgtgaatccaacggataaacaacatcaaggttgcaatatacaccggaatccttctttttcaagatcatttttcctttcccgggggagtatcacgcctcgtctcttccccccggtggagaatgcgtgaaggaattccgccttccggattttccctccagatccccgtcctcactccgcatctcttcttctcctcacagctcctctccccccctcacagcggaaatcccctgaaaaattcttcctttcagaaattttccccttgactttctccaaaatacggaatacaattttataataagatattttatttcataatgtgaaataataccaagcgtcagcttctccgtctgacaggtggcgggcaaaggacaccccttcccgttccgagctccggatccagagcggcaaaaaggctgcagaggcaatggaatttttcctttcattgcatcctcagctgccgctgaaaacgggaaagcagaaaagatgaactgggacgggaataatgaaagaaaaaaagagagagaaaaagaagttgaagaaagatgaaaaaagatgaaggctgaacggtaaaaaaactcatcccggaaatcatcccggaaaggaatcctgagaaggaacgtcagaagagaaaaaacggaaaagaacaagacagctggagggaaaataaaaaagaatgatcaaggttctggaaaaaacatttgccattctggaaaggatcgtcatagcatccccccgtcctgtccggatcagcgaacttgcggagaaattcgggatcaatcccgccacctgcgcccgtattctgaaagaactgcaggaagcgggctatgtggtccggatctccagacaggagggctatacggcggggccgcgcgcactgacctttgcagaacaggtttcctaccgggaggaaattctccgggcggcggaaatgccggtggaaaaaaccgcccgggaactcgggctttcagtccttttctgtgagagagccggtctggaacgttatgtgctgctccatcgatgtcactgcaggaagctgaagatcgttcttcagaatctgagctttcacgatcttttcagcacggcgacagggcttgtcctttccgcctttgccccctcttccgcgcaaagggatctcctgcgtgaataccggggaagccccttcctccccgcgggacaggaaatgcgggacttcctctccggcatccgcgaagccggaagcttttcagcatcctacccccatgccggacagggcatcatggccttccccgttttccgggatggaaaattcgcgggcgccctcggcgcctccgtggaaatcgaaatttacaggaatccggattttcagaagaaaatggcacaactgcttgcggaaacagcccgggacctgacccaggccatcacccgcagcaacatcacaggatgaacaggatcagaatggaatcactcaaaaacaaagtggcgctcgtgacgggaagttcccagggaatcggtcgggaaatcgcggaggctctggcaagggaagaatgcagagttgccgttgtctgcgcaaatcatctggaaaaggcggaagaggtggcggagagaatccggaaacagggggggattgcgtttgccgaacgctgcgacgtgtcggaggaggaagaggtcagggatctgttccggaaactgaaggagaaagagggcggcgtggacatcctcgtcaacaacgcgcgtctggatccctggaaacggaaaacagaaatgagcgaaggggaatggttcgaccgtgttctgggagtcaatctgaaaggggcgttcctctgttcgcgggaactgtttgaacaggcgaaggagaagaagtggggaaggatcgtcaacatctcctccgtccgcgccttccggcccgcggagccggacatgatcgcatacgggatctccaaagcgggaatgcatgtgctgacacggacctgggcacagaacggagcgccttacgggatcacggcaaacacggtggcgcccgggatggtcgtcacggaaaacatccatctccgcctgaccccggaaaaataccgggaggaatcctccgccatcccgctcggacgcggcgcaagctgtgaagaaatcgccgacgccgtgctcttcgtcctcaaaaacggatacgtcactggagaaaccatcaatatcaacggaggaatgtattatgcgccctgacgaggatacagaacggaacatacagaagcggacagctccctcatgcggaggaagaagccgaaacggaggactggatctggcggggaaaacggcgctggttacgggtgcgtcgcggggattgggc

SEQ ID NO: 2565 - DNA, 23639 bp, synthetic construct
  source 1..23639: mol_type = other DNA
  misc_feature 1..23639: note = Synthetic
tgatgaaggtccatcagtatgcgatcatgtgtgcgtcgaccatggcgcaggaggccgctcttgaggcgcttcgcaacggggaaaaggagatgctccgtatgcgtgaatcgtactgtgaacgccgtaatctgatggtggacggtttaaaccggatcggtctggattgcctgttgccgaaaggggcgttctacacgtttccgtcggtcaaatccaccggattgagttctacggaattcgcggagcagttgttaaaggccgaaaaagtggcggtggttcccggcgtcgcattcggcgcctgcggggaagggttcgtgcgctgctgctatgcgacgagcgcgtcggacctgatcgaggcgatcgaccggatgggccgtttcgtgcagtctctgaaacattgacggtttgcggattcgttttccccctgttgggcggaggcggttccgcccgatcggcggaggcaggatatgagtcggattttgctgttgttgattctgattgcaggtccgttgctccctttgcggggggaagtgttcatgctttggccctggaagggaggcggcacggcatccggcgagtcgctggccgggcagttgccgggaatcgggcggatgctgcatgcggaaaagatgcgggtcaacggcgtcgatcttcaactgaagatttcggcggtcaatgcggattttcctctgctgctttcctggctggcgaagatgttcaggccggaaaatctgcaatccgccggcgggtcggtgaaagtcgcctacaaggtcgggcggcaggtggagcgctggctgctcgtcgacggcggtcccgggaaaccggtcacattgtttctgatcgtcgctccggaaaaattgccggaagcgaaggagtggccggaggaactgccggaacttccggccggtgcggttccggtccaggtcgtcagctttcccggcaggaaggctgtgtacggatcgttccggaatgccggcagcgaaccgtcgaatctgttccgttctttatccgccgcattgaagctggccggctggaagtcgctcggcaatgaggcggagcagccggatggcggaaccggcggaatttttctcggacagaatccgagacggattctctgggccaattacggttcaaacggaagcggaatctattacagtcgaccgtattgaacagaaaatgacgatttgttccgttaaaatccagaaatgacggataaatgacggaacgattgacaggggagaaaacagaatgaaactttggctttgcgctttgcttctgccgctgatggccgggtgtgcgttgatgtcgacctcttacgtggaaccggcggaatacgatctttccgtgccggagaaaccgctgccggaggttcgtttcgagctcggcactttccggaatctttcgggttccgaccgccgctttctgtaccgggaaagcgatgggaaaatgttttccgacgattacaaccgctggcttctctccccggatctgatgctggagcgacagcttcacagggcgctttctccccgggaagaggtccgtaccggcggaagaaacggccggtttctgcggttgggcggaaccatttaccgctgcgaattcgaccggggacagaaaaaagccgttctttccgtcgattatacggtacgggtttatgtggaccgccgtccggtacggacggaaaatctgaatgtcagtacagagcagccgatccgggggaatacgcctgcggccgctgcggccgcgatgtcggaatgcatggccgaatcgattgccgccgtccgcgctctgctgctcgaagtgaatcaggacgaacagaaagccaaataaaggatcagaatatggaacatttgaatgtaccgcccgccaaccatgtgaaggttctcgacggacagggatgggtcggcctcatcgatcatctcggcacggaagcgaccatcgtcaatgccgcccgcgtttcgttcgggaagctgaaaagcgagatggatgagcgggatgtgggccttctctcctacctgattgcgaatcggcacacgagtccgcttgagcatatggttttcacattcagcattcattgcccgcttttcattcgcgggcagtggcaccgtcaccgtacctggagctacaatgaaatttcccggcggtataccgagatcgatatggagttttatacgccgtccatcctgcggcgtcagtcggagaataaccggcaggcgtcgtttttcgacccggaattcgacggaaaagaactgcgtgaagagattcggcggcataacgaagcgagcctgaaactgtatgagcggctgatcgcttccggcgtctgccgggaacaggcgcgcggcgtgcttccccagaatatgatggtgactttctggggtacggtggatctggcgaatctgctgcattttctcgatctgcgcgacagcgatcatgcccaggccgaaatccgtgagtatgcgaaggcgatcaaacagctgatcaagccgctgattccgaatgtggccgcctatttcgagaagcaggggcaggagtggtaagatggcgctttcggtcccggtcattgcgataacgatgggtgatccggccggaatcggcccggagctggccgtccgtatcgccgccgatccgaaatggagcggccgggccgaatttgtgatttacggtgaagagacggttctccgcgaagcggcacaccgttggagcgacgggtttctgcctcgggtccgtccgtccggaacgcttccgttcggcagttttgaacttggggcagccgacgcgcggtgcggacggctggcctacgatgcgctgactgccgcgacgaaggatgcgctggccggtgaggtcgatgcgattgttactgcgccgatgaacaaatatgcggtcaatctggccggtattccgttcaccggacatactgaacggattgcggagctctgcgaatgccgcaactttgtgatgatgcagtcctccggttcgctccgcatggttttcgtaacctgccatgtcagtctggccgaagtgccgaaacttgcggttaaagctgaaatcatccgggtggcggaactgctgcatgaggcggtccgcgccgagggaattgaacatccgaggctcgcggcagcggcgatcaatccgcacgccggggagaacggctgcatggggctggaggatgaacgcgaaaccaagccggctctgacggcattgcggaagtctggaatcgatatcgaagggccgtttccgccggatacgctgtttgtggagtcgatccggaacagatatgacggtctggtgaccatgtaccatgatcaggggcatatcccgtttaaaatgctggcgtttgattccggcgtgaattcgactctcggcttgccggtgatccgcacgagtcccgatcatggaactgccttcgatatcgcctggcgcggaaaggcgaatccgggcagcatgagtgctgccgtggaactcgccgttcttcgcgccgggtcgcggcacagcaggcggaagggatgatgaagtgaaattccgctggtgcattccgatcctctttctgctggcggctccgctgtttgcggaggaaggaatggtgttgaagccgaagcaggaaccgccgcaggtcaacgcgattctggcttcggtaaacggcgtgccgatcagtctgatggatatcctgaatacgacccggaacagcgaatatcaggcttacgccgtattctccggcaagcggctcgaggaggaaattcgtaagattcggctgaaagccgtaaatgaccggatcgacaagcttctggtattggaggagttccgggaaaatccgtttccgattccgaatcaggctgtcgaggaggaactcgacaatatcgccgagcgcatgggagtgcgctcccgttcggaatttacccggagactgcggcagtccgggacgacgatcgaagatctgcgcaaggaggttgaggaatatattatcctgcagatgatgatcttcgaccggatcagggtggagtcgaacatcacgccgcgcgaagttcatgaatattttcaggctcaccgggatgaattcgtgaagccggagaaaatcgagctcgccatgatcatgctgcggccttcggacccggaacttgaggagaaaagccggatgatcgcggaaaagctttccgcttcgccggacgcttttgcggaactcgcgaagaaatacagcatcggtccggatgcggagaacggcgggaatctcggtgaaatcgagcggaaacgactgcgttccgaatttgccgcggcgatgccggaatttgaagtcggcaaggtttacggtccgatccggacagcggatggagtctcttttctgcggattctggctcatacgccggaggtcaggggggattttcgaacgttgagtccggaaatccggcgccggattgatttgaagcagcgcgaggagatcaaggaagcttatctttccggtttgcgtagtaaagcgattatccggtacttcttctgaaaacatttcccatatgttctgaaagatttgtattttcgccgttcggagtatatattcccccttatagcttatgtggttcatacatggaaaatgttaacgatatggtatggtgatgaagatttactgcgagaaatgcaagaaggtgtttgaggcggaaaaaccggaggagggaaatcaggtttcctgtacgttctgcaaggaaaaggttgattttccggaatctccgacctcccccggcgcggttatcggtgattttctgattgaaaaggagatcagcaaaggcggcatgggggaagtttatctcgccagacagctttcgctggaccggccggtcgccctgaaggttctgcaggcgaagttcctgaacgacaaggagtatgtcgaatctttcttccgggaggcgcgtgccgccggccggatcagccatccgaacgttgtgcaggcttacgccgtcggcgaagaaaacggaatcttctatttcgccatggagtatatccgcggcaagaccatgaaggagattctgaaacaggagaaaacgatcgaattccgcaaggccgcgaaaatcatccgcgaagtcgccagtgcgcttgaatgcgcatggcgggatgagaagctggtacatcaggatatcaagccggataatatcatgcttgacgcgaacgggtttgcaaaactggcggacctcgggctcgcacgggtggcgggcatcaatgacaaggaggcgtgtgaaggggacgaggttctcggcacaccgcagtatatcagcccggaacagttgaccggcattccgactgatgtgcgcagcgacatatacagtctcggtgcaaccttctatcagtttgtgaccggccgttttccatatgtggccgattcggcggaagagattgccaagatgcacgtggccggcaatctgcagccgccgaaagaggtgaatccggagttgccggacgaactgaacaccatcatcatgaaaatgatggcacgcaatatcgaagatcgttatcagactccggctacgctgatcaaggcgctggacttatatttgcagaacagcgtccatgccggagccggcgcggtaccgcagctgaaattccggttgccgggagcgggacagaatgccggtgctccgcggacgcctttcggcggaggagctgcaaagactccgttcgccgccgcaggcgcccggactccgtttgccgccaggggaccggccgccgcgatgccgaaagccaatccgccgaaaccggcggttccatccgccgtgccgaaggcggtgccgccgaaagcggtaactcccgttgttgcgccgaaagtggcggctcccgttgccgcgccgaaaccggcgccttcggttgctgcggaatcatccggaaaagtgacggatgttaaaaaacttgatgataaagaagttaagaaaaataacgaaaaaaaatcggatgatgatgcgcttgctttgaaagttgttccgaaagcggaaaaaccggcagctccccccgtcgaaacgccggaagaatccggcaaaggcaagaaaaaagaaaaaaagaaaaaggaaaaggaagacggagagcgcaacatcggaaaaacggttatgatggcgatcggcacgctgattatgctgctgattacgctgggctgtctgggaggagcgttctattttctggcggcggggaacaaacttccgtctgccatccagccatatggcgacaaactggtggccatgattcagggtaaggagaataagttgccgactctgaatctgccgtccgatccgggtcagaggaaaccggatgacaagacggccggtccggtggacctgtcgaaaacgccgaaaccggcggaaggtcagaaacccgaggaacagccgaagccgaaaatcgaaacgcgccgcgaatatctggcggcgatcgacaaattgatggaacggatcaggagcaatccggatgaccgtgtcggatttcttgaagagtccgatcgtttcttccggcagttcccgaattttcagactccggaggaagaaaccgcactgcgtcccttcctgaatgcgtttcaccgagtggacgaagttgcccgcgtggcgccggcccgtgcggcggcgcatgcggaatttacgacggctctcggcaaacgccatgctgctgcggaagcggcggaacgggagctggcggaaaagcaggaaagggagcggcagcagagagaacaggccgaagcggaaagaaagcgtcttgccgaagagaaggccaaacgggatgctgaagcgaaagcggttgcggcaaaacgtcttgccgaagtgatgccgaaactgcggccgctgtttggaaaagtggcgaattcatttctggtcgcggcccgcaccggcaatacgatcggtttcaatcgcgatctctctgaattacgcatgttcccgtttgtcccgggagagagtgcggaggagatgcggattctgaatcagctcaacacgttcggcagcgacctgccgaatgaattgaagaatctgcgcgcctttgtcgaacgtctcggcaaaattacgccggacaatgacagcttttcgattgaaatgccgaaccgcgaccttttgaccatcaccggagtaaagccggattccattaccgcggtggacggtctgggaaagcaggttccgttcgatctctccgattcgcgggtccgaaccattttcattcagcgtctcgaacggcgattgaagcttcagaagcctggattttatcttgatatgatgaccggcaacttcacgccggaaacggagcgggaagccgcggatcatgcgttttggaaaacttattacaagccgtttatgaccgcctatttctttgaccggctcactgcggcggacgccgctgcgaaaactgctttggaaaaacgttacggaaaacttccggagttccaggcggcgttggaagcgatgaaataagcggattttgttttcttctgccggcgttgtgcgatcgtgcggcgccggcagattttttgtcttcattgaagaagttgatggaattataatgattcactttccgctgttttccgtatcttttggggattgaattttcttctgaccggagctatattgcggcaaacaacctctggagggtgcctgctatgaaattccgaatgatccacaataatttcaatgttctcgatcttgacaaaagcctcaatttctatgcggaagcactggatatgaaggaaacgaggagaatttccgctccggacggctctttcatcatcgtctacctgaaatgcgacaaaggcgatcacctgctggaattgacctggatgcgggatatggaccgtccctacgacctcggcgacaacgaattccacctcgctttcgagacggacgactacgaggccgcctatgccagacacaaagccatgggctgcatctgctgcgaaaatcccgaaatgggaatctacttcatttccgatcccgataactactggttggaggttattccagagaagcggtaaagagaaattctcttgcctggattatgcaaggacatatcatattatatgattgtaaaaaaacaatcgagttcctaaaaggcgttttttctgtagtgtgatcacgcttcaaaataccaatactttggaggattttattttgaaccttgaaacaagaaatcgtattttatcgaaaaacggtagacctttaagattcttgcttttagcgcttatagatgagattgagaaaaaaatgccgaatggtttcgtaaaggctacagaaagatattttggcgtttatccacctttgtctcgcaaaatcattgcacgaattgatcttcaagttgaatctattcagatttacattgacaataagtatgtgaattatgcgagctcattgaatttttcgataggaaaagctcccgattggaaaggccagccagataaactattcgggatatctttgactgaaaaagagaatgttccaaatgtaataaatttatttttatatatttacggagagcagactggtacagttcctccattatatacaaatgatttgtttgaggatagtgtagatacatcttctcatgcttccaaagtagtcacctccattgaaaacaattatgaagaaggcgatctcatatatcgcctcagcaagcaatacgaaagaaatcctcaagtaaaaggggcagcaataagaatacatggtttaaagtgtaaaatatgtaatttcgactttaaaaaggtgtatggtgagtacggtgacggctatatcgaagtacatcacctgacccctttggcatcaggagaaggggttagaaaaatcgacccacgcaacgatttaatcactatttgcgcaaattgccacagagtagttcacagaaatcgcaaaaaactattatctcctgatgaattgagaaacgcattgaaggaacaatttgcattaagttaaatgcttttgaaagcagtccctgatcagatactattttcacgaacaatggaaatatggttgtcgtataaaatgatgttaacaagaatatcccgacaactacgggcttggggtgttgcttataaagtcgaaaagtatggtagggctgtctgtcctcagacagccgttcacttatgaatgacaatcggttaaaagattcacaatgcggaaatttgttgtaaagactaaacctgaagctcaaaataaagcgaacggcgctctggggacagagcgccctacccaagcgttctctttgaacaatgagttatttccagtaagaaaaacgacttctcatgtaattccggattggattcggcttgaagaggagttatactttattacaatcaattgcaaagagcgtggaagtaatcagctttgcacgccaactataagcaaaggcatattttcggcattggagttttatgctcaaaagcagatgattttttcaagattggttttgttgatgccggatcatatgcatggaatattttctttttctgcaaaagatggtattgataaatcaatttcaactttgaaaaagtatcttgcaagaaattaccgaatcaattttcaagacggctttttcgaacaccgtatacgaaatgatgaacatctgaaacaaatagaggactatattcttaataatcctgttcgcaaagaacttatcgattttcatgaacaatggaaattcgtttggcgtccccaataatacatttatgtactaatgaaagtagcccgacggttactggcttgagatcattccggggcagcgttgaccctcaaccgcattatttcaggtaaatgatcacattctctgtgaccatttaaggggcgattcgtccgaacggaaataaaatgaagactgccgtgtatatcaattgctctccgcattcggcagaacttgagaaaaactttttgaaaatcatgtacaaaaaaagaggccggcgaaccggtctcacaggtgtaatcaccttcggcatatagccttgttgtgataagatgatattaacttatcacaacaaaataattttgcaaattccatttttgagaaaaggaacaaaattatgagtcgtatcctcggacttgatgtcggaacgaattctcttggctgggcaattctggatccttttcaaaagatgtttattgatacgggagtggtcgtattccaacaggggattcctgaagaaaaagggagggaggcagaatgttccccggctgccgagcggcggaaattccgggctgcacgtcgcttgaaataccgtcgccgtctgagaaaatatcatacattgaaggtactgattgaaaatcagatgtgcccattgaccattcctgaattgcaaaattggattcggaatggaaaatttcccattgaaaaccgagaattcatcgcctggctcagcagtacgaaagaagacaatccctattattttcgagccaaagccgccgaacggaagttgccgccactcgaattggggcgagcgttctaccatctggcgattcggcggggcttcaggagttcccgcaaagagacctccggttcgaacgaaaaagaattgaccagttttaagcaggagatcaaccgcctgactgaaattctgcaaagaaaacagtgcactttggggcagtatttctatgaactgttccagaagtctgagaaaatccggaaagtcaaccgttgcggaagaaaagagcactatgagccggaatttgacaaaatatgcgaagtgcaggaacttccggaaccctttgtctctgaaatgagaaaggccattttcctgcaacgccccctgcgttcgcagaaatatcttgcagggcattgttctctggagaaaaaacgagttcgctgcctgatcggccatccgctgtttgaacgctatcggatgctttcgttcatcaacagcatcagaaagaatggcgttcctctgaatgaacgggaacggcagaaagcacaggctgcttttctggtcagcaagccaagttttgaatttgaaaaactggttcggaaattataccccggatatccgaagaatgaatggtcagagtggaattatcccccggataaatcgatcgcatcatctcccgtcacgaaccagttgcagaaaatactgggaactgaagatcttttcgcctggcaccacgaatacatcgggcgcgacaacaaaccgaaaagcatggattaccagaccctgtttgacgctcttacatttttcgatgacgacggtatgctgaaaaattttgccatcgaacgagccggtttgactgtagatcaggcggaaaaatttgtcaagattcgaattccgacagggtatgcgaatttcagtctttatgcgatccggaagattctgcctttccttgaagcagggcatattcagacccgagcggtgtttctggcaaaactaccggatgtacttggaaaagacgtttttcagaaaaacggggagaaaattattgcggatatggaacagttggaggccgactggcgtatggagcgggaatcggcgtcggaatccggcgaacgggccgcatttctttccctgacggaacggatcaaacactatctggaggatgaatttcatgtgacaccgggtcgttttgaattgctgtaccgctacaacagccgttccgactatcaggatcacacccgatccgggattcttccggaagtgaatctgggaatgatctacaatccgatggtgtaccggtcgcttaacgttctccgacgtctggtcaatcatcttcgcaaaacggggaaaatcaatgcagataccgagattcatgtggaactcgcccgttcggtaaatgacaaaaatacgcgtatggctgttgcgaacgatcagaaaaaacaggaaaatctgcgcaaacagtataaggaagcgatcgaagcagaaggatttgaagcgaccgaagagcggattttacgctatgtcctctggatggaacagaacaaacactgtctttacaccgggaaagcaatcgggctggcggacttgatgagcgaaaacgaccttgttgagcttgaacacaccgttccgcgttcccggggcggggacagcagcagggaaaatttgactctctgtttcacggattacaaccgctacaccaagaaaaacggtctgccgacggcttgtccgaattatgacgtaaaatggaaggaatacaactcgatccgagagaatatcaaagttgccggttgggaggaaaagcgggaaaatctgcgttcgcgtctggaaaagctccgttctgccgccagaggcaatccgcagaaacgggtcgaaatgctcgaatgcagaagagaattcgaatactggtgcgccaaactggccgcctttgaaattacggatgaggagttgcgccggaaaggattttccagacggcagctggcggataccggaatcatcgcccggcatgcggtttttctgctgaaatccgtttatggaaatacctactccagaaacgggcgcgtgacggaatgggtaagaaaagcgtggggtgtgcaggggatctatgaaaagaaagaccgctgcgatcaccggcatcatgccatcgatgccatgtgcattgcggccttgacggaggatttcttccagaagatcagcgcggcatatcgggctgacgaggaaaaggcgatggcatacgcccgatacaacagtactttgcccgacgcctatccgtggcgctcgttcccggaagatgtatttgaaaaatcagaagagattctggtcacccattttatccggcacaatgaaacgaagcaggctaaaaaacaagttcatcttgtcacgccgtacaaaacggcggatggcggactccggcgggtggtaactgccggcggcgacacagtccgcgggcagctgcataaagaaagttatttcggacggatcagagacccggaatccggtgaaaaaaaatccgtcctgcgcaaagagttgaactctcaaaatttcaaaactgaatccgctctcgccgcaattgtcgatcctgcgattcgggaggccgtatccgctcagcttcgtctccgcatgagttcagggaaaagcttcaaagaagcgatggatgagggtggttttcgcatgagatccggggacgacgtcttccaagggccgccgatccgcaaagtccggagtttcgtccggactgcagagccgttgaaaatccggagacacgcctatgcatccgaagcggaatacaaaaactacatttatgccgatacggccaaaggcggcaatttcaaagcggcgctcttccgggcgcctcggggaaaactctgctattgtctgcaatcgctctggaactgggcgaacgcacataagcggccagactatgttcctccggaaaaacagccgggggtgggcgaattcctcggtttcattgcgccgggaaccatggtgctcgcctatgaaaatacgcctgacgaattgaaaaaactatctcggcgggaactcaataagcggttgtataaaattattgtgatagaaaaggatattcaacgcttgagtcttcgttatcattgcgaggccagggccaaatccgaggtacaggaggaaatgaaaaaaacgctgggagtcgaagaggcgtcaaccatttctttccaggagccggcaaagctgttgaaaatcaccagtggagaattttcgaatcatttgatcttcgaaggaattgattttgccatgtccattgacggcgagatacgttttctgaaataaaatcctcagagtggagatggtcatgctgaagcggacgctgtttttcggatctcccggcaggttgttcctcgaacattccctgctggcttatgaaacgcgaaatgcaaacgatgcttcggagaagcggacatttccgctggaagatcttggtttcatcgttctggagtctctgcagcttgccgtgacaacggcatgtctcaatgcactggcgaaagagaatattgccgttgtcgtctgcgatcatgcgcacatgccctcggcaatgcttcagccgttttccgggaacacgctggcgcaacggcatacggaagcgcagctgcgggccaccgaggcgctgaaagcccgtctctggcggcagacggtcaaggccaagatcaccaatcaggctgaatgcctgaagcgcctgggcttgccggatcgacggttgcgtgtgctggcggaatcggttaaggcgggagactccgacaatgcggaagccgtggctgcacgatattattttcagcagctcgccgaaccggaagcattttcccgttgtcgggacgggattcctccgaatcccgcgctgaattacggatacgccattttgcgggcggcagtggcccgtgccttgacgggttccgggctgctttgcgtggcggggattcaccactcgaatcagtacaatccttttgggcttgcggacgacatcatggagccgttccgtccgtttgtggacgagatggttttctcctcccgtgatttttttgccgtgccggaattgggaaaggttcaaaaagcacaactgctccagcttttaacggcggatgtcatatcgggaacggaaaggcgtcctcttctgaacagcatcagctgtacttccgcatcgctggttcgttgttttctgcgggaggaaacggttgtaaaatatccggaatttgtgaaaaaatgagtgcggaatatcaagctgtcagcaggtatgcggcgatgtggatctatgtgatgttcgatttaccgaccaatacgaaggcgcaacggaaagccgctgccggatttcgtcatgatttaatcaaggacggatttcaaatgatgcagttttccgtctacatccggcactgtgctaccggagagaatgctctggtgcacatcaaccgggttgaagcaatggttccggcggaaggtattgtcacggttttgaaagtgaccgaccgtcaattcagcgacacgcggacttttgtcggtagaaaaaccactccgccgccgcccgcacctcttcaattggagcttttttaaaaaaaactctgaaaaatatcgaagatgtttctcataataaaggagttgcaaccccaataatataacccaccttcaaattacatcaaatcacaaccgaatcgccgcggtcgtcgatatacgtgtgaatataacccaccttcaaattacatcaaatcacaactgcaacccgtttctcttgtctctgattgagaatataacccaccttcaaattacatcaaatcacaacgtatataacatacatgcctttcagagtattaatataacccaccttcaaattacatcaaatcacaacctcacatttgccgtccttattaacgtagtaaatataacccaccttcaaattacatcaaatcacaacaaaaagttaccgttcacatgattgcatattaatataacccaccttcaaattacatcaaatcacaacttcggcttgtgtgaaatgtacttcaactataatataacccaccttcaaataacatcaaatcacaacaagtacgatttcgacgtcattccggtcgcggaatataacccaccttcaaattacatcaaatcacaacattaccatgaatgagatcagcatcttccataatataacccaccttcaaattacatcaaatcacaacttcgaaatcgaaggacacggcaaactctccaatataacccaccttcaaattacatcaaatcacaacttactcgaccagcgctaccgtctcttctggaatataacccaccttcaaattacatcaaatcacaacgccacagggagatttacttcctcatacttgaatataacccaccttcaaattacatcaaatcacaacagtccggcggcccacgcctccagcacaacgaatataacccaccttcaaattacatcaaatcacaacagtccggcggcccacgcctccagcacaacgaatataacccaccttcaaattacatcaaatcacaacttaccagacactcggtcatctgctccagcaaatataacccaccttcaaataacatcaaatcacaacgatgtacggttcaggaacattaagtgtcaaatataacccaccttcaagtaacatcaaatcacaacttgcgttcgtcgccgaattcattcatagtaatataacccaccttcaaataacatcaaatcacaacttttaccgggtagtgcccggtgcagagaatagttctgatgtgatctaggtcaaatgagaagtcggcaaccttactctgattttgcaataccatacgaattcttcaaattttacaatacctgattctgggtgaagtttttctttgagcttgcgatatggtttccggcggatgctttggagtatcgaaagtgcatccgccggatttttttactttacaagaagcgaggctccggcgagaatcaggagggattcgccggttgcttccagttctacggcggcgatatccgccgtcggatcgggattgtcgatttccacgagaaaaaggccgtattcgagcatacgcggcgtgacgaaacggaaggcgggcggaattccgcggctgtccgcggccaggaaccagtcgcgcagctcccgtttgttacacagttccgccggagaagtgcggctgccgtcgcggcggacaaaatggacgcggcccagcgtctccgcttgttccggtacataagcggcggtcagcaggagaaacaacttctccggccgggcatcgaccggaagcgtcagccgggagccgtggattcctttccatgcagcggcggaaagcagtaccggagcagaggaaaagcgaaacggaatccgatggatcagctctttcccgtgcagcgctttgccgagctcctccgtgccgacgtgtttctctccgagggaggcgcggggagcgccggccggcagcgggagcggcgtgcaaccggggatcggtgtattcgacactctctccagcgcgatgtcatccatgaccagtgtgccgtgccgctcgattccgacgcagaaaaccagcgtcgcatcgcttgccgggatttcgacttccacgctgcgccggacgaaaccgtctcccggcgcaaccggagcggtatgatagcgtttgaagtaaccgctgttccggtcgaacacatcgaagtagggagaaacgggtttggcgccggtatttttaaaactgccgctgaagagacagcgctccggccccggcacgcgggcgtcgaagaaggcgtaaacccgtccggctccggacgaagtcagttccagggcgtagtttcctgccgccgcgtcggtggttaccgcaatgcgtccctgcggatcgaactgcctgtcgcgcagctgccactgcattgcggcggcgtttttgagaccgccggtcgccacgtcgccggaaatttcttcaaaggagtaattcggacagaagttggtcgtctccgcgatctctttgaagccggtgagcttctgcctgctgacgacatagatgatttccgtcggacgcagcgtccggtattttccggaggcgccggagaatttcacctcgcgtccgtagagatcgtagacggcatcgacttcgccttcgagttcccagaccgctgcagcggcggtccggccgagaacagtcaggatgcttccgtcggtgcggcggaagccgtggcggagatcgagcggagtttgcgtcacctgcccggtgtagcgatcgcatttgcgcagcatcgcctgggcgaacgcgagcgccggcagcgacggaatcggcgaaagcgtctggtgcgaaaagaagaaatcctccccgaagctgaagtatttttcgaacccttcttcgatgaaccagaattgaatcgccgcagtcagcttcgcctgcatcgcggggtcggcgatggtgtgccacatctgttcggtctgccagagcttcatgccgggccgggcttgttcgactgcccgcttcaactccgcgattcccttgagcccctggtaggagtggacgttatagaagtcgcagtaagaggcggctccgagagtcagcagctcgaacggcatggcgttgtcgcaggcggctccgtaaccgaaaccgctgaccaggatcttcgcttcgggatcggcggaacggatggcccggtgcgcccttttcaggagctccagatagtcggcggtggaaccggaaaagcttgcggccggggcgggcgggtgccagtcgacttcgttccagatctcccaggcggcaaccttgccgcggtaacgttccgcgacggcacggacgtagcgctcccagtcgtccgggtcggcgggcttgcgccgggcggacatgtcggcatttttatgggtggggacgattgcggaatccgccgcccagaccggcggagagccgagaatgccgagcatgcggatgcctgcttcccggtttcgctccacgatggcatcgctccagcgccagtcaaactgtcccttttccggctccacgatgaaccagtggaaggcatcgctgcggctgttgcggattccggttttcgcaagcacgtgcgggaggtcgaaaagatggtggccgatgtagtcggcgaaacgaccgtccggcagttccgcatcgggccggttcagttcagcatgcgagaagacataacgtttgccgccgcactccagcgtgaagctgtaatgtcccggggttctgaccggcagttcgatctgaaactctttctgccgggtccgggccggaatgcggattgtttcacgcacttccggcagtgcggcgccgtcggtctctctgccggtgaggcgcaggaggaagtcctgttccgtatcggagaaattggcgccggagagacgcagcaccgctttttcacccggaagagagagcgaatcgtcgaacgaccataccggcagcagggtggcgccgctctgcccggcggcggtcagaagctccgttttgccggagcggaggtccgccagcagcgttgtggattctccgggcgggaagggcgtatccggggtcgaatcgagttccgcgccctgcagctgccgggcggagacccggatggcgcttgcgaagaacggcggtcccgccgagacggagaaactgcccggcatcggagagagttttccggagaaaggcgcccgcgaaagttcccggccgtcgacgctgaggatcagccccgcttcgccccagctcagggcgacgttgaccggtcttcccttgacgaatatctgttcgcgggggccggagacgcgggcagtctgctttccgctccgggcgacgccgagcagcgcgcgctggccgttttctccgctggaaatgcaaattccgagaagagtgcgggccgcttcttctccctcgatggccggaaccatcgaaaacgcaaaagcccattcgttctcaaattccgaggcgggcttggccgggttcagggtcagttcgacggtgccggcggcagcggcaattgtgccgggaaccgggaattcccggaatttccctttgtaaagcggttcgcccgcagacagtaccgccgcggccagacagacgccgatgaggatcagtttgcgcatcttaaaatactccgtcgtggcggacccatttgctttcgtcgttgcggtagctgccgtccacccacgggccgtagagcggagtcccgcgggtattgagcagctgttccgccgcgtgttcgccggtgcgcgtggatttcgccccggccacatggccgtcgacgtagacgacgttgcattcggagaggccgttgtgagccggccagaccgtctggccggaaccgggcgcggaataggtgttgtccacgatgtagtagccgaggggcgacaggtcgaaaagctcgcggtttttccgggcggattctaccagcaggaccgtgtcggaactccggcggcacatcgtgaggcggacgccgctgccggcgggggcgatgtatttgtgattgacgccgtaatcgcagatggtccagtcgctgtcggcgggtgcattcagcttcatcgtcggattgttccagaagtcccggtaccattcggaggtcggcagcagccgggtgcgttcgggacatttcatctggtttttggcggcataccggtcccggaccaggattccggtccagtggccgccggtctgggtgtacggaaagaagaagtcattgtgattgccgagatacatgtggacggccagcccgagctgcttcaggttgtttttgcaggtcgttccccgcgcgacgctgcgcgccctgttcagcgcgggcagcagcatcgaggccaggatggcgatgattgcaataaccaccagaagttcgatcagagtgaaggaggaactttttttcttcatgttcaattcctttcagttaaaactgttatgaaataagagcgtttgcatggcatagtttcctgccggccggcgaaacatttgaaaaaaccggttcgcggctggttttccgatcgcatcgattgtatcgtctccatagttggttgaacgttctaccttttaattatgaatcatccggcggaaaaatgcaagcggaaatcgaaaaaattactttggaaaggtgaaaattttccgaaaaccgctgcggaattccatgtcggaaaccacggatcggctgattattgccgggctgccctttcaaaatcatcttttcgggttatattataggagacaaacaggcggtcccgggggaggaaaacatgatgaaatggctggaacaattgcaggcttcgctggctccgtatccgtgggcttacagcgcgattgtcgccggggttctgattctgactgcctttctggtgaactggatcaccaaacggattctgctgcgcgggctgacgcgaattctgcgcgccctgccgtccggggaaagcgaagagggaaaggtccgcctggcgattatttcgcgccttgcgaatatcgtgccggccctggttctggcctacggcgccgtcgcgattccggatgtccatgatacgctcgaaacgatcatccgcaatgtctgcatcgcgttcatcgtcctgactacggcgctggcgctgggcaaattgctggatctggtcgaaatcgcctaccgccgccgtccggacgcgccgaacaagccgatcaagggatatctgcagctcggcaagatcgtggttttcaccgtggcgaccattctgattgtggccacgctgatcaatcggaatccgctgattctgctctccggcctcggtgcgatggcggcggtgctgatgctgattttccaggatacgatcctctcgctggtcgcgagccttcagctcggctcgaacgatatggtgcggatcggcgactggatcgaaatgccgagccagaatgccgacggcgatgtgatcgaaatcgcgctgcacaccgtgaaagtgcgcaactgggacaagacgatcaccacgcttccggtccgcaagctcatcaccgattcgttcaaaaactggcgcggcatgcaggaaaccggcggccgccggatcaagcgctctttgtacatcgatcagcgcagcgtccgttttctggatgaagcggagatgcagcggctggaggatttcgtggtgcttaacgactacctggagcgcaagcgcagggaactggccgaatggaaccgcgaattggagcagcagggggccaaaccgatcaatgaacggcgggttacgaatctcggtacgtttcgcgcctacgtcgagcagtacttgcggaacaatgcccatattcgtcaggacatgacgctgctggtgcgccagctgcagcccggtgcaaccgggattccgcttgaagtctactgctttacgaacgacacacgctgggcggtctacgagggaatccagtcagacattttcgaccacctgctggcgattttgccgatcttcgatttgcgggtgttccagcagtgcagcgacacctccggcatggtgattccatcgcctgcgctgttgtcgcagtccgctttgaaggcagtggagcagagcgaatcttccagataagggggaggatgaaatgagtgacggcagattttccggcttgctgaagtccgcggctgtttttctcctgctcctgtctgcggtttccgcccaggcgtgccccggatgcggtatgccgacgcttcacccgatgttcgtggagccgcactgccgtatctgggcacgggtaattgtggctggcgcattcctgctgcttctggcccctttcgcgttcggctggcggctggagcggacggaaaagcagatgccgcgcagaaggcgggtgctgcttgccgccgtgatgacgctggtgtggctgatctgtttcatgatgcatgctgtgacgttcggcaccgtgctgtgcaactggatcttctttccgctgtacattattacgttcttcggcatgacactggcttttttctgtcaatggctggcatgggtggtgttgccggttttctttctggtgattccattcttttactgctatggattgtgtacgctgctggggcgttacagattggtccgccgcagaaggaatgaggaggaatcatgatccgttttttgtccgtcatatttccgtcatttaaaatattggacagtgtaatatcatgagtttgtttcagttgcatgctccgtacaaaccggcgggagatcagcctcaggcgattgcgaagatggtggagaatcttcgcaatcagcagcgttttcagaccctgctcggcgtgaccggttccggaaaaaccttcacgctggccaatgcgatcgcgcagtccgaccggccggtgctggtgctttctcacaacaagacgctggcggcgcagctgtacagcgaattcaaggcgtttttcccggaaaatgcggttgaatatttcatcagttattacgattattatctgccggagtcgtatatcccgcagaccgacacctatatcgcaaaggatgcgtcgatcaacgaaaatattgaaaaactccggctggcggcgacggcgagcctggtcgaacggcgcgacgtgatcgtcgtcgccagcgtctcctgcatctacggtctgggttcgccggacgattatgcggacctctgtgtccggatcgaggtcggcgacaccaccggccgcgacgaaatcctgcgccgtctcgtcgacatccagtacgcgcgcaacgacgcttcgccggagaagggcgaattccgcgtccgcggcgacgtgatcgatgtctacgagccgcagcgggatgattatatccgggtttcgttcttcggtgacgagatcgagtcgatcgaacggcgcgacgtggtcagcggcaaggtcaagacccggccgaaatatgtcacgatgtttccgtgcaagcacttcgttctgccccccgaacggattcagagcgcgtcagatgcgatcctcgccgaaatggccgaccgggtcggctattttgaacggaacaacctccttgtcgaggcgcagcggctctaccagcgcgtaacctacgacctcgaaatgatgaaagagatcggctactgcagcggaattgaaaactattcgatgtatctggcgaaccgccgccccggttcgcgcccgtattgcctgctcgacttttttccgcgcgatttcctgaccgtgatcgacgagtcgcatgtgacgctgccgcagctgcaggccatgtaccgggccgaccggaaccgcaaacaggtcctggtcgaccacgggttccggctgccgtcggctctggagaaccgtccgctgcagtttgaggagttcgagcgcctcaccggagatacgatcttcgtttctgccacgccgggagagttcgagctgtcgcgttccggcgcgccggtcgaactgatc

SEQ ID NO: 2566 - DNA, 15712 bp, synthetic construct
  misc_feature 1..15712: note = Synthetic
  source 1..15712: mol_type = other DNA
taatcaaatgttacgaggagagaaagatgaacgaatctttgtatacacaattaactcaggctgcatttgtacttacgaataggcagaagaacaaagcaaaaatagcggagttgaaaaatagtattgagaaaaagaaaaagcaagaaaatgaaaagtatctcccccctctccccctctccccccatatattttcatatagccccccttttgaatcaaaacatcttttttgaatactgctttaaggggatttttgaaaaaaaactaaaaaaaattaagaaaattttttatgcctttattgccagattgttatgcgattgcaaaggccggtttttattaaaaaatccctctttaaatgccccaaaaaagggctaaaaacgagaggaaaaatagaaaccgcttcatagatacgcgtaagagggctcatagggagttctctgacgtgaataggaatgccgaaacttttcacgtattaacgctcggcaataggaggtcataaaaatgactatcgtccccaaaatgcagaacaaaaaactgacagatgcaacccgagagagcaaaggacgtatgacaccggaggaaatcatgcaaaagattcctgttgaaaagtacaaagactataataactggcttgccatcgctggtctttgtaaagccgcgggctttccattcgatgtttttcatgaatggagcaaaggtgattctgaaaagtatgagagtgaagagtcctgcaaaagtgcctggcagttgacgcctcacgaaacatcggaggaggcgtatgaaaaacttttaaagagagccgaaaataattggacacttccggtgttcaaccctctgcaggcgataacggatgcctccaccatcatccatgaaatccatccagacctgagtttcgcctggtcactcggggacaagaaggggattaaccggaatgctgaaatctcgcaatataccgaagagaaactgcaggaatttttatcagaattatcttgcatggatgatgatgaagactttgaagggatctattggcagctcaataaggttaaactctcagaaaaaaattctgttcgggcagaaaatgtaaagacgtttacctgggcattgctggaatcggatgcgttgcctcttgaggagcagtatcgtctgttgagaagcgttccgttacctcttttcgcaggcatccattccggtgggaaaagcattcatgcacttatccatattggagcagataacgccgaagaatacaggaaacggactgcattggtttatcgctacgcgaagtcttatggaattagcgctgatgagaattgcaaatctcttgggcgttggagtcgatatccgcttggcaggcgcaagcaagggtatcaatacccggtatttgttattccagattatctgcattttgacgaatggtaccagaagtatggtattcagaatttgtcgcttgacactgaaagctcggataccatggtgacgcgcaatatcccactggcagcagatgatcggaaagggaaaaagcctgccgttcgttttcatcatgtggaggagttcatttccaaaataccgggcgcaaaaggagaaatcaaatataatgagcttacgaaaaagttggaggtttctggcttcccctggattgaaacgcctcccggatatgacatgacgcgaattttggcagacgaactttgcgctctcatgcggcccaagtatacgggttgttcttatgaatgcatggtgaggttgatcaatgcgatcggttatagccactcatacaatcctgtcaaagatacactggaagacgtccaatgggacggggttgatcgcatcagtgccgtctgcaataccctgagccccctcgatgatttttcaaggatgcttgtcaaaaaatggttgattcaatgctgggcaatgctgaataataccgagggcagttggggcagtgaaggcattctcactctgcaagggccggagggaatagggaagacatcattttttcgatatttaactcctattcctgaaacgtgctttttgagtggcatagcgatcgacacagatgacagggactctgttcgagttgcgacaagccactggattgtggaaattggcgaatgcgaccatacgaccaagaaacatcaggcattgctgaaaggttttatcaccaagggcaaggattcctacaggcgtgaatatgaaactcagatcattgatcatccacgcatgacctcatactgtgcgacagtgaataccccgcagtttttgacagagggagaaaaccgtcgttggtggttgattccggtcacgaatattgatcttcctgcattgcgggaaatccacaaagaaatctggcaactttgggcccagattaaacgagagtgggagaaagataacaatgctttccggctcaatgaggatgagatgaagattctgataggccgcaataagcctgctcaggagaacatcaaatacgaagtggagatcgaagagttcttcgattgggaagccgcagaagaggaatggaacttcaaaagccgccgggagatccgaggcatggtagacgaaaattttgacgcaaaccttttcggaagagccttgaccaagatctcgaaaaagcataacttggctaccaagaaggttcgaggggtagatatgatcagggttcctcctcaactcatgaagtaggcattgaactgagctctgcagagctggagctggcaatggatttgtcagctccatttttcttgccttagcagtaaaagagtttgatttcttgaattttttacgatatattacgaatagaggatgtgatctatcaaagagtagccaatggaggtattgcgatgaaattccgaatggttcacaacaacttcaacgtgctcgaccttgccaggagcctgaaattctaccgtgacgcttttgatatgaacgaagtgcggcggattgaggcgaaggacgggagctttatcatcgtctatctggaggatgggaacagttcacatcagctggagctgacctggctccgagaccgccaggagccatacaatctcggcgacaacgaatttcatctggcattcaaggtcgatgattacgaagccgcccacgcccgccatgagaagatgggctgcatctgctacgaaaaccccgaaatggggatctacttttgcgaagatccggattcgtactggctcgaggttcttcctgaaaaacggtaattgacggtatatggtctttagagcaatgcgcagtgatttgtactaaagacatgattgtagcagaaaaacaaaacatacagaatataatcaagggtggaaaatgtcaataaatacttacttggacaaccttgctagtagtctcgtactttccgatgccgagaagaggggtattacgacatcacttacttcattgtttagtaaaatagataattatttttctggagtatcaggaaaagctgtatttggctcttatgctcgtcatacaatattaccccgtaatgtcgatgaaaattcagatgtggatatcatgattatatttgataatccagagaatcacaaacctcaagcatttttaaatagaatcaaaagctttgtaaaccaatcttactctcgttctgaaatatatcaagataatccgactattgttttggagttaagtcgaataaaatttgaattgattcctgcatattatgcttatgggacaataaatattcctgatggaccgagtgactggcgttatactaatccatatgaatatgataaaatgttgaatgaatgtaatcaagagaatggttataaaattaagccgatcattaggttaataaaattttggaacatcaaaaaaaattatagattttatgcatcttttgaaatagaaagaaaaatagctgaggaacttagatttgcacgctactcgtgttcctcatatacagactatttgactcgtgcatttgaagaaataaaaaagcttccttccatgactaatactcgtatagacacggcattaaatcatattgaaaaggcccaaatgtacgaatcaatggcgcgtgactacgatgctgaatgtgaaataaagaaggtctttatataatactaaccttgccaaatatgattaatgaacgtcaaaatcaaccagattgccttgaattattgtattgtcagcggtttttatatgaccaagcaagatttctttggggtgtttattttttcgttttggctacatcagtaattatctcgtattgtacagcagaacattacaaggtgtttgctggaacttttgtaacgatcatgactattgtaaatttttttgtcgaatattatgctaaaaaaaatcacagtcaagcggcagaaattcaagcagagtttgataatcgggtatatgaccttggaacaagtaatctacaaatattgctaagcgacttggagcgagagcaaatattaatgattgcaaataagaaaaaaagatttgttttaaataaaaaacacttatcagaatgttctttgcaaaactggtactcagacgtaagcgatgtgcgacgtaataccgtagcaatttacttatgtcaacttgaatgtattgactggggaactcgtctcgtaaagaaatttttaaattggaactatgctcttctgtttttactaacgataataattatgcttttctttggaacattaaaaataggcttcctttttaatcttttatttacattcccactgtttttttgtattgtttgcttgtttcgcaagttaagatcatataaattaaaattagataaaataaaaatggcggagaaactttttgagcttattatccagaatcgggacaaagatattacaatggaagacgtgacttgtcttcaagaaaaaataaatagttttcgtaaaaattcttttttaattcccaattggttctattggctataccgtaatgataaccagaacattgtaagtaaattgacagctaatagaatagcacaactaaagcaatatcgcccagatcttgttgtatcacatgcttcgagatttatagaagtttaactctgcggatattttggcgtaaaattttatataattgtaaagcatggagatgtaaaacaacagacatggaaaacaattctttataacccggttgcccgattcgtactggctcgaggttatcccggaaaagcgatgaaggagctgccgcatggaatttttgacatgcggcattctttaacaattttccagttgatttgccgagcaacctcgattgctgttgcgttcttccagaaaactggcgattaaaaaaaagaaggaccggcgaaccggccccataggtgtaatcaccttcggcatatagccttgttgtgataagacaatcttaacttatcacaaagaaaaaattttgcaaatccatttccgagaaaaggagtaaaatcatgagccgaatcttaggtcttgatgttggaacgaattcgcttggctgggcaattctggatccttttcagaagaggtttaccgatgctggagtcgtggtttttcagcagggtattccagatgaaaaggggagggaggcggaacgttctcccgccgcagaacgacgggcattccgggctgcgcgccgcctgaaattccgccgtcgcctgagaaagtatcacacattgaaagttttgattgcaaatcagatgtgtccattgaccatggctgaattgcaaaactggatccgaaatggaaaatttcccattgaaaaccggaatttcatctcctggctcggcagtacgaaagaaaacaatccctattatttccgcgccaaagccgccgaacggaagttgccgccgcccgaattgggccgggcattctaccatctggccattcggcgaggcttcaggagttcccgcaaggagtcttcctcatcgaatgaaaaagagttgaccaatttcaagaaggaaatcaatcagctgacggaaattttgcaaaaaaaacagtgcactctggggcagtatttttatgaattgttccagagatctgaaaaaatccgtaaagtcaaccgttgcggcagaaaagagcattatgagccggaatttgaaaaaatatgtgaagtgcagaatcttccggaaccctttgtcgccgaaatgagaaaagcgatctttctgcaacgccccctgcgttcgcagaaacatcttgccggtcattgttctctggagaaaaaacgagttcgctgtctgatcggacacccgctgtttgaacgctatcggatgctttcgttcatcaacagtatccgaaagaacggcgtccctctgaatgaagaagaacggcagaaagcacaggccgcttttctggtcggcaagccgagcttcgaatttgaaaaactggttcggaaattataccccaaatatccgaagaatgaatggtcggagtggaattatcccccggataaatcgatcgcgtcatctcccgtcacgaaccagttgcagaaaatactgggaacggaagatcttttcacctggcaccacgagtacatcgggcgcgacaacaaaccgaaaagcatggattaccagaccctgtttgacgctctcacctttttcgatgacgacgatatgctgaaaaattttgccatcgaacgagccggcttgactgtagatcaggcggaaaagttcatcaagatccgaatcccgagcggatatgcgaatttcagtctttatgcgatccggaagattctgcctttccttgacgcagggcatattcagactcgagcggtgtttctggcaaaactgccggatgtaattggaaaagaagtctttcagaaaaacggtgagaaaatcattgcggatatggaacagctggaggccgactggcgtatggagcgggaatcggcgtcggaatccggcgaacgggcagaatttctttccctgacggaacggatcaaacactatctggaggatgaattccacgtgaccccggatcgttttgaattgctgtaccgctacaacagccgttccgactatcaggatcacacccgatccgggattctgccggaagtgaatctggggatgatctacaatccgatggtgtaccggtcgctgaacgtcctccgacgtctggtcaatcatcttcgcaaaacgggaaaaatcgatgccgataccgagatccacgtggaacttgcccgttcggtaaatgacaaaaatacgcgcatggcggttgctaattaccagaaaaagcaggagaatctgcgcaaacagtatcgtgaagcgatcgaagcactgggatatgaagcaacggaagaacagattttgcgttatgtcctctggatggaacagaataagcgctgcctttataccggtaaaccgatcgggctggcggagttgatgagtggtgacaatgttgttgagatcgagcatacggttccccgttcccgcggcggagacagcaacatggagaatctgacgctctgtttcacggattacaaccgttataccaagaaaaacggtttgccgacggcgtgtccgaattatgatgtcaaatggaacgggcacaactccatccgggagaatatcagagtcgttggttgggaggaaaagcgggaaaatctgcgtttgtgtctggaaaaactccgttctgccgccagaggcaatccgcagaaacgggttgaaatgctcgaatgcagaagagaattcgaatactggtgcgccaaactggccgcttttgaaattacggatgaggagttgcgccggaaaggattttccagacgccagcttgtggataccggaatcatcgcccgccatgcggttttcctgctgaaatccgtttatagaaatacctactccagaaacgggcgtgtgacggaatgggcaagaaaagcgtggggagtgcagggattctatgagaaaaaagagcgcagcgatcataggcaccatgccatcgacgccatgtgcattgctgctttgacggaggatttcttccagaagatcagcgcggcatatcgggctgacagggaagaggcgatggcatacgcccgatacagcagtactctgcccgacgcttacccctggcactcgttcccggaagatgtatttgaaaaatcagaagagattctggttgctcattttacccggcacaatgaaacgaagcagaccaggaaacgggttcatcttgtcacaccgtataaaacggcggatggagaactccgacgggtggtgactgccggcggggatacggtccgcgggcagttgcataaggaaagttatttcggacgcatcatagatccggaatccggtcaagaaaaatccgtcctgcgcaaagaactgaactctcaaaatttcaagggcgaatccgctctctccgctatcgtcgatcctgcgattcgggaggccgtttcagcacagctccggttccgcatgagttcagggaaaaacttcaagaatgcgatagacgagggcggttttcatatgaaatcaaaagacggcacttttcaggggccgccgatttgtaaagtccggtgttttgtccggcttgccgaaccgttgaagatccggaaacatgcctatgcttccgaggtggaatacaaaaactacatttatgccgataacgccaaagggggcaatttcaaggcggcgctcttccggtcgccccggggaaaactctgctattgtctgcaatcgctctgggactgggcgaatgagcataagcggtcggattacgttcctccggaaaaacagccggggctgggcgaattcctcggatttattgctccgggaacgatggcgcttgcctatgaaactacgcccgatgaattgaaggaacttgcgccccgggaactcagtaagcggttatacaaaattattgtgattgagaaggatatgcagcgtttaagccttcgttatcactgtgaagccagagccaaatccgaggctcaggcggcaatgaagaaaacgatgggggtcgaagaggcgtcgagcatctcttttcaagagccggccagactgttgaaaatcagcagtgatacattttccagtcatctgatctttgaagggattgattttgtcatttccatagacggcgagatacgtttcctgaaataaaactctcgggaaggaggttttcatgctgaagcggacgctgtttttcggatcgcccggcaggttgttcctcgaacgctccctgctggcctatgagccgcgaggcaccgatggtgtttcggagaaacggacatttccgctggaagatcttggtttcatcgtgctggagtcgctgcagcttgtggtgacgacggcatgcctcaatgcgctggcgaaagagaatattgccgtggtcgtctgcgatgcggcgcacatgccttcggcaatgcttcagccgtttgccggaaacacgctggcgcagcggcatacagaagcgcagttgcgggccaccgatgcgttgaaagcccgtctctggcggcaaacggtcaaagccaagatcaccaatcaggctgaatgcttgaaacgtctgggtttgccggatcagcggttgcgtgtgctggcggaatcggtcaaggcgggagatgccgccaacgcggaagctgtggctgcgcgatattattttcagcagcttgccggaagcaaagagtttttgcgcagtcaggacggggagccaccaaattccgcgctgaattatggttatgccattttgcgggcagccgtggcgcgtgccttgacgggatccgggctgctttgcgtggcggggattcatcactcgaaccagtacaatcctttcggtcttgcggatgacatcatggagccgttccgcccgttcgtagatgaaatggtcttttccgcttgtgattttttctcggtgcctgaattgggaaaagcccagaaatcacagttgctccagcttttgacggcggatgtcatatcgggagcggagagacgtcctcttttgaacagtatcagctatacttctgcatcgctggtccgctgttttctgcgggaagaaacggtcatcaaatatccggaatttgtgaaaaaatgagtgcggaatatcaggcaatcagcaggtacgcggcgatgtggatctacgtgatgttcgatttaccgaccaatacgaaggcgcagcggaaagcggccgcaggatttcgtcatgatttaatcaaggatggattccagatgatgcagttctccgtctacatccggcactgtgcaaccggcgagaatgctctggtgcacatcaaccgggtcgagacgatggttcctgcggaagggattgtcacggttttgaaagtgaccgatcgccaattcagtgacacacggacttttgtcgggagaaaaaccactccacctccacccgcaccccttcagctggaacttttttaaactcgaaaattcttgaagatatcgttggtattaaaggagttgtatctccaataatataacccgccttcaaattacgtcaaatcacaactcaggtttgtgaatctgtatttgaggttgaaatataacccgccttcaaattacgtcaaatcacaacttaatgtaacgattcagatcaaaaaaaccgaatataacccgccttcaaattacgtcaaatcacaactacgaagtcgaccggttcgagaatcagatcaatataacccgccttcaaattacgtcaaatcacaacctccaacgctcaatcacgcgctcgacgatgaatataacccgctttcaaattacgtcaaatcacaacattgggcctgagtaatcagggcgtgtctttaatataacccgccttcaaattacgtcaaatcacaactccacgttgtccaagctcgaagcaaacaaaaatataacccgccttcaaattacgtcaaatcacaactatcaaaaacaatatatattgtatagtgtaaatataacccgccttcaaattacgtcaaatcacaacaaagagttgggatacgacacctccaacttaaatataacccgccttcaaattacgtcaaatcacaacgtccagaaaaaccgggatttcgcattcaacaatataacccgccttcaaattacgtcaaatcacaactcgaggtaacgcagcaccgggaccgtcgaaaatataacccgccttcaaattacgtcaaatcacaactaggggagtaacaatatgagtacaattcagaatataacccgccttcaaattacgtcaaatcacaactcgcgttggtatacgcttgtaaccctaatgaatataacccgccttcaaattacgtcaaatcacaactatagctttgcttcaggggccgtgattttttaatataacccgccttcaaattacgtcaaatcacaacatgtatgagtgggagattctgacatgttaaaatataacccgccttcaaattacgtcaaatcacaactcgcgtataattcatcagatactgcagatcaatataacccaccttcaaattacgtcaaatcacaacctgctcgaccttctgtccgtccacttcagcaatataacccaccttcaaattacgtcaaatcacaacttcccccgcagatgcagcattgttttacgaaatataacccgccttcaaattacgtcaaatcacgatattttcgtgtatggaagaatgattttcttacaatgctgaaccttgtggaatcgacgccttgtgacccggttgcccgattcgtactggctcgaggttatcccggaaaagcgataaggtttccgcgctcttctgctcttcgtgacctccggggatttctcatccccgaaggtggcggaacagaagggctccgcttctcggccagctccactcccgcaagtccgcatatggttcttccccccggaaagaggggcccgcagaaagacgccgtcagaagaaatcagcggacgctctcctgaacggcatccatgctccggccactctccaaagcccgggaaacagcttctcccgccgcctccccaatctgattcagattgaccatcacccgcgccgcgccaaatgccccctcctcggcgtcaatcattctccccgccgcaatcagattgccgaaccccggcggaatcaggctgcgcaacggaatttcatagtattccggcgacgggagcgacggatcgcgccagaaccctttctccgtcggttgggacggtgaacagaactcctctctgccgtcgaggtagagaaaacgagtccccgcacgctcctgactgtggatgtccagccggtaggtcccccgcgccaccgcgtccggaaagcgccggccgctgagcaggtcctcggtcctcaggcgatagagcgagtgaatgtgccgggtttcacgaatgccgatcagcgaggggagcgcttccaataccggccgggtgtagccggcccgggcgatgatgtcctgaatcgcccgcagttgacggcgcccttcgatctcggcggcggtcagtgccgccggttcggaaagatcgctccgggcgatcttggttcccgccagcatgaaggagccgctgtgcggcagaaagctcccccagatgaatccttccggcagatggaactcctgcgcggcctcatgaaccagttcccccagcggacgcttgaactgcggccagctgctcagccgggcacaggcggtcgcaggttgaagttccgcgttgcgccacatcccggccccggcggccgcgcagagatcgccgtcgcctgtcgcgtcgatgaagaacttcgcccggatggctccgagccctcctttccccgccgtgaccacaccggtgatcttcccgtctccatcacggagcacatcgatcgcccgcgcgtggagaaacggcgtcactcccgactcccggatcagttcgtcaagttcaattgccagctcttcggtgttcagccggatgtaccacgaagggttgttgtcggttgccagttccaccgctccacgccggtccagtcgatcgaccacctcctgggtcagaccggcaacgatttgccgtgacccatcgagcgtgaagaaactgtgccagtaacagaccagtgaagccaccgcggtgccgccaaaacggttctgtggttcgacgagcgcaacccggactccgcgccgggcggcggtgaccgcggcgaagacgccggtgcagcttccccccgcgacgcagaggtccacatcggcaaggaccggaattgcggttgccggcaaagtaattttttccatgcttcctctccatcctttctgttttccgttccggcggctttcctgaggaaaaacaacagcggaaacatcccccgtttttcacctttgtcagcaagggacgaaaagccgaaggaatgcttccgcacggaggcccgtcacagttcgccgggcggccggtctatttgttgttgagtttatccagtttccccggcagcgagagcaccgcgcgggccaggtcgatgatgaagtagtagatcaggaatcccagataataggtcagaggcgccaggccgaggatcagcgttgcctcgaatccggtcatgatgtgctcattgagattttccgcgccgaggtggacgacaacgtaaagcatcgtgccgaaggcccccaggcaccagatgaaggggagcatccgcagcagaatcttgaggaagaaagttcccagtccgatgagttcttccccgggcgaacagggcactcccgcctcggtggagaccagttgcggcttcagcgcgcagatcgcactgaattcaaacaccacaaaaccgagcaggcctgtccacaggtgatcgaagtccgattcatcgcaggtgaagtaaatgccgcacacaagaaaaacgattccggtcagcagaaacagcacgatgatgcagtccagcagtgctgttgacgaaaacagactcttcgtattgatcaccagcgccttgatcgactgcagcagcttggtcccgaaataggcgaagaggatgcagaggaacagccaggcgatcccgatccagagcattcccggataatcgtaccggatcgcaccggtgattccgccgatcagcccgatgaggccgagcaggtagaaggagagaaccccaatacggccgataatcgtttccgcacggttcacaaaattctcaaagggaatttttttcaggaactcaatcccgagatcgatccaccggttgagcagagtgcttttggaatccaccagagcaatgatgtcagtcgatttcagagacgccccgcagccgtcacaagtcactgcatcatccggaagctgtttcccgcattttgagcaaaacattctgacccctccttgtgatgttaaatgccgcgcgatgatgggaatatcatcggcatgaaatacagtgtatcatatatttcgggaatgtcaagtttagtcgcttttttttcagtactttctttcagccgcgcagcttctgctcttccggggagcgggagcggcggtccgttgcgccggtgccccggactcccgttccgtcactccggtttgacggtggctcctgcaaggatcagcagcgattcattccctgcttccagctccagggcggagagttccgcagtgggatccggattgtcgatttccaccaggaaaaggccgtattcgagcatccctggcgtgacgaagcggaatgccggcggaatcccgcggctgtccgaggcgaggaaccagtcgcgcagttcctgtttgttgtgcaattccttccccggggaacggctcccgtcgcgccggatgaagctgacctgcccgagcacgtcggcattttccggcacgtatgccgcccccagcaggagaaccactcttttcacttttccggaaaccggaatcgttgcccggctgccgaaggcgcctttccagtccgcgcgggagagcaggcagggcggcgaggagaaccggaacggaatccggccgatctgctctttcccctgcagagccctgaacagttccgtgctgccgacgtgcctgtcgccgaggaaggcgtcgaagccgggtgccgcgggcagcgggagcggcgcgtatcccgggagcggcgtgtcggagagccgttcgagacggatttcgtccatgaccagcgttcccgcctgttcgatgccgatgcagaaggccagtgtcgcgtcacttgccgggatctcgacttccacgcttcgccggacaaatccaccgcccggcgcgaccgcggaaacgtggtatcgtttgaagtaaccgctggtgcggtcgaagacgtcgaagtaaggcgcgatcggacgctccccggtatttttgaagctgccgctgaagagacagcgttccggacccggcacccggctgtcgaaaaaggcgtagacccgcccggccccggaggaggcgagcgccatcgcgtatttcccgtcggatgcgtcggcggtgatcgaaatctctccttccggatcgaactgacggtcgcgcagctgccattgcagggcggccgcatttttcatgccgccggtggcgacgtcgccggaaacctcctcgaaggaggggttcgggcagaagtttgcggtctccgcgatctcccggaacccggcaagtttcccctggctgatcacgtagaggatcgccgtcggccgttccgtccggatttttccggcgcgggaggagtatttcacttcgcgcccgtagagatcgtagagggccttcaccgacccctccagctcccagatcgcagcggcggaggtgcggccgaggacggtcagcgtgctgccgtcggtacgctgaaaactgtgccggaggtcgagcggcgcggcagtgactgttccggtgtagcggtcgcatttgcgcagcatcgcctgggcgaacgccagcgccggaagcgccgggat

SEQ ID NO: 2567 - DNA, 11430 bp, synthetic construct
  source 1..11430: mol_type = other DNA
  variation 3073..3074: note = n is a, c, g, or t
  misc_feature 1..11430: note = Synthetic
gcattctgctatacaaggaaaagctagtgaaggcggtatatcagcaggaatccacaacaacaagaaaaggagggaaaaatttttacaaatcgcgcggatcggaaacattccgccggggcaaagtattcccgcacgccggaatagacctcagaatcaaacacattttcccgagccgctgaaccaacaaaaaaaaggaccggcgaaccggtccaacaggtgtaaatcaccttcggcatatagccttgttgtgataagacgtatttatagtatatcacaaacgaattatttttcaaatgttttttttagaaagggggaaatttatgggaaaaattttaggactcgatgtcggaacgaactctctgggatgggcaattctggatcccgttcaacagaaattttccaatgcaggagtcattgtctttcaacaggggattcccgaagaaaaaggggtggaggccgaatgctcccccgccgcggaacgacgaatcatccgggcgggacgacgcttgaaattccgtcgccgcctcagaaaatatcacaccttgaaactcctgatcgaaaacaagatgtgtccgctgaccatgccggaactgcagaactggatcagaaacggaaaatttcccatcgaaaacaaagagttcatccaatggctcggcagcacaaaagaagcaaatccttatttcttccgcgcgaaggccgccgagacaaagctgccgccgctggaactgggacgcgccttctatcatctggcgatccgccgcggattcaaaagttcccgcaaggacgcctcttcctcaaacgaaaaggaactgaccagtttcaaacaggaaatctgcaacctgacccgcatcctccaggaaaaacagtgcactctgggacagtatttttatgagctgtttcaaaaatccgaaaaaatccggaaagtcaaccgctgcggacggaaagaacactacgaaccggaatttgaaaccatctgcgccgttcagaatctgccggtatcctttgtggaggcgatgagaaaagccctctttctgcagcgtccgctccgctcgcagaaacatcttgccggatactgttccctcgaaaagaaacatgtccgctgccggatcggccatccgctgttcgagcgctaccggatgctcgcctttctcaacagcatccggaaatacggtctgccgctgacccgggaggagcgcagaaaagccgagtcggccttcctgctgaagaaagccagtttcgaatttgaaaaactggttcggaaactggatccgaaaaactggaggaagattctgccggagttcaactatgcgccggataaatccatagcgacctctccggtcacctgtcagatgcagaaagttctgggcacggaggacctctttgcctggcgccatgaatacatcggaggagacggcaaaaccagaacaatggattatcagaccctttttgacgccctgatcttttttgacgacaacgatctgctgaaaaaattcgcgatcgaacgtgccggactcaccggggaacaggccgccgaatttgtcgagatccggattccggacggctacgcgaatttcagtctctgcgcgatccggaagattcttccgtttctggaagtgggacatattcagacccgggcggtcttcctggcgaaacttcccgacgtgctcggcagggagatctttcagaagaattccgagcggatcatcgccgatctcggacgcatcgaagaggactggcgatcggaacgggagagagcaccgtccgatggtccgcgtgcgccgtttctctcgcagaccgaacgggtcagacagtatctggaggatgaatttcacgtgactccggaccggtttgaacagctgtaccgctacaacagccgttcggattatccggacaatacaggaaccggcattcttccggaggtgaatctgggcatgatctacaatccgatggtctaccgctcgctgaacgaggtccggcacctggtgaaccatctgcgcaggacggggaaaattgatgcggagacggaaatccacgtggagcttgcccggacggtgaacgacaagagtacacgcaaagccgtcgccgactatcagaaaaatcaggaaaatctgcggaagaaatacgcggaggagatcgaagctctgggctgggaagccacggacgagcggattctgcgctacaccctctggatggaacagaaccagcgctgtctttacaccgggaagcagatcggcgcggcggatcttctcagtccgcagaatgttgtggagatcgagcacaccattccccgctcccggggcggagagagcatcatggaaaatctgaccatctgcttcacgcactacaatcgctatacgaagaagaacaatctgccgacgatgtgcccgaactacgacaaaccctggaacgactgctcctccattctggacaacatccgatccgccggctggttcgaaaaacgggaatccctccgcgctcaggcggagaagctcaaatccgccgcccggggaaatccgcagaaacgcgtggacaaaatcaaatgcgaaaaggaactggagtactgggacaaaaaacttgccgcatttgaaatcaccgacgaacagctgcgcaagcagggcttctccaaacgtcagcttgccgataccggggtcatcgcgcgccacaccgttttccttctgcgctcggtctacaggaacacctactcccggaacggaaaagttacagaatgggtccggaaggcgtggggggttcagggattttatgaacggaaaaaacgcacggaccacaagcatcatgccgttgacgccatgtgtcttgcggcgctgacggagagttcctatcagaagatttcgacggcataccggatcgattcggaaaaagcggccgcccacatccaggatgaacaaaacactcttccgacgggctatccatggccggaatttcccgaggatgtgttccggaaaaccgaagagattctcgtctaccactcgacccgccacaatgagacgaagcagacccggaaaaaggttcaccttgtcacgccataccgacgcgcggacgggaaactcatccnnccgggttgtgaaaaccggcggcgacaccgtccgcggtcagctccacaaggacagctatttcggacggattctggatccggaatccggcgaggaacgctccgtcatccgcaaagaactgaacctgaacaattttgccgcggaagccaaactttccgaaattgtcgatccgaaaatccgggagagcgttcaggaacagatccgctcccgcatcaaggaggggaaatccttcaaggacgccatgaacgaaggcaatttccgcatgtggaccagagacggctctttcaacggccccccgatcctcagtgtccgctgctttgtcagcagcacagaaccgctgaaaatccggaaacacgcctattcctccgacaaggactacaaaaaatacatttatgcggaaacagccaaaggaggcaatttcaaagccgcgctctaccgctcccccgacgggaaactcagctaccgcctgcagtccctctgggagtgggcaaccacgcacaggaagccggattacatccctctggaaaaacagaccgggaatggcgaattcatcggtttcatttcgccgggcaccatggctctctcctatgagaattcgcccgacgaactgaaaaaactcttcccccgggagctgaataaacgtctgtataagattatcgtgatagaaaaagacgttcagcggttgactcttcgttttcatcgggaagccagagccaaatcggacgttcaggcggaaatgaaagaaaaactgggggtcagagaagcctccgccatctctttccaacagccggcgaaactgctgaggatcggaccgaaggagttttccaaacatctcctgtttgagggaattgattttacgatctccattgacggcgaaatccgtttcctgcgataacgatcgaaaaagagggggggaatttcttatgttgaagcggactttgtttttcggttcgcgggggcgactgtttctggaacggtcgcttctggcgtatgaagcggaaaaccgggaaggagttgtggaaaagcggacttttccattggaagatctcgggtttcttgttctggagacacagcagctttcggtgacgacggcatgtctgagcgcactggcatcggagaacatcgccgttgtcttctgcgatgcctcgcacatgccagccgctgtgctccagccctttgcgggcaacacgctgactcagcgccatacagaagcacagctgcgggcctccgccgcgctgaaagaccggctgtggcgccagaccgtacaggcgaagattctcaatcaggcagcctgtctgcaacgtctcggtcttccggatcagcgtctccgcatgctggcgggcacggtgaaagcgggcgattccggcaatgcggaaggcgtggcggcccgctgttactttcagcagcttgcgggggcggggaattttctgcgcagccgggacgggaaccctccgaatcccgcgctgaactacggctatgcggttctgcgggcggcggtggcgcggggactgacgggttccggccttctctgcgcggcggggattcatcactccaatcaatataatccctttggcctggcggatgatgtaatggaaccctttcgtccgtttgtggatgagatggttttttcctcgcgcgatttttttgcggttccggaactgggaaaggagcagaaggcggagctgctccggctgctgacggcggatgtgatgtcgggaacggagaaacgtccgcttctgaacagcatccgctatacatcggcctccctggtccgctgttttctgcgggaggaaacgcgcattcaatatccggaatttgtgaaacgatgagtgcggaatatcatgcagtcagcaggtacacgatcatgtggctttacgtgatgtttgatttgccgaccaacacgaaggcgcagcggaaagccgcggccggattccgtcgggatcttctgaaagacggttttcagatgcttcagtattccgtgtatcttcggcattgtgcatcttcggagaatgcgcaggtgcatatgaagcggatcgaagcgatggtcccggcggaagggattgtgatggttttaaaagtaacggacctccagttcagcgagacacgaacctttgtcggcaaaaaaacagttccaccgccgcccgcgccgcttcaactggagcttttttagggaaaatggctccagcattttccaacataaggtgctgatattaaaggatctacagatccaataatatagcacacctcaaaaaaacgtcaaatcacaactgcttccgtccactgttacatcgaaatgggaatatagcacacctcaaaaaaacgtcaaatcacaactgatgatgttgtcggatttctctgccgaacaatatagcacacctcaaaaaaacgtcaaatcacaactatgctataaagggggatcacggttgaagtaatatagcacacctcaaaaaaacgtcaaatcacaactgcgcctcactcaagagccgcacaaggtaaaatatagcacacctcaaaaaaacgtcaaatcacaacgctccggtccaccggaagccataaccagcgaatatagcacacctcaaaaaaacgtcaaatcacaaccatattttaattttattcgtttttcaaaaaaatatagcacacctcaaaaaaacgtcaaatcacaacgacggaactatgacatttgaagacttgacaaatatagcacacctcaaaaaaacgtctaatcacaactactggagagttgcggagtctccgttgcgaaatatttaatccagaacatgttttttgcaagctcattgaacaaaaaaacggaaaagaattgaaaattctcgcttctgccgaaaaatgaatatctcgtcttcctcttcagaagaaatgtcaaacctctgcgtgccccccctccccaactcaaaaataaaaaattctccattccagactttcccgacttgacacataaacattagatactatattattaagcagctaaacaatatcaaaacattaatcaataggagatttattccccatgagagaagatcaaatctggatgaaactccttcaggtcatggaccgcgtccgcgaaatccatcaccaggaaggcttaatcgaacgacctccgcttcatacaacaatcgcagaagcaaaggtcatgcactgtattctgttcagcaggaacggctgctccataaaagagatcgcagaccgcctcggaatcacgcagggagcggcttcccagatcgtcgaaaaaatggtccggaaaggaccgctgatccgcgttcccgacgagaccgaccgccgctcggtccgcatcatgctctctccggaaggaatggaacgccatcggcagatcaccgcgtccttccgatccatcatgcggaatctgctggagggcgtccctccggacaaagtcaaaatctttgaggaagttctcgatcacctgatcgaaacaaagaaataacattctacgcattgcgggaggacagaaacatgaaaaagcaaagacaaaaactctattttactctgatcctttccgttctgacactctctttctgtccggccgcgccgaaagccggaggaagtgtggttgtcggagcggaaaaagtgacggaagcggaagattatgaaacgcgacactataccggacaggccgtttcaaaatcggtggtcaacatcgtcgcccgagtctccggagagattctcgaactcggattcaaggacggcgacgtcgtgcgcaaaggacaggtgctctataaactcgatcccgtccagtacgaagccgccgtaaagggcatcgaagccagcatcgaaaagtgcaaggcggaactcacgtatgcgcaaagtaatttcaaccggatcaatctgctctatcagaaacaggcgtcgagtctggataccatggaaaacgcaaaggcaaccctcggagccgccaaagccgctctgctcgccgccgaggccgaactgattacggcaaaggacaatctcaaaaacacggtcatcacggctccgcagggaggactcgtcggcgtcaccgccttcacgcagggaaactacatcacgccaaattcgggaacacttctcacgatcattcaggttcagccgatccgtgtccgcttttcgatcagcacggcggatcttctcgcgatgttcggcagtcacaaggagctgatggaaaacggaaacgtcaaaatccatctggccgacggaaccctcttcggagaggtggggaaaatcgaactgctgaacaacgaggtcaacgcaagaaccgacgccatccaaatctatgcgagttttccaaacaaggaccggaaactcattccgggcagcacgctgtcggtcactctttcccgcaggaacggaaaacgtcttccggcggtttcgccctctgcgctgatgcacgattcaaatgggtcgtatgtctacgtactcgatgcggcgaataaggtggagaaacggtatgtcacgccgggcaatgcgacaccggaacggcagctcattcagaagggactgaaagcgggagagaccgtcatcgcaaaaggaacgcacaaggcgcttccgggaatgaccgtcgaagccgatttcggaaagaaggggtgaatcaatgttttccagaattttcattgaacggccccggctggccatggtggtgagtctggttctggtgctgaccggaatcatctccctgttcaagctgccggtcgcggaatatccggaaatcgcgccgccgacgctctttgtttccacgacatatccgggagcaagcgcggaggtcatcgtgcagaccgtcgccattccgctcgaagacgagatcaacggcgtggacgaccttctctatttctcctccacatgcgacaactccggcaactattcctgccgcgtcaccttccagagcggaaccgataccgacattgcgatggtcaatctccagaacgccatcagccgcgcggaagtgaatctgccctcggatgtgaccaaaaacggtgtctccgtggaaaaacgcggcagcgatctgctcgccatgttcgcgttcctcaccgacggttccaaaatgaacctcatggaactgaacaactatgtggattcaaacatcaaagacgcaatcagccggattccgggggtttcatccgcggagatcatggcctcgcgcgagtactccatgcggatctggctgaatccgctgcggatggccggactcggaatctccacgtccgacatcaccaccgccgtggaatcccagaatattcaggccgccgccggatccatcggaaccgaacactccaatgagtatgtctactataaactcaacgtgaagggacgtcttgtcacgccggaggagttcgggaacatcgtgatccgtcacgactcggacgacagcatcgtccggctcaaggacatagcaacggtggaaatcggagcaagctcctatgcggggaaaagtctgttcaacgggaaggagtcggtcggactgggcgtctaccggaccccggatgcgaacgcgctggagaccgtgaacaagatcaaggccgaactggaaaactggtcgcgcatgcttccggagggcgtcagctgcgttgtcgcctacgacccgacggaattcattcaggtgtcgatgacggaaattgtcacaacgctcgtctccgcgcttcttctggtggttctgatcacctggctcttcctgcaggactggagagcgacgctgattccctccatcgccatcccggtcgccctgctcggaacctttccgttcctactggcgctgaactacagcatcaatgtgctgacgatgttcggactgatcctggttgtcggctctctctgcgacgacgccatcgtggtggtggagaactgccaggccctgatggagcgggaaggactttctccgaaggaggccgctctcaaatgtatgaatcagatcaccggcgccatcattgccacgacccttgtcaccgtggcctgctatgcgccgctggccttttacggaggaatggtcggcaacatctacatgcagttcgcggtctcgatgtgcattgcgctctgtctttcgaccgtggtggcgatgacgctgagtcccgcgctgtgcgctctgctgctccggaaaccggacggacgggtcccggttttcttccgtcctttcaaccgggttctggacggaagccggaaaatctactcgttctttgtcggatttctcgtccggcgcgcgctgctgacgctcgtgcttctggcggcggtctgcggaacggtctggcttctgtacggcaagatccacagctccttcctccccaaggaggataaaggggagatcatgtgcgacatcgaactgccgcgcggcgcctcggtctcgcggaccgatgccgtgctgaacgaatttctggaaaagatttccgatatcaaaggaattcgctccaccatgatcatctccggaaagagcgtgatgtccggctcgggggaaaatgtggcccgctgcattgtccgtctgaatccgtgggatcagcgcacgacgcaggaactgagtctggattccatcatcaatcagattcaggcacaaacccggaccatctccgacgcatcggtcatttcgttcacaccgccggcaatcatgggactcggtgcggcgggcggcgcaaacttcaatctctgcggaatcggcgatgtcgattccggcgaactcgccacgctcgccaaacagtttgcaatggaacttgccgcaaaaccggaaacccgctccgccatgacctcctacaatgccgacacccctcagctttttctcgacatcaatcgggaaaaggcggaaacgctcggcgttgccaccggcacgattttctcaacccttcagagcaaactggcctcgctctatatcaacgacttcacattcctcggacgcaactacgaagtcaagatgcagtccaccgcgaacaaccgctcgacactggaccatatccgggagatccaggtgccgaacgattccggtgaaatggttcccctcagctccctcggcactctccgctatatgatcggaccgaaccagattacacggttcaacaaaatgagcagtgcggaactcaatgttcaggccgccaccggagtcagctcccagcggatctttgaactggtggaaggaacaaaactgccgtccggctatcgagtcgagtggacaggactgagctatcaggaaaaacagaaccagggacagattgtctatctgatggcgctggcgctgctgttcgcgtatctgttcctggtcgcccagtacgaaagctggaccattccgattccggtgatgctcgcggtgacctttgcgctcctcggagcccagctcggactgctgatctccggagagaccttgagcatctatgcgcagctcggcatggtcatgctgatcggtcttgccgccaagaacgccattctgatggtggagttctccaagcaggagcgcgagagcggcaaaagcgtatttgaagcggctctgaacggagccaatctccgataccgggccgtgctgatgaccgcgtggagttttcttttcggcgtgtttccccttgtgatcgccaccggagccgggtccgggagccgccgcgccatcggcattaccaccttttccgggatggttctggcgactctggtgggcatcgtattcaccccggcgctttatgcggcgtttcagcggatccgggaatatctgaaatccagagttctccgcttccggaaggcccggtaacaaacaggaagagcgcgggaaagagcttcacttcttcacagcaaagattccctttgcagaacagaagagagtgtggccgtcgtacggcagaggaacaaacgcacttctgccgtacggaattatcctgccgccatacattttcatcttcgccggtccgaaaaggaatgacgctttcggaacactccttccgggttgtcggaaactcaaattattccttctttccgggaagtggcatgacgggttattttccaatccgaacgggggaatttacatgatttcccgcacggcaaccgctttccccgcttgaatttcccggattgcgcgttacatttcaaactgaaatccagaaatcgcggcaatatcctcaaaaccgatgaccgtcccctcctccatgaccagcgtcttctccggaacggaaatatgccgcacccgccccgtgacggtaacatacgcaccgccagatttccggtcatcgggaacgaaatattcgatggtcgcctccgggcgatccggcagattggcgatgagcgcggcaagacggcggttcagttcttcggcctcctgcgcgtccagttcgcgcctttcggcggtcagccgggcggtttcccctaccgccgcttcgtagcccgtcagcgcggcaaacggcgc

SEQ ID NO: 2568 - DNA, 3321 bp, synthetic construct
  misc_feature 1..3321: note = Synthetic
  source 1..3321: mol_type = other DNA
cgtacaatctcggcgacaacgaatttcacctggcattcaaggtcgatgattacgaagccgctcatgcccgccatgaaaagatgggctgcatctgctacgaaaatcccgagatgcacatctacttttgcgaagatcctgacaactactggatcgaggttattcctgagaaacggtgaaaaatctgccgcatggagtttttgacatgcggcttttttttggggccgttttccggtttggttttccgggcggtctcgattccagttacattctccctgaaaaaaagaaggaccggcgaaccggccccataggtgtaatcaccttcggcatatagccttgttgtgataagacaatcttaacttatcacaaagaaaaaattttgcaaatccatttccgagaaaaggagtaaaatcatgagccgaatcttaggtcttgatgttggaacgaattcgcttggttgggcaattctggatccttttcagaagaggtttaccgatgccggagtcgtggtttttcaacaggggattccggatgaaaagggaagggaggcggaacgttctcccgccgcagaacgacgggcattccgggctgcgcgccgcctgaaattccgccgtcgcctgagaaagtatcacacattgaaggttttgattgcaaatcagatgtgtccattgaccatggctgaattgcaaaactggatccaaaatggaaaatttcccattgaaaaccggaatttcatcgcctggctcggcagcacgaaggaagacaatccctattatttccgggccaaagccgctgaaagaaaattgccgccgcaagagttggggcgggcattctaccatctggcaattcggcggggcttcaaaagttcccgcaaggagtcttcctcttcgaatgaaaaagaattgaccaatttcaagaaggaaatcaatcagctgacggaaattctgcaaaggaaacagtgcactctggggcagtatttctatgaactgttccggaggtctgaaaaaatccgtaaagttaaccgttgcggcagaaaagagcactatgagccggaatttgaaaaaatatgtaaagtgcagaatcttccggaaccatttgtcgccgaaatgagaaaagcgatctttctgcagcgtcctctgcgttcgcagaaacatcttgcaggtcattgttctctggagaaaaagcgtgtccgttgcctgatcggtcacccgctgtttgaacgctatcggatgctttcgttcatcaacagtatccgaaagaacggcgtccctctgaatgaagaagaacggcagaaagcacaggccgcttttctggtcggcaagccaagcttcgaatttgaaaagctggttcggaaaatatatccgaaatatccgaagaatgaatggtcggagtggaattatcctccggataaatcgattgcatcatctcccgtcacgaaccagttgcagaaaatactgggaacggaagatcttttctcctggcgccacgaatacatcgggcgtgatgataaacggaagacgatggactatcaaaccctttttgatgctctgaccttctttgatgacgacgatatgctgaaaaattttgccatggaacgagccggtttgaccgcagatcaggcggaaaaatttgtcaagatccgaattccgacagggtatgcgaatttcagcctttacgcgatccggaagattctgcctttccttgaggccgggcatattcagacccgcgcggtgtttctggcaaaactgccggatgtacttggaaaagatgtttttcagaaaaacggggagaaaattattgcggatatggaacagttggaggccgactggcgtatggagcgggaagctgcgtcggaatccagccaacgtgccgaatttctttccttgacggaacggatcaaacactatctggaggacgaattccacgtgacaccggatcgttttgaattgctgtatcgctacaacagccgttccgattatcaggatcattcccggaccggtattctgccggaagtcaatttggggatgatttacaatccgatggtatatcggtcgctgaacgtcctccggcgtctggtcaatcatcttcgcaaaacgggaaaaatcgatgccgataccgagatccacgtggaacttgcccgttcggtgaacgataaaaacacacgtatggcggttgcgaattaccagaagaaccaggagaatctgcgcaaacagtatcgtgaagcgattgaagctgaaggcgttgaagcgacagacgaacagattttacgttatgctctctggatggaacagaataagcgctgcctttataccggcaaaccgatcggactggcggacctgatgagtggtgacaatgttgttgagatcgagcatacggttccccgttcccgtggcggagacagcagtatggagaatctgacgctctgttttacggattacaatcgttacatcaagaaaaacggtctgccgacggcgtgtccgaattatgatgtaaaatggaaagagtacaactccatccgggagaatatcagagttgtcggctgggaggaaaaacgggaaaatctgcgttcgcgtctggaaaaactccgttctgctgccagaggcaatccgcagaagcgggtggagttcctggaatgtaaaagggagtttaattacttgtgcgcaaaactggcggcgtttgagcttacggatgatgaattgcacctcgcgggtctcgtccagaatctcggcgtcggtgacgtcagatacagaattacgcatatgttgttgttccttatctgcacgcgcaatgggcacggcatgcggccgcgcgggcgtgcttggtagtgcgctaatacatacaaaaacaggtgcgcacagagaggacgttgctcagcacgctggcgatcgctttggcagccctatcacgcgccgtccagacgcagcagctctaagcgatggagcagattcgccgccggttagtatacccgtgcttcgcatgcccccacgtaaaccacagatgacgaggcggacgaggtgggcccggctgattgtctcaatctgtaacatctacagggcgaatcttcctctacgtgttacagatcgagacaaacggtcgacacggctcacaaacgtctcaatctgtaacagttaacgagtaaaatcggccctaattgttatagatcaagacagagggggatttccgtccagtccaaaccaaatctctcagtcttcctgcaatttcgaacatgtggcctataatgttgctttagttacgctatatattgcgcagccatttaatacgtcgcccaccggggaccattaattcctatcgccatattggcta

SEQ ID NO: 2569 - DNA, 23222 bp, synthetic construct
  misc_feature 1..23222: note = Synthetic
  source 1..23222: mol_type = other DNA
aatatggccgcgtcgacgccgatatttcccgagggggcaaagcccagtccgcccgtgagctgtgacgcttcatcggagaggatgtcgccgaagacgttggaggccacgactacgctgtagtcctgcgggttcttgatgagccacatggccgtcgcgtcggcgttttcttcgtaggctttaatgccgtactgctcgtattccttcgcgatctcaaggaactttctcttcatcatgccgtccgtctggcggatgacgttggccttgttgccgcagtgtaccgtcttgcggccggtcgccttcgcatattcaaacgccgcgcggattatgcgctcgcagccctgctcggagaatacgcgccatgacacggcgacgtcgcccttgccctcgcggaagcggtccatgcccttgtggaggtcgaacatctctttgggaagcgggaagaattcaaccgccgcgtagaggtcttccgtgttctcacggaacatgacgatgtcgatgtcggggtccttcgcgagaggcgtgccgattcccggcagcttcttcgcggggcggatgttgatgtagaggtcaaagagctggcgcatctgaaggatggcggacttgaagccctttacgccggcctttgaggtgatggccgccataagggtggcgtccgtatcgcggatcgatttgatcgtttcgggcggaacggtattgcagcggggatcgccttcgccgaatttcttgttcgacttctcccacatgcaccagccgaggtcggcgcggtgccagttgatgggcagattcatcgcgtcaaggacgaggagcgcgccttccatcatatcgaagccggaatcgtctccagccatgtaggttacatcgtagcggtccttcgtctcttttaccttcattatgttgcgtgccattgttgtagttcctcctcttaattttttattgcttctaagttttctttaaatactcaacttacccatattacgcagatcagatgtgccggctgcgacgcgaacggcacatctaatcaacggtgctatagaccgagctctttcttgacgtgcggaataagcccgccgtccttgatcagtccctgcacgaattcgggatagggggggaagggatattctttgccgccggcgatgattacgccgcggtcaaagtctatctccacaacgtcgccggcgttgatggcgtccaccgcgtcggcgcagatgatgataggcagcccctcgttgaagcagttacggtagtagatgcgcgcgaagctcttggcgatgatcgccgctatgccgcgctctttgaggcaggagaccgcctgctcacggctggagccgcagccccagtttttgccgccgacgatgatgtctcccggctgggcattctttgtaaattcggggtcaaggtcttcgcaggcgaccttcgccatgtccgcgcgttccttgatggtatatgtgtatttccccgggaagatgacgtccgtattgacgtcgtcgccgtatttccagactttaccttttaccgacatgattatagcgcctccctcgggtctgaaatttcgcccttgattgcagatgctgccaccgtcatcgggcttgcgagatagatgaagctctctttgtcgcccatgcgtcccttaaagtttctgttggccgtgctgatcgccgcctcgccgggggcgaggattccctcatggttgcccatgcaggggccgcagcccgggttgcagatgatgcagccggcatcgaggaatatgtcgaagagtccctctttcatcgcctggcggtatacgatccaggaggcggggatgacgaccgtgcggacggcgacttttttacccttgaggatgccggcggcgagacggaggtcttcgatacgcccgttggtgcaggagccgaggaacgcctcgtggatcggggtgcccttcacttcctcaatgggagcgtagttgtcgaccttgtgcggcttcgcgacgccgggctcgatgtcgccgaggtcgtagtggtactccgccgcgtagaccgcgtcttcgtcggcccagaggggctcccacttgtcgctcttcgcgttgtcttttatcgcgtcaaggaccttctggtcgggtttgcagacggcgttcttcgcgccgaattcaatgcccatgttgcagagggtcatacgctcggcaatgctcatgttctcaatgccgtcgccgtggaactcgacgctcatgtagtcggctccgtcggcgcgcacgtcgccgatgaacttgaggatgaagtccttcgccgagacgcctggcttaaatttgccggtgacgacgaccttcatactctcgggaactttgaaccagagtttgccggtggcccagaccgccgccatctcggaacggccgatgccagtcgagaaggcgccatatgcgccgtaggtgcaggtgtggctgtcgcttcccaccataacgagtccgggaagggcataaccctcttcgcacatcttctggtggcatacgccgccttcgctcttcacgtcgtaaaagttggggatgccctgctctttcacgaactcgcggacctctttgtggttcaccgcgtggtcactggagggcgcgggaacggcgtggtcaaggatgaagcagatgcgctcgggatattttacgtttttgacgccgatcttcttaaaggtcctggcgatcggagcgccgttgtcgtggctcatgcaccagtccggctcgaccgttacgacctggttggctaccacttcatatccggccgccttgcccagcgccttttctgcaaatgtcttgcccataagatttatcctccctctgttactctctatttcgcagccgctttggccttcatgtagttcatgaggccgccggccttcattatgtcgttttcgagatcgctgacggcatcgccgtggaaggtgttgccgttggtgacgtctttgatcgttcccgttgagagctcaacctcaagctgatcgccgtccttgatctttccctctttgatggcttcggagatgcccttcacgaagaggacgggatagccgttgttgatcgcgttccggtagtaaatgcggctgcaggtctccgcgaggacgcaggggactcccgcgtactcgaggcagtagacggcatgttcacggcttgagccgcagccaaagtttttgccggccaccacaaagtctccgggcttaacttccttggcgaagttttctttgccgggatagtattcgaaggcatactgcggcatgttcttgggatcggtctccgcgagatatttgttgtgatagatgaggtcggtgtcgacgtcatcgctgaatacccacgctctgcctttgagaatttcgctcataacactcttcctcctctacttcagtatatctctggggtctgtgatgcagcccttgacggccgtagccatcgcggtcatcgggctcataaggtaggtgtggcttcctttgccgaccttgccgatgaagttgcggttcgttgtcgagcagcccacgtctcctgacggcatcgctccgtagtgctccgccgtgcagagcgaacaggtcgggtttgtaaagacgattccggccttgaggaagtcagcggccattccctcctgcacgcagcgcagctgtatctccgtcgtcgagggggtgatgatagtgcgcaccttcgggctgaccttgccgccgccggccatcagcacttcgtgagcggctttgatgtcttcataacgcccgttcgagcaggagccgatatggacctggtctacgaccgtacccgcgatttcacgcaccggcttcacgttatcgggggcgtcggggcaggaggcgagcggttcaagatccgtcacatcgtagtggagaaccttgcagtattcggcgtcgggatcggccttgagctcttcggcgagcttcgccacttcgggtccggcgcgctccacaagccacttaagcacttcgccgttcggcatgatgaggggaaccttgccgctcatctcggtgaccatcgagcagagcgtgatacgctcgtcaagggtcgcgttttcaatcgtctcgccggtgaattctacggcgaggaagtccatgccgccggcgccgaggtcgccgacgatatgggtgaggaggtctctcatgcagacgcccctcttaaactttcccgtcacctcgatcttcatcgtctcgggaacgcggaaccagtttgtaccagcgatgtaggaggcggcgatgtcggagttgccgacgccggtagcgaaggagcctacggcgccgaggaggttcatgtggctgtcggtaccgaggacgacgtcgcccggctttatcattccggcttcaagcattacgtgctgtccgatgccgtggttgatgtcgaagacgcgggtgacgccctgtttcttgcagaactcacgaattatcttctggttggtggctaccttctccgagtgagcgggagcctgaaggtcgaaggtgaaggcgagtttgtcggggtcccataccttcgcgtccttgcccatctccttttcaaactggagaactacgttcgcgccgccgaagtcgcggcaggtcgcccagtcaatcttgcaccagacgcggtctccgacctttacaggatggccggatgccttttccatgatcttgacgatagatgtcttgcccattttagatatccctccgtattcgattaggtggataatattaactatttcattccaaggaacgacttcacggactcgaagttaatgaagtcggccttgttgacgagtacgccttcggggctgcggagcgtgccgtcgccttcgtgggcgtggttggcgatgatgtggccgatcgcgtcggagcagccgttgcgcagcgcgatgaccgtccccgagaagggatggcggaggttcttgcccatcgttgacttcaccgtttcgccggcggcgttcttctcatactccaccagcttgcctacgtcgtgaagaagcgcgccggcgacaagaaggtcgttgtcgatcgtgaacttcgcgtcctttgcggagtagatggcgttgaactcatccatcgccctcttcgcgacgcgcgttacgccgcggacgtgctcaagataagagaaggggcagttgggaataaggagcgtgaaggggatcttgtccatatcctcgggctcccagccgcctgtcttaagggcgtccacatatgaggccactaccttggcctgcagttcggggtccttgatccattcgatttccggaaagagctctctgatttttttctccattgtcacaattcctcctacaaatttgttgtctgtcccacacttgttttctttttatatttattcgcccgccgcaattcccttgtgcagcgtgcggtaaatcctgtcgatatgctgggaggccgcctcgcgcgccctctccacgttatgatcgaggatcgcctcgtacatttccttgtgctcgttgagaaaggcgtccttgtcgtcgagaaggttatatattctctcgtgcgtcgcgaggatcaggtcaaaattcatccttgtaaggtttatgaatacgaaattatgcgtcgcctcggcaagcagaagatggaagtcaaagtctgcctgcgcacgctcttcggggctggaaagagtcttttccgtcgccgttatgacgcgcagtatccttgtgaggtccgagggagtagcgcgcatcgcgctttcaccggcgatcgcgggatcaagtatgcggcgagcctccataagctcaagtatggcggaatcctcaagctggatcgtgctgcggtccgcggagatggtgcgggggtgacgcacaaagcgccccttacctgggatcgactcgataagcccaagaagctccatcacacggaaggcctcgcgcagcgaactgcggctcacgccgaaagtatccataagctgacgctccgaaggaagcggatcgccaggaagaatattgccagcggctatttcacctttcagtttttcaaccactttttcatagattcgagttcctcttgaaactggcgcgtctatcattgtgaaaaaacctccttggtggactacccagtacaccttatactactttttagggaagttggcaagcctttttacgtattctaaatagtccaataatttatgacaatttaccgcaaacaatgagttcaacatattgtgaacgcaattaataaccttgataccagtaatttttccatgattttgggcggttaattttatttctgcgtacttataaacttttgtcctattttagatatgatatttttatttgcgaaatcttcacttatggtctgaccgcgttttcattatgcggaaagcacaaatttcctgcactttcagtgtgtttatcgcacaaagcggagtcaaagacttccgtaaagagacattttgcattaaactctgaaccgtttaaaagtttatattttccgaagaaagggtatcgatgacggacaaaattatttcacaaactggacactccaaaacaacctccaaacccatcgccacgcgggagctgctcggcctccgcggcgcgcggctcctcggcgtgaacccaccggtgcgggacttcgccttcatggatctctggtccaaaccgctgggccttctttaccttctccagagcctcagagagcataacgaggtccgtctgcttgactgcatcgcgcaggcagccgacggagaaaagagcttcgggagggtgaaggtccgaaaggaagagatcgggaaacccgaagtttaccgcatgataccgcgaagatacagccactttggtctgaccaaaagtgaaataatatcattacttgagaggcaggagcgccccgattacatccttctcacctcggcgatgacctactggtaccccggcgtgagctgggcaatcggcgtattaaaggagatatttccacagagccccgtggtactcggcggcatatatgcaggcctctgcccggagcacgcggcgggactcggggccgattacatcattggagaccgctgcgagccggaggcgccctatcccgcgatggacctctacggcagaccgtcctacggcgtagttatgacctccttcggctgtcccttttcctgccgttactgcgcctcaaacgtattgtggccgcgataccaccggcggggcctcgaagaggtcctgcgcgagatcggcttccaggccgccctgggcgccaaagacttcgccttctacgacgacgcgctgctgctggataaagaaaaattcttttaccctctgtgccgcgaaatcatggcgcgctggggcggcgggctgcgcctccatacccccaacggcctccatgtacgccagatagacgcggaatgcgcccgtatactttacgagagcggcttcaagaccatccgcctgtcgctcgaaagcattgatccgggagtggcgctcgacagctccggcaaggtggcgcgcggcgaatatgccgccgcggtgaaaaacctgcttgcggcgggatatgagacaaaggactgcgagacctacatcctgctcggcctgcccggacaggcccccgcctccgtccgggatacgataactttcgtccgcgaccacgggggtacgccaaagctcgcggaattctcccccattcccggcacgccgcactttgaggcggcggcggaaaagctgcctgaattgagaacagagcctctgctgcagaacaattccgtctactgctcctatttctcaaaagacatcacgccgcaggagctgcaggagctgaaagatatggcaagaagtaagagtaactgacgccgcctaccgcccacagacggcaaaggctaaaataacgtgaaacacaaaaacgccgccctgtcatgaaaaagcggcagcggcggcgcagtctccgcaaagttataaaaacggatgcgaatacagccgaaaggcgtccatcatcgtcggaataaaaaagacgatattggcggcggcaagcgccatagcgagaaggctccagacagccggtcccctatacctgcgggctgaacaggtcactacccacgaaacgacgacaatgagaataaaatcaaagacatacgaacagagataatacagctcaggacgcacgcccttggagacaaacagccataaaaacctgaatatataaccgcggacatgcggattcagcagtacacccacgagccagaaggcggcgggcaacggtatctgccagtcggaggcatcacgccgctccccgccggccaccgtaccatacgaaagcgttccggagccgggacgctgctggccggtcagccatttatcgcctccgccgcccataatacgtaacgctggcttaccgaaagaactattatccactgtgttctgtgcgggaacctctccgccgtggccatccgcgccatatctgccgtaatatgacatatccccagcctccgttctttaatgaaaaactgcggccagagtaacatcctggggaaaatcagtcaacggaaacctcccgtccaatgcgaagcctaggccagcttcctccattgatatgtctcataggccgttcccgctaagatgaagacgacgacggcgcggaatccgatcaccggatcggtgaaaccgctgatataagaggtcgtcagcggcacgagcgcaaaatcaaaggccaccagaaaccacgtcagggcgatcgcctgcggctgcagccgcaggggcgcgttgtcagagacaagcgccagatgcagcgggaaaccaaaccccatgccgacgccgaaaacaatccccaaaagcatcagcgaaccgtggctggggctgatcgaggcaaaaagcagcataagcgacattccggcgattatcggcaccgagagcctcctgcgcggatagcggtcaagcaccttaccgagaaagaggcgcaccagcacgccgaccacggcattgctcgagagaaaataggaggccatcaggccgtagctggaggtcatcgaggccataaaggcggaggcggcgtccgtcaatgaaaataggaacatcgaaaagagcgccagagacaactccggaatcttcaggcagtcgccgatgccacaaaggggattcgccgccgcgtgcgaggagtcaaggacgacatccccggtgttgaggacaaagaccgtcagaaaggccatcgccgaggtcagcaaaacgggaatgataatataaagggtaaaacatccgtgcgccagcagccaatccgcaaccggcacgatcgtcatcatcggcgccagtccgcccgccatgatcagcgaaaaggccaaaccgcgctccctctcctcaaaagccagggactggtaggtggcaagggatatctgcgaaaaggcggtccccacgccgagcaggaagcgcgcggcaaaggcgctgccaaaagagctccccgcaagaacgatccagacggaggcggccaccgtagatatgccgccgatgacaaacagacgcttaaagccgctgcggacaagcacgttgccgagcaaaaggcggaaaataagcgtggcaaaataaaaggcggagacaagcaaacccgactgcgccggcgtaaatcccacgttggcgtaatagatcggcagcagataagagacgttggaatagccgaacatcaggaaaaagcccgcagcgagaagaactatctttttatttttaccctgcgttcccccgccgctgaaaatcatacgcacagcccccgatctctgccggatatcctttcgtttattttacattaaatatcccttccgcggaggagacgataaaattcatccgcggcaacggcagcacgccgaagtccgcgggactaggctccgttaccggtacaccggcatggcaggtggctagattattgatatcagttcttaactgaatacaacaatattacattacaattttataaattattgcagaaaataaaaaaacaacgtatactaagggtacggttcgcatgtgtagcatttcggagtgtggcacattgctataataagtgcatcccaactgggatgttaccgtaaggttcgccccggttttggttttagtaccttgaccggggtatcctctttcaaatggacaaacagcgacaaataaataagggaggtttcctcatgaattcttccgcgcttgaacgttactcactcggcctagatattggaattacctccgtcggttgggctgttctcgacctgaccagagggaaaatagccgatcttggcgtccgcctatttgacagagctgaagaaccaaagacgggagcctctcttgccgcgccgcgcagagaggcaagaagtacgcgccgcaggctcagacgaaaaaggcagcgcatgtcggatattcgttcgctcatcgtctcccacggaatcctttcacagactgatatggacaatcttttcaattccccgcatccatgcactccctgggagcttagagccgaaggacttgaccgcctgctcacatgtgaggaatggagccgcgtcctcatacacatggcaaaacatagaggctttaaatcaaataggacggtggctgaaagcgacataaaaaacagcgaggacggcagggctctgtccggaataaaagaaaacagcgaactgctcaaggccggcaacaatggcgccggttacaggacagtcggggaactcatccaaaacgaccctaaattttccggccacaagcgcaacaaaggcggagaatactcgcatactattcttcgtaaggatatagagcgagaaatagatgctctctttgaagaacagcgtaaatttggaagtacctatgcctccatggaatttgagaatgaatacaaggatatttttggaagacagctccccttcgcgttcgacggcgcaatagaaaagcttattggacactgctctcttgagccttcagaaaaaagggcgccaaaggcgtcgtggaccgcggaacgtttcatcctcctaagcaaaattgcaaatctaagagtacgctcagacggcaaaaaagttcctctgagcatagatgaacggagaactattgataaccttgcctacaagaatacaaaggtcacatataaacagatacgaaaagctctcaactggcaggataacttagtttttgacagccttccgttcacaaaaaaggacaaagatcccgaagacagcgttttcgttgagctgaaaggctggcatgccttcagaaaatgcctctcggaaaaattaggaaaagactattgggagacaataagcgtaaatccgcgccttctcgatgatttagcctacgctttgacattcaaaaagacggatgaggatattacgaggtatcttgaggaacgtaacatcgacaaaaagattatcgacgcggttctccccctcaatttttccggcgtcgtaaatctgtcagccgcagcgatgggcaagcttatcccgtttatggaaaaggatggctgccgttatgacgaagcctgcgtcaaggccggttacctccactataaaccagcggaaaaagagcgctccctaaaacttcccgtaccggattgggaagaaataagaaatcccgtcgtcatccgcgccatcgcagagacacgcaaagtagtaaacgccgtcgtgcgaaaatacgggccgccagagtcagttcaggttgagcttgcacgggacctctcccgttcaaaagaagaaagagataaaattataaaagagcaggaagaaaatagatctcaaaaggaaaaacttgcaaaagagtttcaggacaagtttcattactcgcccaacggacggcagcttgaaaaatttcgtctttggaaggaacaaaacggtttctgtctatataccggacaatatcttgcgcccggggacgtcttcaacggcagtgacgacagcttcgcggagatagaccatatcattccgtacagcatctcttttgacgatggccggataaataaagtgttggtaacttccggcgccaacagagagaagggaaaccgccttccctacgattacttcggtggtgacggtgaaaaatgggacgaattcaccgctcgtgtcaatgccaatatccaaaacaggaaaaaggccgcacgcctgaagataaagagccttgatgatagtgacatctctgaaatgaaagagcggaatttgagcgatacgaggtacataacaaaatacgtcgcaaaatggctggaggaaaatctgttatttgctgaaaaaaaggccgaaaataatgtcacgagaatcaacgggcgggccacagcaacgctgcgctggcagtggggaatcaatgctctgaaagaccgcgaaggcagcgaccttcaccatgcgcttgacgcctgcgtcgtcgcggcggcaacgccgggtataataaaaaggatctccgattattcgcgtgacagagagctgcaaaaattaaaggtcaacgcagaggacaataaaaaaaggcgctgtcccgaaccgtgggaacacttcaggaaagaggtcgaagcgcgcctctccgagaaccctgcggaaaagataagggaattcggcctcgccggctacagcgagagcgaactgaacgagctgaaaccgatcttcgtttcccgccgtcctgaccgcggagcgacaggagcggctcacaaggacaccatatactcggcgaaataccttaatgacaatccaccaagaatagtcgtaaaaaaagcgctgacatctctgaaaaaaagcgaccttgagaacatggtgggtaaagaaagagaccgcgctctctatgaggcgcttgccaaaagacttgaagaatatggagataagccggaaaaagcgttcaaggacggttttaaaaaaccggccagcaatggaaaacccggccccgtcgtacgttctgttaaaatttttgatccgcgcgtcgccggcctgccggtaaacggcggtatcgccctcaacgacggtatggtcagagtagatctctatcaaaaaaacggcaaatactttttaataccgtattatgtcagcgatatcgcaaaaaaaattgtaaagaacaaggcaatagcgcaaggcaaaagagaggatgaatggatcactatagatggaacctatgactttatcttctccctatttaaaaacgatctggtaagaataattgacagcaaaggcaaggaaatatttggatattacaacagctgcgacagaacaaatggcgctattgaaataaaaaagcatgacggcagtgtgtcgtggcgtgggataggagttagaaccgcaaaacttattgaaaaatatcaggtggatgtcctcggaagctaccacaaggtaaagagagaaaaaccatcgcatgagctggcgtaatgtggtaatcggcagccccgcgaaactttcacttcgccagaaccacctcgtcattgggcagaaggaagaggtggaaattccgcttgaagacatctcggttataatcgtagagactgaacaggcgctcatcacctccagtctccttgatatgctcgcggaaaaggatatccctctttttacgtgcggcaaaagccaccttccctccggccttttagtctcatatcaaggacacagccggtttttaaaggtattgaagggacagttggaacagaccctgcccttcagaaaaaattgctggcggcttgtggttcgccaaaaaatcaataaccaggccgcctgtcttgaaattctcggcaaaaaaggagctgacgagcttcgtgccatcgcgacagatgtacgcagcggggataaggaaaacagagagagcgccgcggcaagaatatacttcgacagctatatgccgcagacaacccgtcaagaggacaactgtgtaaacgccgcgctgaactacggatattcaatcatgcgcggcgcggtggccagatccctgacatcatacggatttttgtgtgccgtcggcatacatcataaaaatgaactgaactctttcaatctggcggatgatttcatggaaacgctgcgccccgtggttgatctctggactgcacggaatattgaggaagggcaaagttttacaataaaagacagaacggcgttggtctccctgctgaattccccgataacgatcgactatacacggcaaagtatcatcagggcgattgatataatgtccgccagcttcagcaccgccacttcgtcaggcgatccggaacggctgaaactgccggtattggatctccgttagcgccgtgcccgccgcaaaaaggttaagattcttgagaatcctggtattcttcgatcttccagtcgtctccaaagatgaacggagaatatatacgaaattcagaaagttcctcatctccgacggttatgacatgcttcagttttccgtctattgcaggatcgtgaacggggaagacgctgtggacaaacatttagaacggctgaaaaaagaattgcccgaaaagggctccgtgcgatttttgcagataacagacaggcaatatgccgcgatgaaactgctgctcggagtaaaaacgaaaaaagaaaaattcgtagattcccgccaaacattactcttttaacaaaaaaataaacgtccggatccttaccaaacaagtactggcaaggatccgggcgctgcgtattatagcatttcggagtgtgacagagggctataacgaaaatcgccgaactgccgcacccgaaaaaattatagcatttcggagtgtgacagagggctataaccggcggcggtatatctggcaggatatgccgattatagcatttcggagtgtgacagagggctataactgacagccaatgcgtacaagcaagcccgtgattatagcatttcggagtgtgacagagggctataactcaggcaggggattattattgccggggcaaattatagcatttcggagtgtggcagagagctataacttatataaatatatattatatttcatactattataacatttaggatgtgtgacaggggttatctcgtctacaacttcaaggcagcggaggaatcgctgtcctggcgaaagaagaagggaaaggggtagcggcgcgttaaaaaatcgcgccgcgtcataaccgcgcgaaagtgaaaatccacgtgaagctgctcgtcacagaaattatattttcaccgtcgttgtacgataccgtttccgcttcggattctaaaaattcagcacaaaaatcccctcctgattcttcaaagcgacgggattttgtcataaaacaaaaaacctgagacgattcaaaatctctctcaggtttaattcacagctttccggcagtacgtttatttcatctaatactcaacccttcagacagccgcagtcaatttagggctctgttttcagacagtcctattatgccaatctctctattaagccttcccctgcgacttcagatactccaggctgtggttatacatatactccatcggcggttcgatacctagccagaggcgcatctgctccgccgcctgataggtgttcatccagaggccggagagggtccggcagccgcgggccgcggcctcgcgcagcagcttcgtctccaccggcacgtagacgacgtcggccactatgtggtgcggcttaaggaggtcagggtcgaagagtatctcgtcgaccttcgggtacattcccaccttcgtcgcgtggattatcacgtcgtacctttcaagcgccgccgcgatgctcttctccgtcatctcaccgatggtgcagacaaagggaaagtgccggtcaacgcggtcgaagagggtctcggcgcagaaataatccttcgcaatacagagcgacttgatatccttcgccccctccatcgcgagggcgcaggcgatcgccgtccccgcgccgcccgccccgaggatgagataattatggtcggggatctcaagcccaagctgcttttgaagcgagaggacgaaaccggtcccgtccgtgttgtggccaatctttttgccatcctcgaagactatcgtgttgacgacctccgtgaagagcgctgaatccgccaggccgtcgaggtatttatgtacctgcgtcttgaagggcatcgtcacgccggaaccggcgtagtgaaagttttcaaggtttgccaccaccggctcgagctggtccattgaaagctcgagcggcacatagagcgcgtcgatccccagcttctgatagacgctgttgtgcataaagggagccgcgctctgccccagcgggttgccaagcaggccgaaaaacttcgtatttaccgagctgttgaatatttcctgtttatccatcttgattgcatctccttatattagagcagcgcaaggcttatcgccggtataaatgtgatcagcagcagcgagatgaggaaggctacgataaagggaatcgcctttctcgcgatcgtcaccaccgagatgcccgtcatcgagctggcgacgaagaggttgatacccatcggcggcgtcacgaaacctatcgcgaggttgacgaccatgatgataccgaagtggatggggtccacgcctatctgctttacgagcggcagcaggatcggcgtcagtatcaggatcgcgggcgaggtgtctatcaccatgccgacgacgagcaggaagaggtttattacgatgaggatggctatcttcgagctcacaaggcccgtgatcatcatcgcgatcgtctgcggggcctgcatgatcgtgaggacgcgtccgaaggccatcgcgcctgcgagaatgaaggttatcgggccgtaggtgaccacggcctcaacaaaggccgagacgacatccttgaaagtcatcgtcttatagacgaagcagcagacgatgagggcgtagaccactgagacacaggccgcctcggtgggggtcgtcacgccgccgtatatgccgccgaggatgatgaccggggtcatgagcgcccagaagctcttggagaagatgtgccagaggccgttcttgcgcagttcatagcagtacgcggcgagcttttccttgtcttccccgtgcttccagcaatagtagcaggcgtaggccataaggcagaagccgattagcagcccgggaagaatgcctgcgatgaacatcgcgcccaccgatacccccgacgagagcccgtaaaggatgaaggggatcgacggcgggatgatgacgccaagtccgccggcggtggcgacgagcgccgtcacaaaggtcttgtcatatccgaggctgacgagaagcgggatcgacatcgcgccgatcgcggcgaccgtcgcggggccggagcccgatatcgcgccgtaaaagaggcaggtgacgacgaccgcgcagggcaggccgcccgtcttgtctcccgcgaaataggagaacatattgaagagcttgtccgatacgccgcccctggccatgatgatgccggacaggacaaagagcggcaccgcgataaacggtgtggagtcaacgccgccgaccatctggcggacgataaattcgatcttggcggggaacatcgggttgagaaagtgtgggaccatcgccgagattcccatcgtgatgccgacggggacggtgacggcaaggcaaatcgcaaataccgcaaatacatatcctaacatcttatcctacctcccgttcctgagttcggcggcgtttataaaaacctgctgcgcgcacctgacgatccccagggcgaagccgacgacagacgatccgtagatgatccacatgggaacgagcagcgcggggcttgtctgtccgttattgatgagcgtcttcgtcacgcttatggctcccttgagccagtaggcgaaaaccgcgattataaaaacatttaccagtatcagcagcaccctgcacgccttttccgagagcaccgtgagcaggatgtcgatgcggatggagctctggcgcttgatgcagaggccgatgcttatgaaagccgaccatataaagaaaaaccttgtgatctcctcggcccatgagggggaatcattgaagacgtagcgcatgatgaccgagtatgagatgatcgctgtgataagaaagagcagtacggccattatcgtctcttccaaatgatcatttacccacttgagcattccatttcctccttgttcttttcctgtccgttctctccgacgccggtaccaaagagggccggaagcttgccgaaaaatcagctgacttccggccccctgtcagatctggcgaattttatccgcgagggacaatcctattttgaggcttccttcaccgcgtcctggagctttttcacaagatccgccccgaccgccttgctgatattgtcatagacgggctttgacttcgcctgcatctcgccaagcagcttctcgtcgagctttattatttgaacgttgttcttcttgaggatggctacgcggtcggcgtggcgcttgtcggcctgctcgcggccccagacgatgacctcgcgtgccgcgtcacggaccagcttctgctcctccggcgtcagctggtcatagatgtttttgctcatgatgatcgtgatcgtatggaaaagatggttggtatcgatcacatacttctgcacttcgtagagcttcgtcgcgacgatgacctcatagggattctcctgtcccgtcaccgtaccctgctgcagcgcgagataaagctcgctgaaagggagcggcgtgggattcgcgccaagcgactgccaatactggacatgatacttattctccattgtgcggagcttgagccccttgaagtcctctattttgttgatcgccttattcgaggagaggacgcggaagccctggtctccgaagccgagcatgacgatcccggccttcgcgtattcgggttcgatatccttttggaacttgtcgagcgcggcgcgcgccacctttttgttcgggaagaggttcggaagatcaaagacggcggccttcggcacaaagttgacctgcggggcggtgttctgcaccacaaaggcgagctcgccgttctggcagctctgggtgatctcacggtcggagccgagctgtgagttcgggaacgtcgcaaccttaaaggctccctttgacttcgcctcaagcacctctttaagtttctgcgtcatgagtccagttacggtgtcatccgtggagtcgttcgcaatggcaaattctttcggagcggccgtcgccgccgccgcaaacagcatgatacataataccgcggtaagtgttgtaagctttttcatctattacactctccttttttatccgccccactcctgggatacggttatagccaattatttaattccattaaatggaaaaattatctaattaccggaaacatctatacaataccgcctattgaaagccctgtcaatataccaaatctaaaacaatatatttttatatcatcaaaaattcttttaaagctaataaaaaggtcacgttctccattcaaatgttagaaataacaaaatataccttctataaaataggaaaaaacttaccccgcctatttttctcttgagttttaaaaatatataaatttgataatagaataccaaatatgatagaatatatcattgtacatatccagagagactattatctatagaggtgaccgaagatgctcacagtatacggcagtatgcagtgcccaaagaccgtcaagatcctcggcggctgccgggaagagggaatagagattgaatacagggatatctccgactccctgaagcacctatgggagtttgtcgtcatacgcgacggcgaagaggcgctggcggccgcgaaaaagaacaggcggctcggcatcccctgcgtcatctttgaaaacggcgccatgtttgacggcggcgaggagcccttcgacttcaccgcggtcatgaggcggatcagggagaacatataaaaagaccggcagaccttcctcagtctgccggtctttatatatttggcgcggattcgcgggcagaggcttcagagcctctctccgttctgtttgaagaggtccacgatcaccgagaagtggccgccgatacagccgagggcctttttcgcgtcggagttccagagcgcgtcgataagttctttgtgttccccaaggatgatatcgggttcgcggcgcggatatatcgagtgcatgacgaggcgcgtcatatcttcgcgtatcttctgccacatcaggttcagcgtcgagagattcataaactggattatcgttgtgtgaaactccatatcgtacttcataaaatcgatcggagaattcttcgcggcctccatctcgttatagaccgccgccagctgcccggcgagcacctggggtttgccctcctcgatgatcttcctgatcgcgaagggctctatcatctcgcgcagtgtaaaaagctcgaggatctttgctatcgttatctcggaaacgacggcgcggcggcgctcctcccaatccacccagccctcctgcgaaagacgcttcagcgcctctcgcaccggcgtgcggctgacgccgaactcgtcggcgatcgaacgctccatgagaatgctgcccggcataaagtcgccgtttattatcttgttcttgatggcctcgtaaacggagctggagagattctgctccctcttatgcccattgtcgttcggagtaagcccagtcatcacaacacaccctcgtcaatatgcacgccgtctgcgtgaaattaaatatattgtacccgcaatgctatatctttgatatttacgggataccgcctatcaaaatatattatcatatttcgtatacttccacggcagttttatctcacaccacaaaaaataacggcgcccaaatcataaattgacgtcacaatagcccaatggcgaatatgcccgaatacatacggggcagacgctgcgccacatgccgccggaaccatgcggcattatataattccagcttttcggagtctgacgtcattagccgttaaaaacgccgttcatatcttgacgccatatattttttcatagtaccgaattttaccagataaagttcgtcgaaatactcctccttgtcttcccagccccaatgtatatattttgagaaattaaagagagacttagggtctccgtcttttatgatataagagcctgattagggcattcgttgatcatcagcatatgaaaatcgatatttttcgcatagcacattgatgtgtcgtcattgtcaagctttgacgagacctcattcactatcgacgtcataccttccagggcgttgtcccttatactgtaaaaggcggcctccaaggccgacgattccaacgaacccgcgatttcgttcaattcaatcagctcttcaaagggtctgtctcttacgacgacgcctttacagggaatgatgctgactatgccctcggcctccagctggatcatgcagtcgcggaagggcgtcttgctgatccccagcgtctccagaatctccttctgatttatcgcctcgccccgtctgatctcgccggaattcaatttctcttttataaaagagtataactgcttgcgtatactttcattgcgaatgagttccaaaaaaacacctctttgcctcttgctaaaatttcaacaatagtataacatgtttgtgcaatacgcagcgtgcggaatgccgcacatcagtaattgtactacataatttctatcagttcacacaaaaaaaggaggcagtcaggatggaggtttctttggatatctctaaaatcactgaagctaagaggatacgtcatgtccgccttggcgcggccctcgtaacactcgaggagtttgtcgccgtcgcacgctttggcgcgaaggtaagtttttcacaggagtacctggagcaggtgacgcgctcccggcagctcgcggaaaaatttctcgcggaaaaccgtaaggtttacggcctcacgaccggatttggcgacaatgtgcgcaaaatcatcccccaggaacaggcggtggagcttcaggtcaatattttacgttcgcactccgtttccgtcggagagccgctgaaaaaggagtgcgtgagagcgatctggctgatgcagcttctgagccttggaaagggatattcagggatcaggccggagacgctttcgcttatcgccgaatgtttgaacaatgatgttacaccctatgtgccgcaggacggctctgtgcagtatttagcgatagagggccagatcaacctcatcctcatgggcgagggcaaggcgtggcataacggacgcctgatgagcggtgcggaggcgctggcggagattgggcaaaagccctggacgccggctcccaaagaggggctatgcctgacaaacggcgcgaacgccgctaccggcgtcagcgtgctggctctgtatgacaacctgatcgcggcgcagactgcggacgtcgcggcggcgatggccttcgaagccttccgcggcacgatcctcgcctgtgacgagcgcctgcattcgctgaaaaaacaccctgagcaggcaaactgcgcggccaacatccgcgctatgctctcagacagcgcgatcatgaaaaaatatatccacgccaaggtacaggatgcctatattttacgctgcatcccgcagatgcacggagcgtccaaacgctttataaaggactgcgccgcgaatattcttgaagagatggcctcgtgcagcgacaaccccgtgctgttccccgaagacggcgacggcaccgcgctgatgggggctaattttgattccaccttcgcaagcggcagcgccgatattctctgcatggcggcggcaaacctcgcgaagttctcggaacgcagaacggaccgcctgactaacaggtacctgaatcagacctaccctgcgttcctcgccgaaaggcccggcgtcgacaactgctacatgatagtccagtatacggcggcggcgctggtgggcgagatacgttctctcagcgctccggcgacagccgacagcgtccccacctgcgcgaactgggaagatcccgtcagcatgggctggtgggcggcgagaaaatcgctgatggtcgctaaaaagctgcactacgtgctgggcatagagctgatggcgatgacccgcgccttcgacctgctgcaaaaggaggaggatggcttcgcgagcgcgacgaaggccgtccacgataaaatcagagaggtcgtccccccggtggaaaaggaccgctatttcggccccgacattgaaagcaccgctgcgctggtatccgacgggacgatcatcaaaaccgcggaagaaattgccggaaccttggcgctttagaaaaatgccggtcaattcagtttatcaaccaaatcactaacgtgtaatcaggcaatcgggtgcgccgtccgtcaaacgggccgccggcacagaaggcaaaacgccggagccatgaacgggaaccg

SEQ ID NO: 2570 - DNA, 5974 bp, synthetic construct
  source 1..5974: mol_type = other DNA
  misc_feature 1..5974: note = Synthetic
ccgcttggatggaacaccgatgcagtatcagagggaactctctccctggtcgaggaatcaccggtcgaagacgtaagctacggcatccgcgaatcgctgccgatggtagagatcagagtcccctttacaatgtcgatgtgggacctcgacgacataagcagaaattcaaagacaatagacttcacccctgtcatagaagcagcccgcaaagcagccctctttgaagacacagccgtattccagggactggaagaggccggcatactcggcctggaacttgaagccgacaatgaccccgtcgaagtgaagcttgaagacgaatgcatcgttgcatcaatagttgaagcgataacgaccctcggaagccgttcgatggaaggcccatatgcgctcgtctgctccctccccctctggacgaagatcaagacctcgtccaaaggctatccccttttcaaaagggtcaaggatgctctcggcgacgacggacgcatcatcctctccccccagtacgatacatgcatgctcgtatccatgaaggaaggcaacagcgaactgatcatcggacaggacttctccatcggctaccagtcacacaccaacaccgatgtcagcttctacatcaccgagaccttcaccttcaggacgatagcccccgagtcgatcgtgctcttcaaaatagccgaataggcatagttctttaaagcaaggcaacttcaataaacataaaaaagtcagtggggatcaatattttccccactgacttttttgacgattcttctctttaacgtattatgttgttaaggtcaaggtattcgtccttctcgtcatcccggtatgccttcgagccgggatccaggttctgattttgcccctagctctcttgcgtcatcctcgagtgcccccatcggggacccagtggcttaaatctgcgatagactgaatttaacaacctagccctaattcaaaaaccctcacttccattcacagacagaacatggcctgatacaaatgtagcaataaatgcgacaattggaaatttttcagttgcgcttatcgaaagtacgatattccacttgttgcattttaggcggcaactaatattgatattactaatgacatagcatataaaaattccaataaaaacattaacaatatttaatcaaatgtattgcataaaaaaatgaacagcagtaaaatacataagcggttgtgaaaacgtgtagcatttcggagtgtggcacgttgctataataagtgcatccccttctggggatgttaccgcaaggttcgccctggttaatacacactcgtgtgtcattgaccagggtatcctcattttaagggggtattctgttgaagtattctctggggcttgatattggtattacttctgttggatgggcagttcttgatatggaacaaaaatttatagaggatttgggtgtacgcctctttccaggcgcagaaaatcctaaagacggatcttctctagctgcaccaagaagagaagcaagaagttcaagaagacgtatacggagaaaaagacaacgtttatctgacattcgccaactgatcctttcttccaaattactctctgaagcagagcttaccaaacttttcgatatacccaatgaacataccccgtggcagttacgggcagaaggattagacagaaaactttctcattcagaatgggcaagggtactaattcacatcgcaaagcacaggggatttaaatcaaacagaacaatttccacagaaggaaaggatgcaaaagcaagcgaagaagggaaagccaaagaggggatgagatccaacagtctgcttctgtcctccgggaacaacggcaaaggatacagaactgtcggagagatggtcgagaaagacccaaaatttgagtttcacaaacgcaataaagctggggactattcaaacaccattatcagaacggatctggaatcggagataaagacgcttttttctttacagagagaatttggcaacaaattctcttctgctgatttagaggaagaatacataaaattgttcaacagacagctgccctttgcttccggagaaataatagaaaaaatgacaggcaactgtacttttgaaccagaccaaaagagagcaccaaaagcttcatggacagctgaaagatttattctgctgggaaaaatattaaacctcagagtccgtgttgacggcaagaagatggaacttggaacagaaaaaatgcgcgttgtaaatgatcttgcttacaagaacgcgaaagttacatacaagcagattaggaaggctctggacgaaggcgagaactggcacttcgagaacctcccgccagtaaaatcttccggcgacaaaaaatcggacccggaagatgccgtcttcgtcgaactgaaggcctttcattcgttccgtaaatccatatcagacaaacttggcaaggaatactgggaaaaccttatttcaacttcaccaaagatccttgatactctggcctatgcactgaccttcagaaaaactgatgaagagattatttcatatctcaaaagtcataacattgatgatgatctgatacgtgcggtccttccgctgaacttcaacggcgttgtaaacctttcgattaaagcaatgtccaaaattattccgcacatggagaatgggaaccgcttcgacgaggcatgccagcttgcaggatattcacattatgacccacacagcagatcagatcgttctttgatcctaccggttccaaactttgaagaaatcagaaaccctgttgtttttagagccattacacaaacaagaaaagttgtaaatgcaattataagaaaacacggctctccggaaagagttcagatagagctagccagagatctttcgcgctctatcgatgacagaagaaaaatagaaaaagaacagttggagaacaaatctcaaaaagaaaaactttcacttgaatttgaaaaactttactcatataagcctaatggagcacaattggaaaaatacagactctggaaggaacaggaggggttttgtccttacaccggagaatacatacacccggacagggcctttatgagtgaggacgggaactatgctgaaatagaccacatcgtcccatacagcagatcgtttgacgacagccttacaaacaaggtgcttgttatgggcagcgctaatagaaataagaaaaataggactccctatgaatactttggaagtgacagcgaaaaatggagaatcttcgttgcaaacgtagatgcacatataaaaaacagaagacgagcagaaagactcaaaatgaaagatatagatgaatctgatgaagaagccatgaaagaacgtagcctgggtgacacaagatacataaccaaatatgtagcaggctggatagaaaacagcattattttctctgactcctcaataaaacgaccggttaccagggtcaacggaagagcaacagccaccctaaggtggcagtggggaataaacgctttgaaggacaggcagaagagcgatcttcaccacgcgcttgatgcatgtgttattgctgctgcaacgccatcgataattaaatctatctctgactattccagaaaaaaagaattgagtctcctcagatcagaagagcaagaaaaaaagaaaacccgtctgccggaaccatggccaaactttagaaaagaagtagaggcaagactctcagatgatcctgtatcaatgatcaatgagtttggacttaagaactaccctgaagacaagttggaatcagtcaagccaatatttgtatcaagaaaacctgaacgtaaggtaagcggagctgcacacgaggaaactatcaggagcgcaaagcatattgaagacctgcaaaaaacagctgtgagaacaagtattttatccgtgaaccttagtaggttagaaaatatggttggtaaagaaagagataaagctctgtatgaagcattaaaaaatagactcaaagaatttgccaatgaccctaagaaggcattcaaggatggcttcagaaaacccacaaagaacggagagcccggcccgttagtccgcacgatcaaactctttgactccggcacgagcggtgttgaagtctgcgaaggaatagcctcaaatggcagcatggttcgccttgatgttttcactaaaaactcaaaatattatcttgttccatactatgtagatgatattgcaaaaagaaaagttaaaaataaagctattgttgcaaataagaatgaacatttgtgggaacctgttgattcgagttttgattttcttttttcaatttataaaaatgacttaatctacgtaattgacagcaaaggaaaagagcttttcggatattacagtggctgcaaccgtagcacaggagctatagacattttacataatactggagagtgtatttggcaaagcgttggaatacgaacggtgaagaaattcgaaaaatattgtgtagatgtactgggaaattactacaaggtaaaaaaggaagcccctccttatgagttggcgtagtgtaattatatcgaacccggcaaagttatcacataaagacaaacatttagtaattaagcagaatgaagaagcctgtatccccttggaggatatttctgtaattgttgtggaaactcaacaagcctcaataacctcatctttactggaccagttggcacgtaaaacgatacctcttatagtttgcggcccgtcgcatcttccgacgggtctttttttgtctttccaacaacatagcagattcttaaaagtattaaaatcgcaaatggaacagaccttgccgttccgcaaaaactgttggcaaatggtagtaaaaaagaagattgaaaatcaggcaaaatgtcttgaactgctgggaaagaaatattgcaacgaactgatcaatatatcgaaacaggttaaaagcggagacccagacaacagagaaagtgccgcagcttctgtttactttgacagctacatgccatcaatcagccgacaggaagacaatacagtaaacgccgctctcaattatggatattccataatgagaggtgtcgtagcaagaagcttggcagcatacggttttctgcccgcagtgggtatacatcacaggagtgagttgaacgcgttcaatcttgcagatgatttcatggaagttttgcgtccactggtagatttatgggttgggcaaaatatcgaaattgacaaagaattttgcatcaataaaagagagggattagtctcgctcctcagtaaggacatattgatcgatggggcaaggcaaagggtaattagagccatagatataatgatatccagctataaaactgccgcaacaacaagagaccccaaataccttaagttgccggatttattgccgatcattgaacatgactgggagtgaaagaagatacaggtttatgagaatcctggtatttttcgatcttccggtagtttcgaaagaagacagaaaagtttatggccagttcaggaaatttcttatccaggacgggtatgacatgcttcagttctcggtttactgcagaattgtaaatggggaagacgctgttgataaacatttacagcgacttagaattaacctccctactaagggatctgtccggttccttcagataaccgaccggcagtatgcatcaatgaaaattcttcttggagaaaaaacaaaaaaagaaaaaatcctgaatgctaagcaaaccttactgttttgacctcaaaaaataaatgcgcaaagtgctgcagtccatctggccgcagcactttgcgtttcacatagtatagcatttcggagtgtggcagggagctataacatgtgcctagtgccaaattcaacgtatggagtatagcatttcggagtgtggcagggagctataacctcaaacttcctgtaacacattgacgcccaagtatagcatttcggagtgtggcagggagctataac

SEQ ID NO: 2571 - DNA, 4799 bp, synthetic construct
  source 1..4799: mol_type = other DNA
  misc_feature 1..4799: note = Synthetic
acaaaggggattcgccgccgcgtgcgaggagtcaaggacgacatccccggtgttgaggacaaagaccgtcagaaaggccatcgccgaggtcagcaaaacgggaatgataatataaagggtaaaacatccgtgcgccagcagccaatccgcaaccggcacgatcgtcatcatcggcgccagtccgcccgccatgatcagcgaaaaggccaaaccgcgctccctctcctcaaaggccagggactggtaggtggcaagggatatctgcgaaaaggcggtccccacgccgagcaggaagcgcgcggcaaaggcgctgcagaaggagctccccgcaagaacgatccagacggaggcggccaccgtagatatgccgccgatgacaaacagacgcttaaagccgctgcggacaagcacgttgccgagcaaaaggcggaaaataagcgtggcaaaataaaaggcggagacaagcaaacccgactgcgccggcgtaaatcccacgttggcgtaatagatcggcagcagataagagacgttggaatagccgaacatcaggaaaaagcccgcagcgagaagaactatctttttatttttaccctgcgttcccccaccgctgaaaatcatacgcacagcccccgatctctgccggatatcctttcgtttattttacattaaatatcccttccgcggaggagacgataaaattcatccgcggcaacggcagcacgccgaagtccgcgggactaggctccgttaccggtacaccggcatggcaggtggctagattattgatatcagttcttaactgaatacaacaatattacattacaattttataaattattgcagaaaataaaaaaacaacgtatactaagggtacggttcgcatgtgtagcatttcggagtgtggcacattgctataataagtgcatcccaactgggatgttaccgtaaggttcgccccggttttggttttagtaccttgaccggggtatcctctttcaaatggacaaacagcgacaaataaataagggaggtttcctcatgaattcttccgcgcttgaacgttactcactcggcctagatattggaattacctccgtcggttgggctgttctcgacctgaccagagggaaaatagccgatcttggcgtccgcctatttgacagagcggaagaaccaaagacgggagcctctcttgccgcgccgcgcagagaggcaagaagtacgcgccgcaggctcagacgaaaaaggcagcgcatgtcggatattcgttcgctcatcgtctcccacggaatcctttcacagactgatatggacaatcttttcaattccccgcatccatgcactccctgggagcttagagccgaaggacttgaccgcctgctcacatgtgaggaatggagccgcgtcctcatacacatggcaaaacatagaggctttaaatcaaataggacggtggctgaaagcgacataaaaaacagcgaggacggcagggctctgtccggaataaaagaaaacagcgaactgctcaaggccggcaacaatggagccggttacaggacagtcggggaactcatccaaaacgaccctaaattttccggccacaagcgcaacaaaggcggagaatactcgcatactattcttcgtaaggacatagagcgagaaatagatgctctctttgaagaacagcgtaaatttggaagtacctatgcctccatggaatttgagaatgaatacaaggatatttttggaagacagctccccttcgcgttcgacggcgcaatagaaaagcttattggacactgctctcttgagccttcagaaaaaagggcgccaaaggcgtcgtggaccgcggaacgtttcatcttcctaagcaaaattgcaaatctaagagtacgctcagacggcaaaaaagttcctctgagcatagatgaacggagaactattgataaccttgcctacaagaatacaaaggtcacatataaacagatacgaaaagctctcaactggcaggataacttagtttttgacagccttccgttcacaaaaaaggacaaagatcccgaagacagcgttttcgttgagctgaaaggctggcatgccttcagaaaatgcctctcggaaaaattaggaaaagactattgggagacaataagcgtaaatccgcgccttctcgatgatttagcctacgctttgacattcaaaaagacggatgaggatattacgaggtatcttgaggaacgtaacatcgacaaaaagattatcgacgcggttctccccctcaatttttccggcgtcgtaaatctgtcagccgcagcgatgggcaagcttatcccgtttatggaaaaggatggctgccgttatgacgaagcctgcgtcaaggccggttacctccactataaaccagcggaaaaagagcgctccctaaaacttcccgtaccggattgggaagaaataagaaatcccgtcgtcatccgcgccatcgcagagacacgcaaagtagtaaacgccgtcgtgcgaaaatacgggccgccagagtcagttcaggttgagcttgcacgggacctctcccgttcaaaagaagaaagagataaaattataaaagagcaggaagaaaatagatctcaaaaggaaaaacttgcaaaagagtttcaggacaagtttcattactcgcccaacggacggcagcttgaaaaatttcgtctttggaaggaacaaaacggtttctgtctatataccggacaatatcttgcgcccggggacgtcttcaacggcagtgacgacagcttcgcggagatagaccatatcattccgtacagcatctcttttgacgatggccggataaataaagtgttggtaacttccggcgccaacagagagaagggaaaccgccttccctacgattacttcggtggtgacggtgaaaaatgggacgaattcaccgctcgtgtcaatgccaatatccaaaacaggaaaaaggccgcacgcctgaagataaagagccttgatgatagtgacatctctgaaatgaaagagcggaatttgagcgatacgaggtacataacaaaatacgtcgcaaaatggctggaggaaaatctgttatttgctgaaaaaaaggccgaaaataatgtcacgagaatcaacgggcgggccacagcaacgctgcgctggcagtggggaatcaatgctctgaaagaccgcgaaggcagcgaccttcaccatgcgcttgacgcctgcgtcgtcgcggcggcaacgccgggtataataaaaaggatctccgattattcgcgtgacagagagctgcaaaaattaaaggtcaacgcagaggacaataaaaaaaggcgctgtcccgaaccgtgggaacacttcaggaaagaggtcgaagcgcgcctctccgagaaccctgcggaaaagataagggaattcggcctcgccggctacagcgagagcgaactgaacgagctgaaaccgatcttcgtttcccgccgtcctgaccgcggagcgacaggagcggctcacaaggacaccatatactcggcgaaataccttaatgacaatccaccaagaatagtcgtaaaaaaaagcgctgacatctctgaaaaaaagcgaccttgagaacatggtgggtaaagaaagagaccgcgctctctatgaggcgcttgccaaaagacttgaagaatatggagataagccggaaaaagcgttcaaggacggttttaaaaaaccggccagcaatggaaaacccggccccgtcgtacgttctgttaaaatttttgatccgcgcgtcgccggcctgccggtaaacggcggtatcgccctcaacgacggtatggtcagagtagatctctatcaaaaaaacggcaaatactttttaataccgtattatgtcagcgatatcgcaaaaaaaattgtaaagaacaaggcaatagcgcaaggcaaaagagaggatgaatggatcactatagatggaacctatgactttatcttctccctatttaaaaacgatctggtaagaataattgacagcaaaggcaaggaaatatttggatattacaacagctgcgacagaacaaatggcgctattgaaataaaaaagcatgacggcagtgtgtcgtggcgtgggataggagttagaaccgcaaaacttattgaaaaatatcaggtggatgtcctcggaagctaccacaaggtaaagagagaaaaaccatcgcatgagctggcgtaatgtggtaatcggcagccccgcgaaactttcacttcgccagaaccacctcgtcattgggcagaaggaagaggtggaaattccgcttgaagacatctcggttataatcgtagagactgaacaggcgctcatcacctccagtctccttgatatgctcgcggaaaaggatatccctctttttacgtgcggcaaaagccaccttccctccggccttttagtctcatatcaaggacacagccggtttttaaaggtattgaagggacagttggaacagaccctgcccttcagaaaaaattgctggcggcttgtggttcgccaaaaaatcaataaccaggccgcctgtcttgaaattctcggcaaaaaaggagctgacgagcttcgtgccatcgcgacagatgtacgcagcggggataaggaaaacagagagagcgccgcggcaagaatatacttcgacagctatatgccgcagacaacccgtcaagaggacaactgtgtaaacgccgcgctgaactacggatattcaatcatgcgcggcgcggtggccagatccctgacatcatacggatttttgtgtgccgtc

SEQ ID NO: 2572 - DNA, 3773 bp, synthetic construct
  misc_feature 1..3773: note = Synthetic
  source 1..3773: mol_type = other DNA
cctatcttttccgtacctttttaaacaaggaaaagaaaaagtatcaatgactaacattaaaaaataaatgtattgcattatttgccataatattgtaatatatccttgcgggaaagcgaatgtgtagcatttcggagtgtgacacgttgctataataagtgcatcccctttcgggggtgttaccgcaaagtttgccctggctaatgcacactcgtgtgtcgtttaccagggtatcttttttaagggggtaagaaagtgagatactctttgggacttgatataggtataacttcagttggatgggcgatacttgatttagaaaataaatacatcgaagatttgggagttagaatttttgaaagagcagaaaatcccaaagacggctcttcactcgctgcccccagaagagaggctagaggttcacgaaggcgcttaagacgaaagagacaaaggttggcagacgtgcgagacctgattgtctccaacaaccttttgtcatcaaatgaacttgaagctctctttgaaactcccagcgaatatactccgtggcagctgagagcggatgcattagacagaaaactcactcaaaaagagtgggcgagagttctcattcacatcgcaaaacatagaggttttaaatcaaacagaactgcttcccctgacgaaaaagatgccaaggcacaagaggacggaaaagcaaaagaggcgatgaaagctaatgagcttctcctgtccaccggcaatgacggtaaaggataccgcacagtcggagagatgatgcagctggatccgaaatttgaagaacataaacgcaacaaaggtggcgactattcaaacaccgtgcttcgttcagagcttgaatcggaaataaaaattcttttctccgagcagagaagacacggcaatctttacgcctcagaatcgtttgaagaaaaatacattgaaatttttaatagacagctcccatttgcttcaggggagataatcgaaaagatgaccggttactgtacgttcgaacatgaccaaaagagagctccgaaagcatcttggacggccgaaagatttatcttgctcggtaagatattgaatttaagagtgagagttgatgggaagaaaagggagctctccctcgaaaagatgcgtacaatagaagagctcgcatacaaacataataaagtaacttataaacagataagaaaagcactcgatgccggtgatagctggtattttgaaaatatgcctcccgttaagtcttcaaaaggaaaagagacagatccggagagcgccactttcatcgaattaaaggcatttcatgaattcagaaaagccatatcaaaaagtttaggcaaagaatattgggaaactcttatctcaacttcaccgacgacccttgatattttggcatatgcactaacctttcgaaaaacagatgacgaaatcaagtcatatctaaaagaaagaaacgtcgacgataaactgattaaagcgatactcccccttaacttcagccaagtcgtaaatttatctattaaagctatgagtaacatcatccctcatatggaaaaaggatatcgttacgatgaagcgtgtaagctcgccggctacactcattataatccgcacggttccgctgaacgctcactctttttaacacttcccgaatttgaagagattagaaatccggtcgtcttcagagctatagctcagacgagaaaggtcgtaaacgcaattataagaaagtacggttctccggagagagttcaagttgagcttgcaagagacctttcacgctctctcaaggagagaaacagagtaacaaaagagcagcaagagaacagatctcaaagagagaaatatgctgaagactttgaaaatacattttcattcaggccgaatggttcacaacttgaaaaatacaggctctggaaagagcaaggcggctattgtccatatacgggagaatatattagacctgatatggcctttacgagcagcgacggaagctacgctgaaatcgaccacataattccgtacagccgctcttttgacgatagcttcataaacaaagttctcgtaatggggagcgccaacagaaacaagaggaacatgactccttacgaatattttggaagcgacgaagagaagtgggaaaagtttatagtcaacgtcgatactcacataaaaaacagaagacgtgctcagagacttaaaataaaagattttggcgagacggaagaaggggcgatgaaagaacgcagtttgggggatacgagatacatcaccaaatttgtagctgggtggatagaaaaccaacttatattctcagatccgtcgattaaaagacctgtcacaagattaaatggtcgcgccacagcaacattgagatggcaatggggaataaatgcgttaaaggatagagaaaaaagcgacttgcatcatgcacttgatgcctgcgtgatagctgccgccaccccgtcaataattaaatcaatatccgaccactctagaaaaaaagagttaagcttgctcaggtctgaggaagggcataataagaaaacgagacttcctgagccttggcctcgcttcagaaaagagattgaagcaaggctctctgaaaatcccgcagaactgattaaagagtttggacttacaaattattcggaaggaaaattagagaacattaaacctatattcatatcgagaaaaccggaacgcaaggcaacgggagcggcacatgaagagacgatccgaagctcaaaatatatagaaacgttacaaaaaaccgctgttaagacgagcatactctccgttaatttaagcaaacttgaagatatggtcggcaaagagagagacaaagctctctatgaagctttaaggaagagacttaaagagtcaggaaacgaccccaaaaaagctttcaaagacggcttcagaaagccgcaaaacaacggagagccggggccgatagtcagaagcataaaaatctttgattccggaacgagcggagtcaaagtacgtggcggcatcgcttcaaattcaaacggtgggatggttcgagtagacgtctttgagaaagattcaaaatactatctaattccatactatgtcgacgacatcgcaaagagaagagttaagaacaaggcaattgttgctggaaagaaagaagatttttggattacagttgattcatctttcaaattccttttttcagtttttaaaaatgatttaatacatgttgttcgtagcagtggacaagaaatatttggttactttattagctgtaatagaaacgatgggaccatagatgtaagacattgtacaggagagcatgtatggagttctgtgggaacgagaactgttaaaaaatttaaaaaatatactgttgatgtactgggaaattactataaagtgaagagggagaaatctccatatgagttggcgaactgtgatagtagctaatccggcgaagttatctcatagaagcgatcagctggtaataaagcaggaagaagaaaattccgtgccatttgaggatatttccgtgatagtggtggaaactcacagggcatcaattacatcttcgctgtttagtaaattggcttcaaaaggaatcccccttataatctgtgacccgtctcatcttccgacgggtctttttttgtcatttcaaagacatagtcgatttttgaaagtcttaaaatctcagatggaacaaactctcccctttcgcaaaaattgttggcagatgatagtaaagagaaagattgaaaatc

SEQ ID NO: 2573 - DNA, 23138 bp, synthetic construct
  source 1..23138: mol_type = other DNA
  misc_feature 1..23138: note = Synthetic
ttgattgtttgcacctgacactaattcgtcacaacgttttttaactaataactttaaactctctctattaccagattgaatagccatagacattaatttttctatctctggtagctttaagtgagggtattttattaaccattctagagcgtactttttctgaaattgtttgaataagtccttttctaaccaacaaacaggagagttcttgtaattggcattggaaagttggggttcaatataatcatttatgaatttttctattgcttcgatattattaaataaactcttttctgtctcattttttaattgccttctaatattgtgttccatcccaatcaaataaacagagaaattagtgtataatgcttctagaatatccttcggtaaagattttaatgttccttctcttgtgaaaatttctatacaagaagcataaagaataatttcaatatttaacactgaagagtcagaatgcagtttagccaaatcagttaaatttggtatgttcgactgaatgtagttaatacagttatataatgcatttctaactaattgttcatcaccaaatttctctgctattttttctggctcttgtagaaaagtataagaaaagcttaataaactatcccaatgactaccattttctattaattctctattttgttgaatgtatttaatatttcttgcaagagatttacgctgttttctattgatatttctaatactctttttacagttatatttaagtgtatttctttgatagaattccttactttcttgatttattctataccaagccattaagaaagctggtttttgtaaagcctgatttcgcatataccttctcagtaaattgggctttttctctttgttgtaaaaatcatgacgagctatgaaatatttccatagttcaatattgttagtttcgaagctgagatctataataaatcttaggtcttgatattggaaatttaatcctgaatgagaatgccattcaaagtgatagaatttcatattatggatttcttctctaacccatagattttcaaatgctaacttaatgattccctgccttaattcgtcattctctgataaagtttttacagataaactttgttcttttgatattccattctgaaagtataaatttttaatccattcccaaatcttagacatattgaattttgaagataattcaaaataacgatctaataacataccaatgattttgctaatacctactcggcactcacaatcatattttttttgacaagtacaagctagattattagatagtgaatctagcaattttattgttaaatctagttctagttcttgaataaataatctaataaaataacgttttccaaaaactcgttctatttcataattggttgggtatagttcagagcatatgttaagaaaagtaatgtaatcgtttatatcaaaataacttctgtcagataaattcattatttcactagcaatagatagtgaaacactatttttttcagagattagttgtgcccaaacatctttaattggataatctttcactttaagcagacattctcctgctagtctacgaatagataattctttatattttggattagtatcacaaatgattgttcttaactcatcaactactttagaaactactgacgattcaagtaatagttttaataatacccgttgtaaattcccgcttctatatttttccgatagtaattcttttaattcatcaatcatatcatcagaaaaaaaatcagaaatactaaagtttctccatatatcatgacgagtaaaatatggatccttttgatttacgtcttttaatcttgatagtagtattctttttgatcttggaagaagtaaggatggatctccattcgctaaaatagcataaggatctaaatttattagcttttcctgaatttgttgattctctgataatacagctatccacgaaaataaaccgcgcaattcatctctaacaatattattaggtgcaatgatagataatattttatttagagataatggagttgatgatgtaagtttgtttgcaaggtaacggcctgcacaatattccacaacaattttatgaattggacgatgctgtccttgattttcaccaggggtaaagaactgtgtcgatagtatttgaaatatattagtatcagaattgaggttttttatattaggaaaaagatgcttagaagaaaaatcactagtgctaatgccctctgaacctgataatattaatttgcaaaaaacgtcctcaactaattcaacttttttatttcccggtaatgaagatgaatgggaaggattgctttctctcgctagcccttcaattgcaattttaaatgcggaatatctattttcaaatattttattgttttcaatataggatttggaaaatagtcttaaaaataaaggattagataataaaggtgctaattctattttaccagcctcttgcaagaaaatttcagcgttttcttctggataatatgaattgaaaatttctttctgttcttgttgattaaatggctttaaatataataataaaggggcttcacgaaaaagctccttacaggtttgtgaatagctttcagaccactcactagaacggctagagagtataattttttcagcagatgttttttctgccataaccaatgacttagttacagaagaagagtctattcttactaattcatcaaatgcgtcaattataagtaactttgttttttctactggtaaatggataaagatattagctgtcttcttttgaactcccaactgttgtgaaatattatttaataagtaacttttccctgcacctggctcagccaagataataataacttttgggattaatgatattaattcagactctttaatttcttgattatcagaattatataatgttctatcaatataaaaactcataatgcatctctcataaagaaatcagttgtataaatatgctccaccccacccaaattctctttccataattcatccattgtaatcacatatttcgggtaattatccgcaatttcctgtaacggagaaaattctctttttacagtctcttcactttctaatttataggcaacttgaatatagattttttcattctgtttttgggcgataaaatcgatttcttgtttatctaatttaccaatataaacctgatagcctcggcgttttagctctaaatagaccaaattttctaaaatgcctgaaattaaactggtacggaatcccattgtggcatacagcagagaaacatcacccaagtagaatttttcttgggtttttaaaatctctttgcccttaatatcaaaacgttcgacacggtgcaaaataaaagcggactctaaggcttttaaatagttataaaccgtatttaaatcgattttgcgttgctgacttttaaaataatcggcaacatttttacccgaaaacgtattgccaatattatcaaaggcatattttacaatgcgctccagtaactcgacatcacgaattttatggcgttgaacagtatcccgtaaaataacggaagcgtatatatcctgcacaattttatagaccgtctcagcttcataattcgcggtatgtaccattgggaaaccgccttttcgtaaatattcatgaaaaagtgcggttggatttgatgaagtttcgggtgaatatgccgttttgaaatccaaaaattcctgaaaagagagggtaaaaatcgggatttccacataacgaccggcaagataagtggaaagctcggaagagagtaagtgcgagttggagccggtgatatagaggtcaagattaaaatccaccataaacgcattcactgctttttcccactcgctcacttcttgaatttcatcaagcagaagatagtatttatcggtagtcaggattttttctttcaccaacatataaagcttgtcggcggttttaaagtcgctaaatgcaaaactttcaaaattaatatgaataatctgctgttcggcaatgccttgagaaatcagctcttcccgaagcagtttcatcacggtcgatttacccgaacggcgaatgccggtcattactttaattaacggtgtattaataaacggtttgagttgttgaagatagtttggtcggttaatcatttttttatgggtataagcctaaaaacattattattttaacaagtttttatggttataaccataaataatgttgagttatgttgtgtttttatggctataacctaaaatagtgtaaagtttttggctagattaaccgcttgtaaacttttatcgtattaggaaaaaatcacttctcttgttaagtcgtgaggctgatgatttgccccacacccaccgtcaccaacaccgccaatcccaaaatcgacacaatccccaaaccaccatcgacagcagtccaatcaaaatgatacggattttgcaaggcattggttttggcgatggtttggacttggatcaccagcacccagcggagtagccagccgaaagcgatgagggcaagcacgccgagccattgcaagcggtggtttttggcggaaaaattgcaaacgagggcaattagccagaaaatgccgacaagataggcggtgattgagccgttgaagagcagagcaaaatcacgttgagcggtttcactgctgaaagcaagaccaatgatagaaagtgcggttagaatgaggcagattttgccccctgcccccgagggttgctcaggtacttcccccgcaagcgggagcagaaattggcttatcacttgggttaatcccaatgccaccgcccacgcagaaaagagcataatcggtaatagccacgcactgtgccataagattcttgtgccggtttggtaggtttcaagcacggtgtagccgataataccaacagcggtgagtgcagcaaacaagcggaatgcccaaagtaagtcttgatttttcagtataggaaactgtaaccaagctaaccatttcggcaggttcggctgggtgtgatgagccaatgccagcacaaaataccctgctaccgccacgctgaatagaggcaggatcatcgctccccacgccattggcgaccaccacgcaaaatcggtatagaaatgcagaatacggctcggctggtgcaggtcggcagtcagtgctacaggggcgacaatggagccaatcaaggctaccgtcaccgccgccagctcgcaagcggtcggttttactcgtgaacattgttcactcgcccctttggggccgttggcggagccaacgttcaaaacgcaagcgttttgtctctgcttttttgcaaacagcacggcagtaaacactgctgttgccgctacgcctacgaagaagaaataatgcacaatccacggcaaccagacgatatgttgcggttccactaatacttcacgaatcattttacgcctcccccgtccagagcattggttgcccgtcaattttgctcacaaaggcctcaatcagccccacatagaaaacgtgtggcacggtgccggcctccggttttagcactttcaggtcatctttatgggtttgataaagctgggaaatttggcttttcggatcgttcaaatcgccaattacccttgctccgcccacgcaactttccacgcacgccggcagcagacctgcctccaaacggtgagtgcagaaggtgcatttatcggcggttttagtttcttcattgataaaacgggcatcgtacgggcaggcttgcacgcagtaaccacagccgatgcattgctcgttgttaatcaccaccacaccgtctttgcgttggaaggttgcctgcaccgggcagaccggcacacacggcggttggtcacaatggttacacaaacgaggtagcaccacattgttcgccacctgcgtaccgttggtgatttcatattgacgcacggtggtgcggaagctgtgcaacggcgtggcgttctccaccaaacaactcacggtacacgcttgacagccgatacatttgcgtaaatcaatcagcattgcatagcgtttgttctcatcgccctcacgccgagcaggcataaatgcctgagccgattgcaacggcacaaaacttgcccccaccgtcaaggcggaaagctctttcaaaaaggaacgtttgcttaaatccatatttcccccacaaatttaaaaataacaagggtattctaaggcggagaaggaatggcaaggtattgtggttttccacatatcagggggaagtttgatttgggtcaagggctatgggaaaaagataaatctgatctcgtctatcactggatcagatttatttcatattctatagttagaattttcttaatgatttattatcaatgtcaaagtccttaatctctaatttatctaaaattacaggtaatacttgatgaagtaatctcattccaacgagtaattcattcatatagatatcagggtgtaatctattatcattaaatcctaaatattcggcttcagcctcaactcctaaattatcgtgctcatcatcaattaaatgcattaattcagcccttaatggaatattagatttaaatgcatacaatttaagttgttggagccattctctataatccttttcagtttctctttttaatttctgaaatccggtcagctcaggtaatattgtatcagccttaataattgctaggtttaataggtttgcttctatatcgacaatcaaattggaaaattcgggattttccattgatagttgggtatcaagctctgagatatatgcctcataaaaactatacacatccgcaaaggagcagaatatgctatatatcaatgagcaaaattcgttactataaatagtttcaataaatgagtcactccaatcaatataatgatcatagtcattttctaactcaggagggaaagatagaggaaatttataccctatcattctgagtgagtcgactaaattagatagtatgagatcggtttcatcaatcaatggtgctacattaaaccctgtctcgccattatcattagctgattcagctaattgggtaatgattttctgccatttttgtgcatagcttatatgaccaaaagctaaaatgacatttggatctaaatctccaatatctagtaatttccttaccttattttccatatcaaatgacatatattcccctttcttccattttgttatttggctaggagagacggatagcttgtttgcaagctctttttgtgagcaagataagatttgcattgctaattcaatcattgataaactcatagaaacctctttttcgtaaaaattatgaatttactaaattgtatatttattttactaaaacaacaagagcgaatttggttttttactaacaactgttttgtctgtgatcattagggtttaaaaatacagaaaatgaaacgcctatttctcttcttcctattcctttcccacaccgttttagccgaaacttggcacatcggcattctcgcccagcgtggggagacctatactcgcacgcattggcagccgtgggtggattggctgaatgagcagtttccaaatgagcggtttgagcttgtgccgttggggttgggtgaggcgaatgagcgggcggagttggattttttgctgaccaaccaagcccagtttttctatttaagtcggcagaatgtccgttggctggcgacgctcggcagtccgtttactgaaaacggcgagcaaggggcggtgggcagtagcatttgggtgcgtgctgacagccattatcggcagttaagcgatctgaaaaatcagactatcagtgcagtggataacgatgcctttggcggttttttgcttgggttgtatcagtttcatcaggcgggaatgcaacaaaaccgggatttttcggtgcagtttagcggttttccggtggaaaatgcgttggctttgctggcggaaaaacaggtggaagcggcgattgtgccggtctgtttgctggaagagttggagaaagagggcaagttcaagcggtcggatttccgcttaattttgcaaaacccacaggcgcagggttgccttgccagcacgccgttattgccgaactggtcgctggcggcgatggaaaatgtgccgaacgagctggcggttcagtttgccacacgcttgctaaacagccacaatcccgacctgccccgctggacgttgccgttttcttctgctcaagccgatcacattctgcgtgaactgtatcgccacccgcaacaaaaaagcctgtgggcaacggtgctggattgggttcggcttaataaattcggcttgctggcggtggcgttattcattttgctcaaccttgtcgccctgcgttatcaggtctatcgcaaaagcaaggcgttacagcaggcacaccgcaaaatgcagcagtatcagcaggagctgacccgagctgaccgccttgccctgctgggcgagatgaccaccggttttgcccacgaactgaaacagccgttgtcggcggtgcgaatgtacgccgaggggctgaaaagccaaaacagcaatccttatcaacagcggattttggataagctgattgcgcaagtagatcgggcggtgaaaacgatgcagagcattcgggactgggtgcaaaaccgcccgagtggtgagccgcaagcggtcattttaaaccaattgattgccaatgtgatcgagtttgtggcggtggaaaatcgccagaatgcacaaatctcgctgattgccgaccgcacttttcggcttaatttacacgccaccgtgctggaacaagtgctgacgaattgcctgctcaacgccctgcaagccggtgcaagcgagattacggtgcggttacaagcggtcgaaaacgggctggaaattgcaatcgaagacaacggcggcggtttttcccctgcccaacttgaatttccgtttgtgccgtttcgcaccgacaaaccgcacggcttagggctaggcttggtgctatgccaacggctgatgcaatcgctcaacggacggattgtattgacgaatggggagaaaggggcgagggtaagcttgtttatcccagatgattaacttactgagtacgagccgtactcagttaaataaccctcgtcactttgtgacgattagatagagcgacaaagtcgctcggattcaataaccctgcactgctcgtgcagggagaatacggagaaaaaatgattatccacattcttgatgacgaagaaagcattttagacgccatgtctttcctgcttgccccactcgggattgaaatccaaacgtggcaatccagcgtagattttttggcacaggcggatttacaccaacaaggcgtgctgttactggatattcgaatgccgctgccagacgggcaacaggttcaccaacaactgcgagaggtgcaatcgacccttgcggtagtgattatgaccgcccacggtgatgtgccgatggcagtcgctgaattgaaaaaaggggcagtggattttctgcaaaagccggctagttttgaacagctaaaacaggcgattacacaagtgaaaacggtgagtgaacaagcggtgaaaattcgtgaaatttcgcaaaattacgccaaattgacggaaaaagagcgtaatcttgtgccactgattatgcagggctttaccaataaacagattgctgatcatctggctatttctgttcgtacggtggaagtacaccgagccaatgtgatggaaaaaatgcaggcggagagtttggcagagttggttcagaaattaggcttattgccaacaccataaaatgatgccccttaaagccgaaacttcaaggggcagagcattacggtaattctttcgaattccttattgtagcaacgtttctcatttcgcagtactacggtcaggaattctaacgaccctacgatttttgtcaaataaattttgattttgtggtaaaaatagcaacagattctaattcggagtgttgatatgaaaccacgtaacttaaattatattttggggctagatttaggcattgcttcagtcggttggtctgtagttgaaattgacgaaaatgaatacccgatccgcttaattgatgttggcgttcgcacctttgaacgagcggaagtgccgaaaaccggtgaatctcttgcccttgcccgccgtcttgcccgttctacccgccgtttaatccgccgccgtgcttttcgtttattaaaagccaaacggctgttaaaacatcatcagattgtcaatgccgaagaacttacccaattgcctaatcaatgttgggaattacgggtgaagggcttggatagccttttaagcaatacagagtgggcagcggttctgctccatttgctgaaacatcgtggctatctctctcaacgcaaaaacgaggcgcaaaatgccgataaagaattaggtaaattgagagagggaatggataataacagtaaattactcctagaaaataactatcgcacccctgccgacattgcggtgaaaaagtttgcggtggaagaggggcatatgcgtaatcagcgtggcgcttatactcacacctttaaccgccttgacattctggcggaaatgcaactactgtttaaaacccaacgagaactgggtagcacttatgcaaacggtgagttagaacaggcattttgcgaattgttgctgtggcaaaaacaagcattaaatcgtagtcaaatgctttcattagttggaaaatgtacttttgaaaaagaagaaaaacgagcagcaaaagcaagctactctgctgaacgctttgttgcaattcaaaaattgcaaaatttgagaattttagaaaatggtgaggaacgaggactttttgatagtgaatttagtcttcttttagaaaatgcttataatttaaaatcaggcttaacctataagcaggtgagaaaaatactttctttatctgaaaatgcgatttttaaaggccttccttatttatcagatgatctagaaaagcctgaaaaaacacaattcttagcttttaaattttaccaccaattagcagatatattaaaaaataatggtttttccgatgagtggcagaaactatcacaagaacctacattacttgataaactaggtactgaattatctttatgtaaagaggaaaatgaatttatagctcagtttaatggggaattaccagaagctatgctttctaccttatttaaccatactaattttgacaaatttatccatatttcactcaaagcattaaataatattcttcccctaatggaacaaggtaatgactatactaaggcttggcgtaaagtatatccagaaccaactaaaaaagacgaaaaaacactaccaccaatccctgccgatgaaatccgtaatccggtggtattgcgttctttgtctcaggcaagaaaagtgatcaatgccgtaattcgactttacggctcaccggctcgcattcatatcgaaaccgctcgtgagctaggaaaatcttacgatgatcgtcaaaaaatcaaaaaacagcaagataaaaatagtgatgagcgtgatcaagcagtaaaaaaatttctagaagaatgtccaaattttgccaataaagtaaaaggcaaagatatccttaaaatacgtttgtatataaatcaagacggaaaatgtttatatagtggaaaacctctcgatccgcatcgtttactagaaattggctatgtggaaatcgaccacgccctgccgttttcccgcacgtgggacgacagccaaaacaacaaagtgctggtgcttgccaacgaaaaccaaaacaaaggtaatcaaacgccgtttgagtggttgggcaaagatgaacatcaatgggcgttatttgtggctcgggtaaacggctgccgtttcccttatgcgaaaaaacagcggattttgaccaaaaaattggatgaacaaggattcctaaaaaggaatttaaatgatacacggtatgtttctgcttatttaatgaagcacataaaggaaaatttacatttggttgggaagggaagcgataaagtatttgcatccaacggacaagttaccaatttcttgcgtagatgctggggattggaaaaaaaacgtgaggagggtgatcggcaccacgctttagatgcgatagtagttgcctgttccactgcgtcaatgcgacaaaaaattactctctttaagaaatatcaaagatggaacttgaaaacaggaaaacacattgatcaggaaaccggcgaaattattccgctccacttccctgccccgtgggatttcttccgccaagaggtgatgatccgcattttcagcgaaatgccacaagaagatctgattatgcaactgccggatcgcccacaagcgaaccacgaatttgtacaaccgctgtttgtttcccgtgcgccaagtcgcaaaatgagtgggcaggggcatgaagccaaattacgctcagccagaatgcttgaagcgacgggtaagagtattaaaaaagaatttttaactgatttaacgattaagaaccttgaacacatggtaaataaagaacgtgaaccagagctttaccaagcattagtagaacactttaaaaaatatggagataagccgaaagaaaaattcttcaaaaaagggggcgtagaggttaaatcaattagaatttcaaaaacccaaaataaatctgtaaatctaggtaataaaactattgctgataatggtgatattgtgcgtacggatttattcttaaaaaataaaaaatattattttgttaatatatatgcttggcaagtttccaaaggcattctacctaaagaaacaactacaggtaatatattggataactcatatgaattccaatttagcctatttaaaaatgatttactagagatccctcatcctaaaaatgaaaatgatagtatcttggcatattttattcgtccagatgacgaacgtagatggattttaaaatttcatgataacgctaaaattcccgatatatatggaaaaaaagacgagacctctattcgtttaagtattcaagggcaaaaatttatcaaaaaataccaagtcgatgaactcggtaaaaatattcgtccttgtcgtccaaccaaacgtcaaggcgtgcgttaaacccaatccctgcctgctctgcggtgcagggattttttctatcggaggctttatgagctggcgaagtattttaatcagtaacggcggaaaattgtcgctccgccaaaatcaaatggtaatctggcaggaagaacaagaattttgcgtaccgttggaagatattgcggtgattgtgattgaacaccgagaaaccgtgattaccacaccacttctctccgcccttgccctaaacggcattactcttttaacctgcgatgagcagtttattccttgtgggcaatggctgccatttgggcagtatcaccgccaactaaaaaccctcaaactgcaactggaaatgagccaaccgctgaaaaaacagctttggcaggtgattgtgcagcagaaaattcgtaatcaagcctttgtattagtacaaaccaagcggttagatatggcggaaaaattgcaacatctagcgaaacgggtgaaatcaggcgataaggaaaatttggaagcacaggctgcattgatctactttcaaaccgcattcggcagtgattttcgccgttggcaagaaaatgcgatcaacgcccaccttaactatgcctatacggtgttacgttcggcagttgcccgttcgctggtgctgtatggctggttgccgaccttagggctatttcaccatagcgaactcaatccctttaaccttgccgatgatatgatcgagccattccgcccgttggtggatttaatggtatggcaactttggcaagatgataaattggcagacagtctcacgccacacaacaaacaaaaattggtcggcttattgcattatcaaatgcggtttcaagatcaaacatttagcaccctagctgccattgatcgcaccattggttcgctacaaaacgccatcagccaaaaagatcccagcttattaaaactgcccgaaattttacctttgaaggaacatcaatatgagtgaggcaacctttatgcgtattatcgtcttttttgatctgcccgttacaaccaaggccaaacgcaaagctgccaaccaatttcgccaatttttacttaaagacggttatcaaatgttacagctttcagtttacacccgcattgtgcgaggaagagattcattagaaaagcacaataaacgactgacggcacatttgccggaggaaggctccgtgcgttgcttggaaatcaccgaaaaacagttcacatcaatgctgttgctcgtgggggaactgaaaccacaagaagaaaaagtcaatgcaaaccaattgctacttttttaataaaatcaaccataagaaaattttttttacgctacacaaaaacttttgttcaattggcgatattttgttcacacaaataaactaaatcggcaattttccacaaaaaacagagaaaaataagcggtctgttttcaaaaaactctgcaaaatcttgcaaaaaatttccaaaaacagaccgcttgtttggtattttttcacgttttttaatcgcttaaaaacgcaatacccccttataacataaggcgttcataccactctattgtagcactgcgaaatgagaaagggagctacaacagaaacgattgacgtagaattagaacagcaattgtagcactgcgaaatgagaaagggagctacaaccaatcatttatcggggaacgtggaggaaatattgtagcactgcgaaatgagaaagggagctacaactctcccataattcctgtgtaatatttacttattgtagcactgcgaaatgagaaagggagctacaactgccctacataaccaatgatttttacttcgattgtagcactgcgaaatgagaaagggagctacaacaagcaaggcaaggttgtggtacagaaaataattgtagcactgcgaaatgagaaagggagctacaaccgttgtggttcgtggaacatctcaaagaggattgtagcactgcgaaatgagaaagggagctacaactttaagcgttgatgtataaccgaatgtacgattgtagcactgcgaaatgagaaagggagctacaacttgaatcatcaacaatcgcttttgattgtgattgtagcactgcgaaatgagaaagggagctacaaccttgtgttgttacttttgaacaatgcggatattgtagcactgcgaaatgagaaagggagctacaactttcggtataactctaaatcgtcttgggttattgtagcactgcgaaatgagaaagggagctacaacaagattttgatacatgtcttgcaactgcccattgtagcactgcgaaatgagaaagggagctacaacgaaaagcttgagatggaatttaaaatcggcattgtagcactgcgaaatgaaaaagggagctacaaccctacatataactatagcactctacgactaaatatatttttcaaccatctcaccacctcatcaacttgtttatctgctaggttagaataacccactacaaatgcatttttcggtgcttggcttttatcttgataataacgagctaaactcaccatctttataccttgctcattggcagattgcagaattttttcatcacttaacgccgtgtgaaactgcacgataaaatgcaaccctgcattctcttcttttatcgtaattttttcagcaagcgggctatttttgagtgaaaagagcaaattatctcgttttttctgataataggctcgcattcggttaatgtgtttttcaaaatagccttgctgaataaattccgctagtacatattgctcaaagtttgaaaccgtagaggcgtaaaagcccaattgttgatgaaaacgtgttaataattcaggcggtaataccatataagcaatacgcacggttgaggatagcgtcttggaaaaggtgttcatataaatcaccttacctagcatatcaattgattgtaacgctgggataggctgtccaacaaaacgaaattcactgtcgtaatcatcttcaatgatatagcgatctgtcttttcggcagcccacgctaataattcataacgtttagcaatgggcattactaatcctgtgggaaaatggtgggatggtgaggtgtgtaatacattgacgtttttgagtacatttgttgcataatccattgaaatagaaatgtgatttaagccatagctttgaaaaattttatgcaacttgtcataactgggatcgggcaaggcgtaacttttatctaaaccaagaagttgaaccaataagccataaagatattctgtccccgcgccgacaataatttgtgcaggtgaaacattcattccccgaaaatcatgtaaatgcttagcaatcgcttgacgcaacattagcactccgccactttctgcccgctccattaaggcagattgatggtgttttaatacttctctgactaattttgtccacactgaaaaagggaaattttccgcagaggtttggctgtttgtgagatctgcttgccattttttgctattttctatcggttttgaaccgcttgtttcagtgaaaactgacctgcttgtacttgttttgggtaaattaagtggattgacaaaaaagccttgctttgcttttgcactcaaatacccttctgccactaattgctgataggctgtttctacggtcatgactgaaatacctaaatgcttagcaaaagctcgtttagacggtaatttttcaccagcaataatgtcgccttgttcaatatccagtttgatgaagcagtaaagttgttcatagaggggaatattgttttttttgaaagtataggtaaccattctgaactgattaaaagagtgaaaaatggctattttaatcagttcagataaatttacaatgcccctaatttttcattgacaataggaacaaataaaaatgactcaccgttatgatctcaacaaacaactggcacaaatgttaaaaggtggcgtgattatggacgttaccacaccagaacaagcacgtattgccgaagaagcaggggcttgtgcggtgatggcgttagagaagattcctgcggatattcgagcggcaggtggtgtatctcgtatgagtgatcctaaaatgatcaaaagtattcaagaggcggtttctattccagtgatggcgaaagtgcgtattggacattttaccgaagcacaaattttgcaagcgattgaaattgattatattgatgaaagtgaggtgctttcccctgcggacgatacattccatatcaacaaacgtgaatttgatgtgccgtttgtgtgtggtgcaaaagatttgggagaggcgttgcgtcgtatcaatgaaggggcggcaatgatccgcagtaagggagagccgggaacaggcgatgtggtacaagcggtgcgacacttacgcaaaatgaaacaggaaattgcgcgtgtggcatcactttctactgatgagctgtatcacgctgcaaaagaattacaagtgccgtttgatttaattcaatatgtgcatcaacacaaaaaattaccagtggtcacttttgctgcgggtggtgtggcaacccctgccgatgcggcattgatgatgcaattaggagcggaaggggtgtttgttggttcagggatttttaaatcaggtgatccagcgaaacgtgcacgagcgattgtgcaagcagtgactaactataacgatgccaaattgcttgctgagctttccgaagatttaggcgaagcaatggtagggattaacgagcaagaaattgaattgttaatggcggcacgaggtatttaatgaaaattgcgattcttgctttgcaaggggcatttgtcgaacatgctgataaacttaaacaattaggcgtggaaagtgtagagattcgccaacttgccgatttaaatcaagattttgatggtttaatcttacccggaggggaatctacggttcaggggaaattactgcgtgaattagggctatttgaaccacttcggcaaaaaatcttgaacggcttacccacactagggacttgcgcagggttaattctacttgcagaaaaacttgccaatgatgacaagcaacattttgccactttacccgtcaccgttaagcgcaatgcgtacggtcgtcaattaggctcatttctcactgaaagtgaagtaaaacatatcggcaaaattcctctgccgtttatccgcgccccctatgtggaaagcatcggcgaaggcgtggagattttggcagaagtaagcggtaacattgtcggtgtaaaatgcaaaaaccaaatcggcatctcatttcaccccgaagtgagtgatgatctacgttttcatcgttattttgtggagatgtgtaaaaattgataaaaacaagcgataggatgcataacccctatcgcttattctttatactataataacttgaatgcctttctgttcaattctttctttcatttcttctgaaagctggttatcgctaatcaccacatcaattttttccaagccacagacgatatttgggcttttacgtccaaatttggtggaatcagcaagtaccacaattttctttgctgcacggcacatagcggaacttaccccatagatttcattaaacgtggttaagccaacttctagatcaaaaccatcagtgccaataaatagcgtgtcaaaggtagaatcattaaaagccgattcggcaaaataaccatgaaatgaagcggagcgttcacgataagtgccacctgaaatcattaaattgtaattttttttcagttgagtgattccattgataatatgcaaactatttgtcatcacggttaaattatcaaatttaaccaaatgcggaatcatttgtaatacggtgctacctgcatccataataatggaatcgccatcattaattagctcactggctttttgccctatcttttgtttttgaagcaaattgatatgatttttttgatcgatgctggcatcaaatacttcatcttgcaaaatgacaacgcttccgtaagtgcgtaacactttattttgctgttctagcacggtgagatctttacgaatggttgccccagttaatttaaagtattcagccaatacttccacatcggttctaccgtgctgactgaggtaatctaaaatctgtttttggcgttcaatgggtttcattgcttttcctactgttaaaagattattcagtatgaaaatgttgccattagttttgataaggaatctactcgtttatcagccaaactaaaacgaggatcggcataatttggattaacaatcacggtttgtaaccccgctgctttcgcagcaattaagccggtgacactgtcttcaatgactaaacaatcattgatattcacattcagcttttgcactgccgttaaataaaccgctgggtgaggtttgccataagcttcatcatttgcactgcattgcacacgaaaataatcccaaagattcagtttgttaaataccgcttcaataatcatcggggctgaagaggtcgccagtgcgagcggaatgttctgtttttgtaataaatccagtaagggataaagcccttccatcgcacaaccttgcgctaaaatcgcctcgtaagcatagcgcaaaatttgattagccacttcttctgcattggcatttaattggtaacgttcaatccagatatgcgcaatttggtcgatacgtttaccgcgtgttaaatgctcacaatcttgttcggtgatttgttgcccaaaagcatgcaatgtttttatttgtgcttcagcccacatcggctcagaatcaataatgacgccgtccatatcaaaaataacagcttttatttgcatactattttccttgcgaattatgacacttttttagcaaaaaagatgtgatttgattcaaaatttagcgaattaatgcaatttttagtgcattttgtagtgctttattattgggaaaggcttgttcaggctgaatttctgttagcgatttacccgttaaaacagtggaaaaagccggtttggcaaaaacagaaaaaccctgcatagttaagcactcttgtacaatattgtgattatccacggctaagacgatcacggctttgggcgtaaaacgcccctcatttctgccaaccaccactttaccctttttggcaatctctgcataagcctgattaaataaacgaatttgtcgccaaccaagtaaaatctgcaataaccacatacagacggcaaagccgatcaagatagcagtagaactcattttttctccttaaccgtcaatcatagaggggggcacccctctatgtcattagaacattacctgcccaccagtaatattgatggattgtcctgtgcaatacgcggcttgctcgctggcatagaagcgaagcacatttaatacatcttggtaatcacatcctcgttttaatgggactttatcaatataaacctgctccacttcgctttcaggaatacccaattttttggcgtattgtggaatcaatgattggaacattggcgatttaagtaaattacctaacattaatgaatgtacggtgataccgtgctctgctaaatcaagggctaacgattgagttaagccaactccgccaaattttgccgcactatatcccgaattatgcttactccccactttacctgatttggagttaatttggataatgcgccctttaataccatctcggatcattaatcgagaaaaatgtttggcagaaaggaaatagccagttaaattcactttcacagataaatcaaaatctttcaaatcaaaatctgtgattttggctgctttggctgtccctgcactatataccactaaatctacacgtccaaatgcctcatcagtggcttttgccatcgcttccacgctggtctcattggttgcatcgacttgtacgccaatcgcattttctgcaccatatttgccattaataatgcccgcaaccgcctgtgcattttcaccatttaagtctgccaccacaacccgataaccactgtcagcaagtccttcacttaaaaaagcccctaaggtttgaccaccaccaacaacaactgctacttttttcattttaaaatccctcttaattatttaaaaagacaaactcactgcctacgctaatttcatttggcacatcgccctgtaagtgaatagaacctggaaattgtgcttcgcttgccccatcaaaaaacagtgtaatatgcccaagttgagctaagttttctgaggcgacctcccctacggcggtaataggataacgcttggcgttaatctgtaattccccccctacggcaagaggttgttttaaatcatcatggctatgcacaaagcagtaatccacaacatctgctggtgcgccacttttaaacataatcaacatattgtcttgcaatgcatcttgggcaaaatcgccaatttgctccacgaccacttgataaataacgctcattgtttttccttatgaatagatgaaaccagacactaaccacgccactaatacagtcggcgcacctgttaagaagcggctgactaatacagatggcaccccaacacgcaccgtatcttgtttggcttctgccatagataaaccaacggggataaaatcacaggccgcttgcgcattgatggcaaaaagtgctggtagtgccaaatgcggcggaatattacctaaccctatctgtaccccaactaatacgccaatcacttgtgcaatgacagcaccagggcctaagaatggtgaaagcaatgggaaagaacaaattaacgcaagagtcactaaaccgagtggattggttgctaacggcgttaatgcatgtgcaattaagtctccaatacctgatgccataatgatcccgatcagggctgatacaaacgccataaatggcaaaatggtttttaatactgtttcaatggtttcacgccctgcttggtaaaacaccgcaacgactgatcccatacctgtgccgatttttgccagcagaccgtcactctgttcggtgatttttttgctactgtcatactcacggtaagcggtcggattttcactattttttgcagaattttctgtagattgcaccgcttgcacatcatcatcttttacatgaatattgtttggttttactgcagaaacataaatatcttccacaataaactgtgctaacgggccagatttccctgtggtatgaatgttgattgtgggaatacggcgttttggataaagcccacagcgtaacacgccgccacaatcaataatggccaccccgatctcttcttgtggaggttcgccatctttaaaaccgtctacagcttcccagccagtgagttctactaagcgatcaacgattgcagggcgcgttccccctgttacatatacaatttttttcccttcaaccacagggatagaaagaggaccgccccaaccgccattgcctttttcaatataaattactttactcatagcttgctcctattttttcattctgcttttattttgcaagatgaacttctcgttctaattgaatacccattcgtttctcaaaaatcttcgttgtaaaatcggttatccaaccacggaagaagttggtaaataaacccactaagaagtagctgacggctaatggaccgagtggcaagccaagcgtggttaagccttgcgcaatacctaaataaacaaaaagctcacctggattgatatggggaaataaaccgttcattgagtggcaactataagaggccgccgcataataacttggtttataacgttctggtaaaaagcgacctaaacttaatgtcattggattacaaaatacgaaagtaccaattaacggtaataaaaaataacgggagaagggattgcctgaactgcgttgtgccaagcgttcaatacgctcttgccctataaaataaataagtgcattcatcacaactaacaatgaaatcaataatggcaaaatgccagtcaccataccgacaaacacctcaccgcctttttggaatagaccgatgaaccactcggctcctttggtaata

SEQ ID NO: 2574 - DNA, 22094 bp, synthetic construct
  misc_feature 1..22094: note = Synthetic
  source 1..22094: mol_type = other DNA
aacgccgcgtcgtgtatgacctcatcaacgtcatccaaggcgaagccacactcaaccaagccctgattaaagacaaaaactgcgaaaacctctacatcctgcccgcctcgcaaacccgcgacaaagacgcgttgacccgcgacggcgtcgacaaagtgatgaaagagctgtccagcaaaaaaatgggcttcgagttcattatctgcgactcccctgctggtatcgaacaaggcgcactgatggcgctctactttgccgacgaagccatcatcaccaccaatccggaagtatccagcgtccgcgactccgaccgcatcttgggcattttgcaaagcaaatcccgcaaagccgaacaaggcggcacagttaaagagcacctgctgattacccgctactcccctgagcgcgtggccaagggcgaaatgctgtctgttcaagatatctgcgacatcttgcgtattccgttgatcggtgtgattcctgaatcacaaaacgtactgcaggcctccaacgccggcgaacctgtcatccaccaagacaatgccgccgcagccgaagcctacaaagacgttattgcccgcctcttgggtgaaaaccgcgaaatgcgtttccttgaagccgagaaaaaaggtttcttaaaacgactgttcggaggttaatacatgtcactgctcgatatgctgttcggcagaaagccgaaaaccgccaccgtcgcgcgcgaccgcctgcaaatcatcatcgcgcaagaacgcgcacaagaaggccaagctccagattatctgccgaccttgcgcaaagagctgctggaagtcctgtccaaatacgtcaacgtatcattggacgacatccgcatctcccaagagaaacaagacggcttggacgttcttgagctgaacatcaccctgccggaacaaaaaaaggcttaacacatgaccttgaccgaattgcgttacatcgtagccgtcgcacaagaacgtcacttcggacgtgccgcacgacgctgctttgtcagccagcccaccctctccatcgccatcaaaaagctggaggaagagctgtcggtatccctgttcgaccgtagcagcaacgacatcatcacgaccgaagcgggcgagcgcattgtcgcccaagcccgccgggttctggaagaagccgaactcatcaagcaccttgccaatgaagagcaaaacgaattggaaggcgcgttcaaactcggcctgatttttaccgttgccccctaccttctgcccaagctcattaccgcgctgcgtgaaaccgcgccgaaaatgccgctgatgctggaagagaactatacccacatcctgaccgagtcgctcaaacgcggcgatgtcgatgcaatcgtcgttgccgaaccgttccaagagccgggcatcgtaaccgagcccctgtatgacgaacctttcttcgtcatcgttcccaaaggccatcactttgaagaactcgatgccgttacgcctcagcttttgagcgaagaacaagtgttactgctatccgaaggcaactgtatgcgcgaccaagtgttggcaagctgttccgaattggcttccaagcaaaaaatccagggcttgaccaataccctgcaaggcagctccatcaacaccatccgccacatggttgccagcggcctggccatcagcgtcatgccggctaccgccttgaccgaaaacgaccacatgcttttcagcattatcccgtttgaaggcactgcaccgcaccgccgtgtcgttttggcttatcgccgcaactttgtccgtccgaaagcactgactgccttgcgcactgctattttgcaatcgcaactgaccggtgtaacgttcgtcaacgaataaaccgtaaaacaaaaggccgtctgaacattcagacggcctttttatttttaaccaaataaaggattagtagcgggtatgaacttgactgccgataacaccacccaaagccgcgccacccaaggtagagccggtatcgccaccaatcaaattacctgccacgccgcccaataccgcaccagcagcagtgttgcgttgggtttgagtcatattggcacatgcacccaaagaagcggccaacatgatcaaggtcacagtttttgcaaaagttttcttcatggtttgattctccatcaggggttaagctgtatatgaaacagtatggcacaacctttcattaatatattttctgataagtaaagacagattaaactaagataacgctcttgatgagcggttaaatacaaaaacaaacggcaattccaaaagaatatttataaattttaatatacttggcataaaattgcgcatacatcaaccgcattcggtagtgatacaatgacgacttgtctgaattaccggaaacacccgtcatgagtatctacgcactggcacacatcatccacgtttattgcgcgattgcctttgtcggcggcgtatttttcgaaatgctggtcctctccgttttacacaccggccgcgtttcgcgcgaatcgcgccgtgaagtcgaacgtgccatgtcctatcgtgccgtccgcgtgatgccgcctgtcgtcattaccctgttcatcagcggcatcgtgatggtgtacaaccgctacctgccgatactgcaccacccattcgacagctccttcggcatcatgctgagcatcaaaatcctgttggcagtaagcgttttggtacattttgccatcgccgtcgtcaaaatggcacggcacacccttaccgtcggctggtcgaaatacatacacgccgtcgtattcagccatatgctgtttatcgtcttttttgccaaagcaatgttctacctgtcttggtaaaccttacccataccccacacacaaggattgtttatgacccaatacccgtccgtcggctcgccgatgttttacggcatcttctttattgccgtcttaattatgatcgccatcgatatggtgtcgctgaaaaaaaacggtgcccacaaagtcagcattaaagaagccctcgcttggagcggcatttgggtggccgtatcctgcgcgtttgccggctggctctatttcgaactggcgggcaacccggcttacggggtcgttgtcgccaaagaaaaagtcctcgaattcttcaccggctatgtgctcgaaaaatcccttgccgtcgacaacatcttcgttttcctgatgattttcggctatttcaaagtcgaacccaaattccaacaccgcgtcttactctatggcgtattcggcgccatcgtcctacgcgccatcatgatcttcatcggcgcagccttggtacaacaatttgaatggattctctacctcttcggcgccttcctcttatacaccggcattcacatgatgaagcccgaagccgaagctgaagaagacctttcccaaaataagatcctgaccctgctcaaaaaagtcatcccgaccagcctacagtttgacggtgaaaaattctttaccattgaaaacggcaaacgcatcgctacgccgcttttactggtattgattatgatcgaattgagcgacgtcatctttgccgtggacagcattcctgctatttttgccgtcaccaccgacccgttcatcgtccttacctccaacatttttgccatcttaggcctgcgtgccatgtactttttgctggcggattttgccgaacgctttatcttcctcaaatacggcttggccttcgtattgagctttatcggtatcaagatgctgattatgcactgggtacatattccgatttccatttccctgtccgtcgtcttcggcgcactgggcgcatccatcctgacttctttggtgtacacgcgtcagcaagaaaaaaaataatccgccgatacaaaaaggccgtctgaaaaacattttttcagacggccttttcaaatatcggacaccggcttatttagcagcatctttcaatttgtcggcagcttcttgagttgcatcggcagctttacccaaagcatctttagccgcatctttggcagcgtctttagcttcgcccacagcagcttttgcatcgtccaaagctttgtcgctggcttctttagcaccatcgatggctttaccggtagtttctttagcatcggaaattgctttctccgcagtttccttcgcatcggcaccggcttctttagcgtcagaaacagcttgttcagcagcgcctttagcttcggaagcagcagcatcagcagcagaagccgcgtgttcagcagcagcgttcacatcagaagcaacggcagaagccgcttcttgagtttcctgtttcgcctcttgagaacaagcagccaaaccagccaccatcatcgcagcaatcaataattttttcatgttgtatatcctttggtctaaaaaatatccatcagaactgacagattagaaaatcataacataattaatactcggaaacgggagaattaacgccaaataacaatcgatttacgttttttgaaaaaaatttcaaaaaaacagttgacggaaagaaacaagccacctataatgcacagcctatcgggtcgttagctcagtcggtagagcagcggacttttaatccgttggtcgagcgttcgaatcgctcacgacccaccaaatataaaaacctgctttgaaaaaagcaggtttttttacatccctatcaaacccttctccatacgatacctcccctatcttcaaaatcaagccatatacaggctttgtcccaatgccgcgcatgaacgttacccaacgcatcacaccagcaccaacctacctttaatcaaccaagtccgactcccccttccatcaactttttctaaaaacttccaaatacctaccgtcaacccactctaaatactcttgtatgccagacaatttaggcatagactaaaactacattcaactacaacaataggagaaagtttgatgaaacaactgtctatgtatatcaacggccgttttgaaaccgattttaacggcacatggcgcgatgtattgaatccggcaaccgaagaagtcatcgcgcgtgagcctaaaggcggaaaagccgatgttgaccgtgccgttgccgccgccagagaggcgcaagccgcatgggagcgtttgcctgccgttgaacgcggcgcatacttgcgcaaaatcgcccaaggcatccgtgaacgcgccgacgagctgaccgacaccattgtcgccgaaggtggcaaaaccaaagacttggcacgcatagaagtcatgttcactgccgactatctcgattatcaagccgaatgggcgcgccgttatgaaggcgaaatcatccaaagcgaccgcccgcgcgaaaacattttattgttcaaacgtcctttgggcgtaatcgccggcattttgccgtggaatttccccttcttcctgattgcccgcaaaatgggcccggctttggtaacaggcaataccatcgtcgtcaaacccagcagcgtcaccccgatcaactgccacatctttgctgaaatcgttcacgcttcaggcttaccggccggcgtattcaacgtcgtcaacggcccgggtgcagaaatcggcaatgccttggcatcacatccgcaagtcgacatggtcagcctgaccggttctgtagaagcaggccgccaagtaatggaagccgccgccactaacattaccaaagtctcattggaactcggcggcaaagcccctgccatcgttttgaaagacgcggatttggacttggcagtgaaatccatcttggcttcgcgcgtcggcaacaccggccaaatctgcaactgcgccgagcgcgtgtatgtccacagcagcctgaaagacgcatttatcgaaaaaatgaccgccgccatgaaaggcgtgcgctacggcaacccggccgaagccgaacccggcgcactggaaatgggcccgttgattgaagagcgcgccgtcaaagccgttgccgaaaaagtggaacgcgccgtcaaacaaggtgcgacgctggtctgcggtggcaaacgtgccgacggcaaaggctacttcttcgaacctaccctgctgaccgataccgacaacagcatggacatcatgaaagaagaaaccttcggcccagtcctgccggttgccacttttgacacgctcgaccaagtcatcgctttggcaaacgacagtgagttcggcctgaccagctccgtctataccaccaatctgaatgaagcgttttatgtaacccgtcgcctgcgtttcggcgaaacctacatcaaccgcgaaaacttcgaagccatgcagggcttccatgccggttggaaaaaatcaggtatcggcggcgccgacggtaaacacggtttggaagaatatctgcaaacccaagttgtttatttggaaaccgatatctaaccgccgataccgcccttcatgaagcaaaaggccgtctgaaactgatttttcaagtttcagacggcctttttgcctttatagaaaaaaataccgacatcgcgtaaaatagagccaatttttcactttatgcaggccgtctgaacacttggacagcctgacttattttcccggaaaacaccatgagcgaacaaaacaatcctcaaatcgagccgcagttggacgaaaaccaaatcatcgccctgcgccgcgaaaaactgcacaacatccgcaaagaacgcaacgcttaccctaacgatttcaaacgcgacagctttgccgccgacctgcatacccaatacggcgaaatcagcaaagaagaactcgacccgcaaggcattcccgtcaaagtggccggccgcatgatgctcaaacgtcaaatgggcaaagccagcttcgccaccattcaagacgtaaccggtcaaatccaactttatctgaacaacaaaggcgtgagccaagaagtcttggacgacttcaaccactgggacttgggcgacatcgtcggcgcggaaggtactttgttcaaaaccaaccacggtgaattgaccgtgcgcgtgtccaacatccgcctgctgtccaaatccctgcgtcctctaccggacaaacataaaggtttgagcgatcaggaaaccaaataccgtcaacgctacgtcgatttgattgctaatgaagagtcgcgcaataccttcatcaaacgcagccaaatcatccaatccgtgcgcaattttatggtgaacgagcattatctcgaagtcgaaaccccgatgatgcacccgattccgggcggtgcgacggcaaaaccgttcgttacccaccacaatgccttggacattccgctctatctgcgcatcgctcccgagctgtatctgaaacgcttggttgtcggcggcttggaacgcgtgtttgaaatcaaccgcagcttccgtaacgagggcatgtccgtacgccacaaccctgaattcaccatgatcgaattctacgaagccttctccgactacgaacgcatgatgcaaatggcggaagacatcatccgcaacgcttcccgcgcggtaaacggcacggcaaaaatcagctacaacggcaaagaagtcgatttggaaagcccgtttgaacgcctgaccattctcgaagccatcaagaaatacaatccgcactacaccgacgagcagttgaacgatgaagaatggctgaaaaaagaaatcgtcaaacacggcgaaagcctgcctccgtctccgggcatcggcagcctgcaacttgccctgtttgaaggttgtgcagaaagcaaactgtggaacccgactttcatcatcgactaccctgtcgaagtatcgccattggcacgcgcatccgacagcaaaccgggtttgaccgaacgcttcgagcttttcgttgtcggccgcgaactggcaaacggctactccgagttgaacgatccggaagatcaagccgaacgcttcaaggcacaagtggcgcaaaaagacgctggcgacgacgaagccatgcactacgatgccgactacatccgtgccatggaattcggcctgccgccgaccggcggctgcggcatcggcatcgaccgcttggtaatgttgctgaccgattcgcaaaccatccgcgacgtgattctgttcccgcaaatgcgtcccgaataacacattgaaataaaatcaaggccgtctgaaaacaagattctgttttcagacggcctttttgttcaaatatgtaaaacggaaaaattaaaatcgacaattcctttacattataataataaaattccatgataatcaaaagcataatataaaaaagaatatgtaaacgtttttcagtttgttgacagtctgctagaatacatccaattacaggacagcccacacacacaggctgtctgaaaatgcaaaaactctgaaaggtttgtatggatcaatttttcgaacagcttcacggctgggtaaacgccatcaacgacccaatgtggtcggggttggtatatatgcttttaggcgcaggcctctttttcaccgttaccaccggttttgtacaattccgcctcttcggccgcagtatcaaagaaatgctgggcggccgcaaacaaggtgatgatccgcacggaatcacaccgttccaagcattcgttaccggcttggccagccgcgtaggcgtgggcaacatcgccggcgtggcgattgccatcaaactcggcgggccgggcgcggtattctggatgtgggtaaccgccttaatcggcatgagttcggcgtttgtcgaatcttcactggcccaactctttaaagtccgggactacgacaaccaccacttccgcggcggtcctgcctactacataactcaaggcctgggacaaaaatggctgggcgttttgttcgccctgagcctgattttctgtttcggctttgtatttgaagccgtacagaccaataccatcgccgataccaccaaagcggcatggggctgggatcaacactatgtcggtgtcgccctggtcattctgactgcccctattatcttcggcggtatccgtcgcgtatctaaagccgcggaaattatcgttccgctgatggcggttttatatctcgtcatagcactcttcatcattgctaccaatatttccctgattcctgatgtgttcgatcagattttctccaacgcgttcaacttcgattcggctgcaggcggtttcctcggcggtctgatttcgaccaccatgatgcagggtatcaaacgcggcctgtattccaatgaggcgggtatgggttctgcgccgaacgccgcagccgcagccgaagtgaaacaccccgtctcccaaggcatgattcaaatgctgggcgttttcgtcgataccatcatcgtctgctcatgcactgcctttatcgtcttgacctatcaacagccttacggcgacctgagtggtgcggcgctgacccaagcggcaatcgtcagccaggtaggcgaatggggcgcgggcttccttgccgccatcctgtttatgtttgccttttcaaccgttatcggcaactatgcctatgctgagtccaacgtccaattcatcaagagccattggctggttaccgccgttttccgtatgctggttttggcatgggtctacttcggcgcagttgccaacgtacccttggtatgggatatggcagacatggccatgggcatcatggcatggattaacctcgttgccatcctgctcctgtcaccacttgccttcctgctgttgaaagactacacagccaagctgaaaatgggtaaagacccagagttcaaactctctgaacacccaggcttgaaacgcaaaatcaaatccgatatctggtaataccaaaggccgtctgaaatttcagacggcctttttaatccctgccatctagataaaacgatgccccttaaagcagaagccttaaggggcagagcgttgcggcacatcttttcagacggccttattgtagcaacgtttctcatttcgcagtgcaacaatatggacggattctaattccaaatcggcacccagtcaagcatttcatttgcatagtaatacttacctaggatatatttatacttaccaaacatcacattacggagaaactgatggctgcattcaaacccaatccaatcaactacatcctcggtctcgatatcggcattgcatccgtcggctgggcgatggtagaaattaacgaagaagaaaaccccatccgcctgattgatttgggcgtgcgcgtatttgagcgtgcagaagtaccgaaaacaggcgactctctcgcagcggcaagacgcttggcacgcagtgttcgccgcctgacccgccgtcgcgcccaccgtctgcttcgggcccgccgtctattgaaacgcgaaggcgtattacaagccgccgattttgatgaaaacggcttgattaaatccttaccgaatacaccatggcaacttcgcgcagccgcattagatcgcaaactgacgcctttggagtggtcggcagtcttgttgcatttaatcaaacatcgcggctatttgtcgcaaagaaaaaacgagggcgaaactgccgataaggagcttggcgctttgcttaaaggcgtagccgacaatgcccatgccttacaaacaggcaatttccgcacaccagccgaattagctttaaataaatttgagaaagaaagcggccatatccgcaaccaacgcggcgattattcgcatacgttcaaccgcaaagatttacaagcagagctgaatttactgtttgaaaaacaaaaagaattcggcaatccgcatgtttcagacggccttaaagaaggtattgaaaccctgctgatggcgcaacgccctgccctgtctggcgatgctgttcaaaaaatgttggggtattgcacctttgagccgacagagccgaaagccgctaaaaacacctacaccgccggacgtttcatctggctgaccaagctgaacaacctgcgtattttagagcaaggcagcgagcggccattgaccactaccgaacgcgccacgcttatggacgagccatacagaaaatccaaactgacttacgcacaagcccgtaagctgctgggtttagaagataccgcctttttcaaaggcttgcgctatggtaaagacaatgccgaagcctcaacattgatggaaatgaaggcctaccatgccatcagccgtgcgctggaaaaagaaggattgaaagacaaaaaatccccattaaacctttctcccgaattacaagacgaaatcggcacggcattctccctgttcaaaaccgatgaagacattacaggccgtctgaaagaccgtgttcagcccgaaattttagaagcgctgttaaaacacatcagcttcgacaagttcgtccaaatttccttgaaagcattgcgccgaattgtgcctctaatggagcaaggcaaacgttacgatgaagcctgcgccgaaatctacggagaccattacggcaagaaaaatgcggaagaaaagatttatctgccgccgattcccgccgacgaaatccgcaaccccgtcgtcttgcgcgccttatctcaagccagaaaagtcataaatgccgttgtacgccggtacggctcccctgcacgtatccatattgaaacggcaagggaagtaggcaaatcgtttaaagaccgcaaagaaatcgaaaaacgccaagaagaaaaccgtaaagaccgggaaaaagccgccgctaagttccgagagtatttccccaattttgtcggcgaacccaaatccaaagatattctgaaactgcgcctgtacgagcaacaacacggcaaatgcctgtattcgggcaaagaaatcaacctaggccgtctgaacgaaaaaggctatatcgaaatcgaccatgccctgccgttctcgcgcacatgggacgacagtttcaacaataaagtgctggtattgggcagcgaaaaccaaaacaaaggtaatcaaaccccttacgaatacttcaacggcaaagacaacagccgcgaatggcaggaatttaaagcgcgtgttgaaaccagccgttttcctcgcagtaaaaaacaacggattctgctgcaaaaattcgacgaagacggcatatatcgaatcggtgtcaaaaccgccctttcattcccaaaataccaaatcgacgaactcggcaaagaaatcagaccatgccgtctgaaaaaacgcccacctgtccgttaaattaatctatccctgtttcagacggcctgaagcagggattttttataaaaaataaggggaaaaacatgacttggcgcagcctgctcattcaaaacggcggtaaattatccttacaacgccggcaactgctgattcaacaaaacggcgagtcccataccgtaccattagaagacatcgccgttatcatcatcgaaaaccgcgaaaccctaattaccgccccgctcttatcagccttagccgatcatagtgcaaccctgctgacatgtgatgagcaattcctaccctacggacaatggctgccttatgcccaatatcaccgccaacttaaaatcctcaagctgcaactgaatataagcgaacccttaaaaaagcaactctggcaacatatcgtccgccaaaaaatcctaaatcaagcatttgtcgcagacgaaacaggcaatgatcttgcaaccaaacggctgcgcactttggcagtcgaagtccgttcaggcgatacaggaaaccgtgaagcccaagctgccgccctctacttccaagccctctttggggaaaagtttacccgtacgtcaatgccgcattgaactacacctacgccgtactccgtgcagcagtagcacgcgccctgaccttatatggttggttgcctgcattaggcttgtttcataggagcgaactaaatccattcaacctcgccgatgactttctcgaacccttacgcccattggccgacctggtcgttatacatttgcataaacaaggccgtctgaaaactgaactgacacccaacctcaaacaaaaccttatcaagatccttcactatcaaatctgcatcgaacggcaacatttcagcaccttggctgccatcgacaaaatgatttcttcatttcaagccagcgtaactaacaaaaacgctaaacagctgaaactgcccgaaatcttgccattgaaagaataccaatatgagtgaggctaaatttatgaggattatcgtcttcttcgacctacctgttaccacggcggccaagcgcaaagccgccaatcaattccgccagttcctttaaaagatggataccaaatgctccaactttccgtatacagccgtattgtcaaaggtcgagattcgttgcaaaaacaccacaataggctatgtgcaaacctaccgcaagaaggctcaatccgctgtttggaagtaacagaaaagcaatataccaccatgaaactgctgttgggagagctgaaaatccaagaaaaaagggtaaattccgaccaactattattattttaaggctgcttttttagacaaaataaaacgggaaacccttatagaataagggtttcccgttgaagtattgtagcactgcgaaatgagaaagggtctatccaaataaaaaagcaccacctaaacaggtagtgctttcatattaatttgcttattcagcagaatcagctgctttatcaaccaattcaaccaatgccaaaggagcattgtcgcctttacggaaaccgtatttcagtacacgaatatagccgccgttacgagcagcaaagcgtggacccaattcgtcaaacaatttaactacaacatcacgatcgcgagtgcggtcaaaagccaaacgacggtttgccaaagaaggttttttacccaaggtaatcaagggctcaactacgcggcgcaattcttttgctttaggcaaagttgtcacgatggtttcgtgagtcaacaaggaattcgccatattgcgcagcatcgcagcacggtggctgctagtacggtttaatttgcggttgccattacgatgacgcatgtcattatcctttaatcttcaaacttacggcttttctaagcctacaggcggccaagcttctaatttggaacctaatgtcagacctttagaggccaacacttctttgatctcattcaaagatttacgacccaaattaggggtcttgagaagctcggtttcagtacgttgaatcaaatcgccaatatagtaaatatcttcagctttcagacaattagctgaacgtacggttaattccaaatcatctacaggacgcagcaagataggatcgataggaggtgctttttcttcaacctcttcaaccggagtaccttgcagatctgcaaaaatagacatttggtcaattaagatacgtgcggcactacgtacagcttcttctggatcaatagaaccattggtttcaatatccaaaaccaatttatccaaatccgtgcgttgctctacgcgtgcaggttcaacttcaaagctaacacgactgatgggcgaaaagctcgcatccaactgaatcgcaccaatctgtttgttctcatcacgcaatacgcgacggcctgaaacagactgataaccacgaccttgctctactttaatttccatgtcgatttggccattgtcagccaagtggcaaataacatgttcaggattgatgatttccacatcgtgtggcaaatcaatatcaccggctacaactgcaccggcacctgttttcttcaaagtcaactgaacttggttacgaccgtgaagcttgaatacgatacctttaatgttcaagagaacgtcaacaacatcctcctgaacaccatcaatagtagagtattcgtgcaatacgccagaaataactacttcagttggggcaaagccattcatggatgacagtaagatacgacgcaaagcattacctaaagtatgaccaaaaccacgctcaaatggctgcatagacaccttagctcgagtagaagacaaggtatctacatcgatttgacgaggtttcaaaaattcggttgtgctattttgcatttaactgtccctcattgagctagcattatttagagtagaactctaccaccagctgttcattaatatcgccagacaattctgagcgatccggcatatttttgaatacaccttccaatttgtcggcatcaacagatacccagcttggcaagccaatttgagtagccaagctcaatgcctcttggatacgtacttgtttcttagctttttcacgaacagctacaacatcgcctgctttaacttggaaagaagggatattaacaacctgaccgtttacaacgatagctttatgagaaaccaattgacgtgcttcagcgcgggtagagccaaaacccatacgataaacgacattatccaaacgggactccagcaattgcaacagcaattcaccggtagaacctttacgacgatcagcttccgcaaagtaacgacggaattggcgttctaacacaccataaatacgacggattttttgtttttcacgcaattgcaaaccgtagtctgacaaacgtggttttttcgcaccgtgctgaccaggtgcagaatccattttacattttgaatccaaagagcgacgtgcactcttcaaaaacagatccgtaccttcgcgacgtgctaatttacatttagggccaatataacgtgccatgttttaaatcactccaatattaaatacgacgttttttaggcggacggcaaccgttatgaggcaacggggtaacgtcagtaatgctggtaatcttgaaaccaagagcgtttaaagcacgtacagaagattcgcgaccagggccagggcctttaatgcggacttctaaatttttaacgccatactcttgggcaactttaccagctgcttctgctgcaacttgtgctgcaaatggtgtacttttacgagaacctttaaaaccagcgccgccagaggtagcccaagacaatgcattgccttgacggtcagtgattgtaatgatggtattgttgaaagatgcatgaacgtgcacaataccttcgcttacggttttacgtacttttttacgtacacgcgaagctgtgtttgctttagccattaatcaaattccttaaaatttatttcttaccggcaatcgctttgcgcggacctttacgggtacgagcatttgtgcgagtgcgttgaccacgacaaggcaagccacgacgatgacggaagccgcgatagcaacccatatccatcagtcgtttaatgctcatcgttacttcacgacgcaaatcgccttcaacttcatatttagcaacttgctcacgcaaagcgtctaattgagcctcgtccaaatcttttgctttagtagtaggagcaatatttgctgcctcacaaatcaatttagcacgagtcgcaccaataccataaatagcctgaaggccaattacgatatgggcattattagggatatttacccctgcaatacgagccatattttttcctttttagggcaaagtatgtcactataccacaaaatcaatagttaagaaaactagcttcttaaccttgacgttgtttgtgacgtgggtcagtacaaattacgcgaactacacgattacgacgaataatcttgcaattgcgacaaattttctttacagaaggttgtacacgcattttatttccttttatcgtttatcttgctcggaaaacaatccgagcacgggttaaatcataaggagttaattcaactgttaccttatcacctggagaaatacggatatagtgcattcgcatttttccagagatatgaccaagtactacatgatcattttccagttttactttaaacgttgcattgggcaaagtctcaaggatttcaccctgcatctgtatggtatcttctttagccataagcctacttacgtgataaagatttcatatctggacgactcatcaaatcttcatactgactgctcattacgtaggaattgatttgcgtcctaaaatccattgtaacgacaaccaagataagcaaagatgttccgcctaaatagaaaggtacattcaatgctgtcgttaaaaattcaggtatcagacagattgtagtgatatacaaagcaccaaataatgttagtctcagtacaactttttccaaatatctagaagtttgctcacctgggcgaataccaggtacaaatgcaccacttttcttcaaattctcagccatttctttagggctaaatactaaagcagtatagaaatagcagaagaagataatagttgttgcaaacaatccaatatacaaaggctgtccgtgttgcagcattgcagcaaccttatgaagaacagaattcgtactatttgaaccaaaccaacctaaaagtgtagatggaaataaaataatactggaagcaaaaataggaggaataacacctgccatatttagcttgaacggcatatgaatgctttgtcccggcattattccagagccaaactgtcttttagcataatgcacaggaactttacgctgagcactctcaaaataaactacagcatagatcaacagcaaaataccaatcacaattgataccgccatcaacatactcatagagccttgttcagtcaaagttaataaccgaacaataccggatgggatacccgatacaatgcctgctgtaataattaaagaaataccattaccaataccacgctcggtaatttgctcccctaaccacatcagaaacatagtacctgtaaccaaacagaccactgtagaaatatgaaactcaagcgaactcgttacaacaacaccttgttgataaacaaatgttgcaacaccaaagctttgcaatacagccaataataccgtcccatacctagtatatttcgtaattattttcctaccagcctcaccttccttctttaaagcttttaaagaaggaacaatttcagaagcaagctgaacaataatcgacgatgaaatataaggcatgataccaattgcaaatatactaaagcgctccaacgaaccacccgagaacatatttaacattccgaatatgccgtttgcagcgccttcgtataacttagctaatgcaacagcatctacgcccggtaccggtatatgagcaccaatacggaaaacgactaaagcacctaaaaggaacaccagacgttttttcagatcaccaaatttggataatcctgataaagattgttgattagccactgtagtgcaagccttattcttctactttaccaccggcagcttcaatagcagctttagcacctttagtagcttttacacctttcaaggtaactgcttttgagatttcaccagaagcaataacttttacattagaagcagttgcaggaatcagaccagcttgtttaagaaccaagacatcaatctcgttcacagcaatcagattcaattcactcaaacgaacttcagcattagcggccgcagtcaaagatttgaaaccacgtttcggcagacgacgttgcaaaggcatttgaccgccttcaaaacctaccttgtggaagccaccagaacggcttttttgacctttatgaccacgaccacctgtcttacccaagccgctaccaataccacggcctacacgacgactagcgtgagtagcaccctcagcaggttgaatagtattcaaaaacatattaagactccactttcaacaagtagctgattttattgatcatgccacggttttcaggggtatccaaaacctctacagtatgttcacgacggcgcaaacctaaaccgcgagcacatgcacgatgagattcaattgtaccgatcaggctcttaaccaatgtaactttaatctttttttgctcagtcatggttagctcccaaaatatcttctactgtcaagccacgtttagcagcaatatcagcaggggtatacaatttagacaaaccgtctaatgtagcgcgtacaatattgtaaggattagtagaaccatgtactttagctgaaatgttatgaatacccatagcatcaaatactaaacgcattggaccaccagctttcacaccgctaccttctttagcaggttgcataaataccttagtagcaccatgacgaccaataacttcatgatgaatagtaccgtttttcaaaggtactttaatcatagagcgtcgagcttgatccattgctttttgaacagcaactggtacttcttttgatttacctttgcccataccgatgcgaccatcaccatcaccaacaacagtcagtgcagagaaagccatgatacggccacctttaactactttagtcacgcgattaactgcgaccatcttttcaatcaggccgtcaccgcgttcttcaatttcatgttttgccatctgaaagtctccaaatattagaagcttaaaccattttcacgtgcagcttcagccaaagctttcacacgaccgtgatattggaaacctgaacggtcaaaagcaactttttcaacacccactgctttagctttttcagcaatacgcttaccaactacagctgctgcttcaacgttactacctgatttcaggctactacgtacttcagcttccaatgtagaggcttgagccaatactttatcaccttcagcactaattacttgagcataaatatgattattgctgcggaacacacataatcttaccattttcaagtccgcaatacgcgcacgggttttgcgtgcacgacggagtcgggttgtatgtttatccattagtgaacctcaattattttttcttggcttctttcatcactactacttcacccacataacgaacacctttacctttataaggctcaggagaacggaatgcacgaatttcagcagcgacttggccaaccacttgtttatctgcaccagtcaaaacgatttctgtttggctaggagtttgaacagaaacaccttcaggcatttcgtatacgattggatgagagaaacccaaagacaagttcaaaactttgccctgagcttgggcacgataacccacaccaatcaattgaagttttttctcaaaaccttcagaaacacccttaaccatgttattaaccaatgcacgagcagtaccagacatagcattagcctgtttactgtcattttttgcagcaaaagtcaatttaccatcgttcagttcaatagcaacatcggaatgcaaaggaaaagacaattcgccgtttttacctttgataaccaatgcatctgttccgaattttacttctacaccagcaggaacagtcactgggttttttgcgacgcgtgacatttacttttctccactaggctacgatgcacaacaactcaccaccaacaccctcagaacgggctttgcgatcagtcattacacctttagaagtactaacaatagcgacacccaggccattcattacgctagggatctcacttgatgctttgtaaatacgcaaacctggacgtgaaacacgtttaatttgctcaatcacaggacgacctgcatagtatttcaattgaatttccaataccggttttgcatcagcagaaaccgcaaaatcctcgatataaccttcttctttcagaacttttgcaattgcacatttcagtttagaagaaggcatggcaactgctgctttattagcacgttgcgcattgcgaatacgagtcaacatatcggaaataggatcatgcatactcattatttatactcctattaccagctagctttaacaacaccagggatctcgccacgcatagcgatttcacggattttaatacggcccaaaccaaatttacggaaagtgccacgaggacgacctgttaaagcacaacgacgacgttgacgtacaggtgctgcattacgaggaatggattgaaatttcaaacgtgcctcaaaacgttcttcttcagtcgcattagcatcattaataacagcgaaaattgcctcacgtttagctgcaaactttttcgccaatgcttgacgtttcagctcacgattaataagtgctttcttagccatgattatcctttaaacggaaacttgaacagtgacaacaaagctttcgcttcttcatcagtttttgcagtagttgtaatagtaatattcaaaccacgcaaagcatcgattttatcgtattcaatttccgggaaaataatttgctcacgaacgcccatattgtaattgccacgaccatcaaatgatttaccgcttacaccgcggaagtcacgtacgcgaggcaatgcaatagtaatcaaacgatctaagaattcaaacatttgatcacgacgcaatgttactttgcaaccaactggatagttatcacggattttaaaacctgcgatagatttacgagcaacagtaacaactggtttttgaccagcaattttctctaaatcagaaacagcatgctccattacttttttatcagcaacagcttcacctacacccatatttaaggtgattttttcaatacgtggaacttccattactgatttgtaaccaaattgtttaaccaattcaggaacaactgtatctttataaaactctctcaaacgagccatgttatctccttatgctccaatgatagagccatttgatttgaagaaacgaacgcgtttaactttgccttcattttcaatcagcttaataccaacacggtctgctttattagtttccggattcaggattgcaatattagaaatatctaaaggcatttctttagcaataatgccaccctcaataccacgcattggattaggtttttgatggcgttttacaacattaacaccctcaacaacaactttatcacccaatactcgaactacttgaccttgcttacctttatctttaccggtaatcactacaacctgatcgcctttaatgattttattcatcgcgctattccttataatacttcaggcgccaatgaaacgattttcataaatcgctcagtacgcaattcacgggttaccggaccaaaaatacgggtacccagaggttcaagtttattattcaacaacacagcagcattgttatcgaatttaattaacgcaccatcaggacgacgcacacctttagcagtacgaacaactaccgcattgtatacatcaccttttttgacacgaccacgcggggctgcatctttaactgcaactttaataatgtcgccaacagaagcgtagcgacgcttagatccgcctaatactttgatgcacattacgcgacgcgcaccag

SEQ ID NO: 2575 - DNA, 21926 bp, synthetic construct
  source 1..21926: mol_type = other DNA
  misc_feature 1..21926: note = Synthetic
gttgattgtttgcacctgacactaattcgtcacaacgttttttaactaataactttaaactctctctattaccagattgaatagccatagacattaatttttctatctctggtagctttaagtgagggtattttattaaccattctagagcgtactttttctgaaattgtttgaataagtccttttctaaccaacaaacaggagagttcttgtaattggcattggaaagttggggttcaatataatcatttatgaatttttctattgcttcgatattattaaataaactcttttctgtctcattttttaattgccttctaatattgtgttccatcccaatcaaataaacagagaaattagtgtataatgcttctagaatatccttcggtaaagattttaatgttccttctcttgtgaaaatttctatacaagaagcataaagaataatttcaatatttaacactgaagagtcagaatgcagtttagccaaatcagttaaatttggtatgttcgactgaatgtagttaatacagttatataatgcatttctaactaattgttcatcaccaaatttctctgctattttttctggctcttgtagaaaagtataagaaaagcttaataaactatcccaatgactaccattttctattaattctctattttgttgaatgtatttaatatttcttgcaagagatttacgctgttttctattgatatttctaatactctttttacagttatatttaagtgtatttctttgatagaattccttactttcttgatttattctataccaagccattaagaaagctggtttttgtaaagcctgatttcgcatataccttctcagtaaattgggctttttctctttgttgtaaaaatcatgacgagctatgaaatatttccatagttcaatattgttagtttcgaagctgagatctataataaatcttaggtcttgatattggaaatttaatcctgaatgagaatgccattcaaagtgatagaatttcatattatggatttcttctctaacccatagattttcaaatgctaacttaatgattccctgccttaattcgtcattctctgataaagtttttacagataaactttgttcttttgatattccattctgaaagtataaatttttaatccattcccaaatcttagacatattgaattttgaagataattcaaaataacgatctaataacataccaatgattttgctaatacctactcggcactcacaatcatattttttttgacaagtacaagctagattattagatagtgaatctagcaattttattgttaaatctagttctagttcttgaataaataatctaataaaataacgttttccaaaaactcgttctatttcataattggttgggtatagttcagagcatatgttaagaaaagtaatgtaatcgtttatatcaaaataacttctgtcagataaattcattatttcactagcaatagatagtgaaacactatttttttcagagattagttgtgcccaaacatctttaattggataatctttcactttaagcagacattctcctgctagtctacgaatagataattctttatattttggattagtatcacaaatgattgttcttaactcatcaactactttagaaactactgacgattcaagtaatagttttaataatacccgttgtaaattcccgcttctatatttttccgatagtaattcttttaattcatcaatcatatcatcagaaaaaaaatcagaaatactaaagtttctccatatatcatgacgagtaaaatatggatccttttgatttacgtcttttaatcttgatagtagtattctttttgatcttggaagaagtaaggatggatctccattcgctaaaatagcataaggatctaaatttattagcttttcctgaatttgttgattctctgataatacagctatccacgaaaataaaccgcgcaattcatctctaacaatattattaggtgcaatgatagataatattttatttagagataatggagttgatgatgtaagtttgtttgcaaggtaacggcctgcacaatattccacaacaattttatgaattggacgatgctgtccttgattttcaccaggggtaaagaactgtgtcgatagtatttgaaatatattagtatcagaattgaggtttttatattaggaaaaagatgcttagaagaaaaatcactagtgctaatgccctctgaacctgataatattaatttgcaaaaaacgtcctcaactaattcaacttttttatttcccggtaatgaagatgaatgggaaggattgctttctctcgctagcccttcaattgcaattttaaatgcggaatatctattttcaaatattttattgttttcaatataggatttggaaaatagtcttaaaaataaaggattagataataaaggtgctaattctattttaccagcctcttgcaagaaaatttcagcgttttcttctggataatatgaattgaaaatttctttctgttcttgttgattaaatggctttaaatataataataaaggggcttcacgaaaaagctccttacaggtttgtgaatagctttcagaccactcactagaacggctagagagtataattttttcagcagatgttttttctgccataaccaatgacttagttacagaagaagagtctattcttactaattcatcaaatgcgtcaattataagtaactttgttttttctactggtaaatggataaagatattagctgtcttcttttgaactcccaactgttgtgaaatattatttaataagtaacttttccctgcacctggctcagccaagataataataacttttgggattaatgatattaattcagactctttaatttcttgattatcagaattatataatgttctatcaatataaaaactcataatgcatctctcataaagaaatcagttgtataaatatgctccaccccacccaaattctctttccataattcatccattgtaatcacatatttcgggtaattatccgcaatttcctgtaacggagaaaattctctttttacagtctcttcactttctaatttataggcaacttgaatatagattttttcattctgtttttgggcgataaaatcgatttcttgtttatctaatttaccaatataaacctgatagcctcggcgttttagctctaaatagaccaaattttctaaaatgcctgaaattaaactggtacggaatcccattgtggcatacagcagagaaacatcacccaagtagaatttttcttgggtttttaaaatctctttgcccttaatatcaaaacgttcgacacggtgcaaaataaaagcggactctaaggcttttaaatagttataaaccgtatttaaatcgattttgcgttgctgacttttaaaataatcggcaacatttttacccgaaaacgtattgccaatattatcaaaggcatattttacaatgcgctccagtaactcgacatcacgaattttatggcgttgaacagtatcccgtaaaataacggaagcgtatatatcctgcacaattttatagaccgtctcagcttcataattcgcggtatgtaccattgggaaaccgccttttcgtaaatattcatgaaaaagtgcggttggatttgatgaagtttcgggtgaatatgccgttttgaaatccaaaaattcctgaaaagagagggtaaaaatcgggatttccacataacgaccggcaagataagtggaaagctcggaagagagtaagtgcgagttggagccggtgatatagaggtcaagattaaaatccaccataaacgcattcactgctttttcccactcgctcacttcttgaatttcatcaagcagaagatagtatttatcggtagtcaggattttttctttcaccaacatataaagcttgtcggcggttttaaagtcgctaaatgcaaaactttcaaaattaatatgaataatctgctgttcggcaatgccttgagaaatcagctcttcccgaagcagtttcatcacggtcgatttacccgaacggcgaatgccggtcattactttaattaacggtgtattaataaacggtttgagttgttgaagatagtttggtcggttaatcatttttttatgggtataagcctaaaaacattattattttaacaagtttttatggttataaccataaataatgttgagttatgttgtgtttttatggctataacctaaaatagtgtaaagtttttggctagattaaccgcttgtaaacttttatcgtattaggaaaaaatcacttctcttgttaagtcgtgaggctgatgatttgccccacacccaccgtcaccaacaccgccaatcccaaaatcgacacaatccccaaaccaccatcgacagcagtccaatcaaaatgatacggattttgcaaggcattggttttggcgatggtttggacttggatcaccagcacccagcggagtagccagccgaaagcgatgagggcaagcacgccgagccattgcaagcggtggtttttggcggaaaaattgcaaacgagggcaattagccagaaaatgccgacaagataggcggtgattgagccgttgaagagcagagcaaaatcacgttgagcggtttcactgctgaaagcaagaccaatgatagaaagtgcggttagaatgaggcagattttgccccctgcccccgagggttgctcaggtacttcccccgcaagcgggagcagaaattggcttatcacttgggttaatcccaatgccaccgcccacgcagaaaagagcataatcggtaatagccacgcactgtgccataagattcttgtgccggtttggtaggtttcaagcacggtgtagccgataataccaacagcggtgagtgcagcaaacaagcggaatgcccaaagtaagtcttgatttttcagtataggaaactgtaaccaagctaaccatttcggcaggttcggctgggtgtgatgagccaatgccagcacaaaataccctgctaccgccacgctgaatagaggcaggatcatcgctccccacgccattggcgaccaccacgcaaaatcggtatagaaatgcagaatacggctcggctggtgcaggtcggcagtcagtgctacaggggcgacaatggagccaatcaaggctaccgtcaccgccgccagctcgcaagcggtcggttttactcgtgaacattgttcactcgcccctttggggccgttggcggagccaacgttcaaaacgcaagcgttttgtctctgcttttttgcaaacagcacggcagtaaacactgctgttgccgctacgcctacgaagaagaaataatgcacaatccacggcaaccagacgatatgttgcggttccactaatacttcacgaatcattttacgcctcccccgtccagagcattggttgcccgtcaattttgctcacaaaggcttcaatcagccccacatagaaaacgtgtggcacggtgccggcctccggttttagcactttcaggtcatctttatgggtttgataaagctgggaaatttggcttttcggatcgttcaaatcgccaattacccttgctccgcccacgcaactttccacgcacgccggcagcagacctgcctccaaacggtgagtgcagaaggtgcatttatcggcggttttagtttcttcattgataaaacgggcatcgtacgggcaggcttgcacgcagtaaccacagccgatgcattgctcgttgttaatcaccaccacaccgtctttgcgttggaaggttgcctgcaccgggcagaccggcacacacggcggttggtcacaatggttacacaaacgaggtagcaccacattgttcgccacctgcgtaccgttggtgatttcatattgacgcacggtggtgcggaagctgtgcaacggcgtggcgttctccaccaaacaactcacggtacacgcttgacagccgatacatttgcgtaaatcaatcagcattgcatagcgtttgttctcatcgccctcacgccgagcaggcataaatgcctgagccgattgcaacggcacaaaacttgcccccaccgtcaaggcggaaagctctttcaaaaaggaacgtttgcttaaatccatatttcccccacaaatttaaaaataacaagggtattctaaggcggagaaggaatggcaaggtattgtggttttccacatatcagggggaagtttgatttgggtcaagggctatgggaaaaagataaatctgatctcgtctatcactggatcagatttatttcatattctatagttagaattttcttaatgatttattatcaatgtcaaagtccttaatctctaatttatctaaaattacaggtaatacttgatgaagtaatctcattccaacgagtaattcattcatatagatatcagggtgtaatctattatcattaaatcctaaatattcggcttcagcctcaactcctaaattatcgtgctcatcatcaattaaatgcattaattcagcccttaatggaatattagatttaaatgcatacaatttaagttgttggagccattctctataatccttttcagtttctctttttaatttctgaaatccggtcagctcaggtaatattgtatcagccttaataattgctaggtttaataggtttgcttctatatcgacaatcaaattggaaaattcgggattttccattgatagttgggtatcaagctctgagatatatgcctcataaaaactatacacatccgcaaaggagcagaatatgctatatatcaatgagcaaaattcgttactataaatagtttcaataaatgagtcactccaatcaatataatgatcatagtcattttctaactcaggagggaaagatagaggaaatttataccctatcattctgagtgagtcgactaaattagatagtatgagatcggtttcatcaatcaatggtgctacattaaaccctgtctcgccattatcattagctgattcagctaattgggtaatgattttctgccatttttgtgcatagcttatatgaccaaaagctaaaatgacatttggatctaaatctccaatatctagtaatttccttaccttattttccatatcaaatgacatatattcccctttcttccattttgttatttggctaggagagacggatagcttgtttgcaagctctttttgtgagcaagataagatttgcattgctaattcaatcattgataaactcatagaaacctctttttcgtaaaaattatgaatttactaaattgtatatttattttactaaaacaacaagagcgaatttggttttttactaacaactgttttgtctgtgatcattagggtttaaaaatacagaaaatgaaacgcctatttctcttcttcctattcctttcccacaccgttttagccgaaacttggcacatcggcattctcgcccagcgtggggagacctatactcgcacgcattggcagccgtgggtggattggctgaatgagcagtttccaaatgagcggtttgagcttgtgccgttggggttgggtgaggcgaatgagcgggcggagttggattttttgctgaccaaccaagcccagtttttctatttaagtcggcagaatgtccgttggctggcgacgctcggcagtccgtttactgaaaacggcgagcaaggggcggtgggcagtagcatttgggtgcgtgctgacagccattatcggcagttaagcgatctgaaaaatcagactatcagtgcagtggataacgatgcctttggcggttttttgcttgggttgtatcagtttcatcaggcgggaatgcaacaaaaccgggatttttcggtgcagtttagcggttttccggtggaaaatgcgttggctttgctggcggaaaaacaggtggaagcggcgattgtgccggtctgtttgctggaagagttggagaaagagggcaagttcaagcggtcggatttccgcttaattttgcaaaacccacaggcgcagggttgccttgccagcacgccgttattgccgaactggtcgctggcggcgatggaaaatgtgccgaacgagctggcggttcagtttgccacacgcttgctaaacagccacaatcccgacctgccccgctggacgttgccgttttcttctgctcaagccgatcacattctgcgtgaactgtatcgccacccgcaacaaaaaagcctgtgggcaacggtgctggattgggttcggcttaataaattcggcttgctggcggtggcgttattcattttgctcaaccttgtcgccctgcgttatcaggtctatcgcaaaagcaaggcgttacagcaggcacaccgcaaaatgcagcagtatcagcaggagctgacccgagctgaccgccttgccctgctgggcgagatgaccaccggttttgcccacgaactgaaacagccgttgtcggcggtgcgaatgtacgccgaggggctgaaaagccaaaacagcaatccttatcaacagcggattttggataagctgattgcgcaagtagatcgggcggtgaaaacgatgcagagcattcgggactgggtgcaaaaccgcccgagtggtgagccgcaagcggtcattttaaaccaattgattgccaatgtgatcgagtttgtggcggtggaaaatcgccagaatgcacaaatctcgctgattgccgaccgcacttttcggcttaatttacacgccaccgtgctggaacaagtgctgacgaattgcctgctcaacgccctgcaagccggtgcaagcgagattacggtgcggttacaagcggtcgaaaacgggctggaaattgcaatcgaagacaacggcggcggtttttcccctgcccaacttgaatttccgtttgtgccgtttcgcaccgacaaaccgcacggcttagggctaggcttggtgctatgccaacggctgatgcaatcgctcaacggacggattgtattgacgaatggggagaaaggggcgagggtaagcttgtttatcccagatgattaacttactgagtacgagccgtactcagttaaataaccctcgtcactttgtgacgattagatagagcgacaaagtcgctcggattcaataaccctgcactgctcgtgcagggagaatacggagaaaaaatgattatccacattcttgatgacgaagaaagcattttagacgccatgtctttcctgcttgccccactcgggattgaaatccaaacgtggcaatccagcgtagattttttggcacaggcggatttacaccaacaaggcgtgctgttactggatattcgaatgccgctgccagacgggcaacaggttcaccaacaactgcgagaggtgcaatcgacccttgcggtagtgattatgaccgcccacggtgatgtgccgatggcagtcgctgaattgaaaaaaggggcagtggattttctgcaaaagccggctagttttgaacagctaaaacaggcgattacacaagtgaaaacggtgagtgaacaagcggtgaaaattcgtgaaatttcgcaaaattacgccaaattgacggaaaaagagcgtaatcttgtgccactgattatgcagggctttaccaataaacagattgctgatcatctggctatttctgttcgtacggtggaagtacaccgagccaatgtgatggaaaaaatgcaggcggagagtttggcagagttggttcagaaattaggcttattgccaacaccataaaatgatgccccttaaagccgaaacttcaaggggcagagcattacggtaattctttcgaattccttattgtagcaacgtttctcatttcgcagtactacggtcaggaattctaacgaccctacgatttttgtcaaataaattttgattttgtggtaaaaatagcaacagattctaattcggagtgttgatatgaaaccacgtaacttaaattatattttggggctagatttaggcattgcttcagtcggttggtctgtagttgaaattgacgaaaatgaatacccgatccgcttaattgatgttggcgttcgcacctttgaacgagcggaagtgccgaaaaccggtgaatctcttgcccttgcccgccgtcttgcccgttctacccgccgtttaatccgccgccgtgcttttcgtttattaaaagccaaacggctgttaaaacatcatcagattgtcaatgccgaagaacttacccaattgcctaatcaatgttgggaattacgggtgaagggcttggatagccttttaagcaatacagagtgggcagcggttctgctccatttgctgaaacatcgtggctatctctctcaacgcaaaaacgaggcgcaaaatgccgataaagaattaggtaaattgagagagggaatggataataacagtaaattactcctagaaaataactatcgcacccctgccgacattgcggtgaaaaagtttgcggtggaagaggggcatatgcgtaatcagcgtggcgcttatactcacacctttaaccgccttgacattctggcggaaatgcaactactgtttaaaacccaacgagaactgggtagcacttatgcaaacggtgagttagaacaggcattttgcgaattgttgctgtggcaaaaacaagcattaaatcgtagtcaaatgctttcattagttggaaaatgtacttttgaaaaagaagaaaaacgagcagcaaaagcaagctactctgctgaacgctttgttgcaattcaaaaattgcaaaatttgagaattttagaaaatggtgaggaacgaggactttttgatagtgaatttagtcttcttttagaaaatgcttataatttaaaatcaggcttaacctataagcaggtgagaaaaatactttctttatctgaaaatgcgatttttaaaggccttccttatttatcagatgatctagaaaagcctgaaaaaacacaattcttagcttttaaattttaccaccaattagcagatatattaaaaaataatggtttttccgatgagtggcagaaactatcacaagaacctacattacttgataaactaggtactgaattatctttatgtaaagaggaaaatgaatttatagctcagtttaatggggaattaccagaagctatgctttctaccttatttaaccatactaattttgacaaatttatccatatttcactcaaagcattaaataatattcttcccctaatggaacaaggtaatgactatactaaggcttggcgtaaagtatatccagaaccaactaaaaaagacgaaaaaacactaccaccaatccctgccgatgaaatccgtaatccggtggtattgcgttctttgtctcaggcaagaaaagtgatcaatgccgtaattcgactttacggctcaccggctcgcattcatatcgaaaccgctcgtgagctaggaaaatcttacgatgatcgtcaaaaaatcaaaaaacagcaagataaaaatagtgatgagcgtgatcaagcagtaaaaaaatttctagaagaatgtccaaattttgccaataaagtaaaaggcaaagatatccttaaaatacgtttgtatataaatcaagacggaaaatgtttatatagtggaaaacctctcgatccgcatcgtttactagaaattggctatgtggaaatcgaccacgccctgccgttttcccgcacgtgggacgacagccaaaacaacaaagtgctggtgcttgccaacgaaaaccaaaacaaaggtaatcaaacgccgtttgagtggttgggcaaagatgaacatcaatgggcgttatttgtggctcgggtaaacggctgccgtttcccttatgcgaaaaacagcggattttgaccaaaaaattggatgaacaaggattcctaaaaaggaatttaaatgatacacggtatgtttctgcttatttaatgaagcacataaaggaaaatttacatttggttgggaagggaagcgataaagtatttgcatccaacggacaagttaccaatttcttgcgtagatgctggggattggaaaaaaaacgtgaggagggtgatcggcaccacgctttagatgcgatagtagttgcctgttccactgcgtcaatgcgacaaaaaattactctctttaagaaatatcaaagatggaacttgaaaacaggaaaacacattgatcaggaaaccggcgaaattattccgctccacttccctgccccgtgggatttcttccgccaagaggtgatgatccgcattttcagcgaaatgccacaagaagatctgattatgcaactgccggatcgcccacaagcgaaccacgaatttgtacaaccgctgtttgtttcccgtgcgccaagtcgcaaaatgagtgggcaggggcatgaagccaaattacgctcagccagaatgcttgaagcgacgggtaagagtattaaaaaagaatttttaactgatttaacgattaagaaccttgaacacatggtaaataaagaacgtgaaccagagctttaccaagcattagtagaacactttaaaaaatatggagataagccgaaagaaaattcttcaaaaaagggggcgtagaggttaaatcaattagaatttcaaaaacccaaaataaatctgtaaatctaggtaataaaactattgctgataatggtgatattgtgcgtacggatttattcttaaaaataaaaaatattattttgttaatatatatgcttggcaagtttccaaaggcattctacctaaagaaacaactacaggtaatatattggataactcatatgaattccaatttagcctatttaaaaatgatttactagagatccctcatcctaaaaatgaaaatgatagtatcttggcatattttattcgtccagatgacgaacgtagatggattttaaaatttcatgataacgctaaaattcccgatatatatggaaaaaaagacgagacctctattcgtttaagtattcaagggcaaaaatttatcaaaaaataccaagtcgatgaactcggtaaaaatattcgtccttgtcgtccaaccaaacgtcaaggcgtgcgttaaacccaatccctgcctgctctgcggtgcagggattttttctatcggaggctttatgagctggcgaagtattttaatcagtaacggcggaaaattgtcgctccgccaaaatcaaatggtaatctggcaggaagaacaagaattttgcgtaccgttggaagatattgcggtgattgtgattgaacaccgagaaaccgtgattaccacaccacttctctccgcccttgccctaaacggcattactcttttaacctgcgatgagcagtttattccttgtgggcaatggctgccatttgggcagtatcaccgccaactaaaaaccctcaaactgcaactggaaatgagccaaccgctgaaaaaacagctttggcaggtgattgtgcagcagaaaattcgtaatcaagcctttgtattagtacaaaccaagcggttagatatggcggaaaaattgcaacatctagcgaaacgggtgaaatcaggcgataaggaaaatttggaagcacaggctgcattgatctactttcaaaccgcattcggcagtgattttcgccgttggcaagaaaatgcgatcaacgcccaccttaactatgcctatacggtgttacgttcggcagttgcccgttcgctggtgctgtatggctggttgccgaccttagggctatttcaccatagcgaactcaatccctttaaccttgccgatgatatgatcgagccattccgcccgttggtggatttaatggtatggcaactttggcaagatgataaattggcagacagtctcacgccacacaacaaacaaaaattggtcggcttattgcattatcaaatgcggtttcaagatcaaacatttagcaccctagctgccattgatcgcaccattggttcgctacaaaacgccatcagccaaaaagatcccagcttattaaaactgcccgaaattttacctttgaaggaacatcaatatgagtgaggcaacctttatgcgtattatcgtcttttttgatctgcccgttacaaccaaggccaaacgcaaagctgccaaccaatttcgccaatttttacttaaagacggttatcaaatgttacagctttcagtttacacccgcattgtgcgaggaagagattcattagaaaagcacaataaacgactgacggcacatttgccggaggaaggctccgtgcgttgcttggaaatcaccgaaaaacagttcacatcaatgctgttgctcgtgggggaactgaaaccacaagaagaaaaagtcaatgcaaaccaattgctacttttttaataaaatcaaccataagaaaattttttttacgctacacaaaaacttttgttcaattggcgatattttgttcacacaaataaactaaatcggcaattttccacaaaaaacagagaaaaataagcggtctgttttcaaaaaactctgcaaaatcttgcaaaaaatttccaaaaacagaccgcttgtttggtattttttcacgttttttaatcgcttaaaaacgcaatacccccttataacataaggcgttcataccactctattgtagcactgcgaaatgagaaagggagctacaactctcccataattcctgtgtaatatttacttattgtagcactgcgaaatgagaaagggagctacaactgccctacataaccaatgatttttacttcgattgtagcactgcgaaatgagaaagggagctacaacaagcaaggcaaggttgtggtacagaaaataattgtagcactgcgaaatgagaaagggagctacaactcttttacgctttccaatgcgaatacactgattgtagcactgcgaaatgagaaagggagctacaaccgttgtggttcgtggaacatctcaaagaggattgtagcactgcgaaatgagaaagggagctacaactttaagcgttgatgtataaccgaatgtacgattgtagcactgcgaaatgagaaagggagctacaacaagcaaggcaaggttgtggtacagaaaataattgtagcactgcgaaatgagaaagggagctacaactcttttacgctttccaatgcgaatacactgattgtagcactgcgaaatgagaaagggagctacaaccgttgtggttcgtggaacatctcaaagaggattgtagcactgcgaaatgagaaagggagctacaactttaagcgttgatgtataaccgaatgtacgattgtagcactgcgaaatgagaaagggagctacaacttgaatcatcaacaatcgcttttgattgtgattgtagcactgcgaaatgagaaagggagctacaacaagattttgatacatgtcttgcaactgcccattgtagcactgcgaaatgagaaagggagctacaacgttgccatacgcctaataatttgtcagcatattgtagcactgcgaaatgagaaagggagctacaacttgtcaagtattattttgacgtgggactttattgtagcactgcgaaatgagaaagggagctacaacgaaaagcttgagatggaatttaaaatcggcattgtagcactgcgaaatgaaaaagggagctacaaccctacatataactatagcactctacgactaaatatatttttcaaccatctcaccacctcatcaacttgtttatctgctaggttagaataacccactacaaatgcatttttcggtgcttggcttttatcttgataataacgagctaaactcaccatctttataccttgctcattggcagattgcagaatttgttcatcacttaactccgtgtgaaattgcacaataaaatgcaaccctgcattctcttcttttatcgtaattttttctgcaagcgggctatttttgagcgaaaagagcaaatggtctcgttttttctgataataggctcgcattcggttaatgtgtttttcaaaatagccttgctgaataaattccgctagcacatattgctcaaagtttgaaaccgtagaggcgtaaaagcccaattgttgatgaaaacgtgttaataattcaggcggtaataccatataagcaatacgcacggttgaggatagcgtcttggaaaaggtgttcatataaatcaccttacctagcatatcaattgattgtaaggctggaattggctgaccaacaaagcgaaattcactgtcgtaatcatcttcaataatatagcgatctgccttttcggctgcccacgctaataattcataacgtttagcaatgggcattactaatcctgtgggaaaatggtgggacggtgaggtgtgtaatacattgacgtttttgagtacatttgttgcataatccattgaaatagaaatgtgatttaagccatagctttgaaaaattttatgcaacttgtcataactgggatcgggcaaggcgtaagttttatctaaaccaagaagttgaaccaataagccataaagatattctgtgcccgcgccgacaataatttgtgcaggtgaaacattcattccccgaaaatcatgtaaatgcttagcaatcgcttgacgcaacattagcactccgccactttctgcccgctccattaaggcagattgatggtgttttaatacttctctgactaattttgtccacactgaaaaagggaaattttccgcagaggtttggctgtttgtgagatctgcttgccattttttgctattttctatcggttttgaaccgcttgtttcagtgaaaactgacctgcttgtacttgttttgggtaaattaagtggattgacaaaaaatccttgcttcgcttttgcactcaaatacccttctgccaccaattgctgataggctgtttctacggtcatgactgaaatacctaaatgcttagcaaaagctcgtttagacggcaatttttcacctgcaataatatcgccttgttcaatatccagtttgatgaagcagtaaagttgttcatagagaggaatattgttttttttgaaagtataggtaaccattctgaactgattaaaagagtgaaaaatggctattttaatcagttcagatgaatttacaatgcccctaattttttatgaacaaaaggaacaaataacaatgactcaccgttatgatctcaacaaacaactggcacaaatgttaaaaggcggcgtgattatggacgttaccacaccagagcaagctcgtattgccgaagaagcgggggcttgtgcagtgatggcgttagagaaaattcctgcggatattcgtgcagcaggtggcgtgtctcgtatgagtgatcctaagatgatcaaaagcattcaagaggcggtttctattccagtgatggcgaaagtgcgtatcgggcattttaccgaagcacaaattttgcaagcgattgaaattgattatattgatgaaagtgaggtgctttcccctgcggacgatacattccatatcaacaaacgtgaatttgatgtaccgtttgtgtgtggtgcaaaagatttgggagaggcgttgcgtcgtatcaatgaaggggcggcaatgatccgcagtaagggcgaaccaggaacaggcgatgtggtgcaagcggtgcgacacttacgcaaaataaaacaggaaattgcgcgtgtggcatcactttctactgatgagctgtatcacgctgcaaaagaattacaagtgccgtttgatttaattcaatatgtgcatcaacacaaaaaattaccagtggtcacttttgctgcgggtggtgtggcaacccctgccgatgcggcattgatgatgcaactaggtgcggaaggggtatttgtcggttcagggatttttaaatcaggtgatccagcgaaacgtgcacgagcgattgtgcaagcagtgactaactataacgatgccaaattgcttgccgagctttccgaagatttaggcgaagcaatggtagggattaacgagcaagaaattgaattgttaatggcggcacgaggtatttaatgaaaattgcgattcttgctttgcaaggggcatttgccgaacatgctgataaacttaaacaattaggtgtggaaagtgtagagattcgccaacttgccgatttaaatcaagattttgatggtttaatcttacccggaggagaatctacggttcaggggaaattactgcgtgaattagggctatttgaaccacttcggcaaaaaatcttgaacggcttacccacactagggacttgcgcagggttaattctacttgcagaaaaacttgccaatgatgacaagcaacattttgccactttacctgtcaccgttaagcgcaatgcgtacggtcgtcaattaggctcatttctcactgaaagtgaagtaaaacatatcggcaaaattcctctgccgtttatccgcgccccctatgtggaaagcatcggcgaaggcatggagattttggcagaagtaagcggtaacattgtcggtgtaaaatgcaaaaaccaaatcggcatctcatttcaccccgaagtgagtgatgatctacgttttcatcgttactttgtggagatgtgtaaaaattgatgaaaacaagcgataggatgtataacccctatcgcttattctttatactataataacttgaatgcctttctgttcaattctttctttcatttcttctgaaagctggttatcactaatcaccacatcaattttttccaagccacagacgatatttgggcttttacgtccaaatttggtggaatcggcaagtaccacaattttctttgctgcacggcacatagcggaacttaccccatagatttcattaaacgtggttaagccaacttctagatcaaaaccatcagtgccaataaatagcgtgtcaaaggtagaatcattaaaagccgattcggcaaaataaccatgaaatgaagcggagcgttcacgataagtgccacctgaaatcattaaattgtagttttttttcagttgagtaatgccattgataatatgcaaactatttgtcatcacggttaaattatcaaatttaaccaaatgcggaatcatttgtaatacggtgctacctgcatccataataatagaatcgccatcattaattagttcactggctttttgccctatcttttgtttttgaagcaaattgatatgatttttttgatcgatgctggcatcaaatacttcatcttgcaaaatgacaacgcttccgtaagtgcgtaacactttattttgctgttctagcacggtgagatctttacgaatggttgccccagttaatttaaagtattcagccaatacttccacatcggttctaccgtgctgactgaggtaatctaaaatctgtttttggcgttcaatgggtttcattgcttttcctactgttaaaagattattcagtacgaaaatgttgccattagttttgataaggaatctactcgtttatcagccaaactaaaacgaggatcggcataatttggattaacaatcacggtttgtaaccccgctgctttcgcagcaattaagccggtgacactgtcttcaatgactaaacaatcattgatattcacattcagcttttgcactgccgttaaataaaccgctgggtgaggtttgccataagcttcatcatttgcactgcattgcacacgaaaataatcccaaagattcagtttgttaaataccgcttcaataatcatcggggctgaagaggtcgccagcgcgagcggaatgttctttttttgtaataaatccagtaagggataaagcccttccatcgcacaaccttgcgctaaaatcgcctcgtaagcatagcgcaaaatttgattagccacttcttctgcattggcatttaattggtaacgttcaatccagatatgcgcaatttggtcgatacgtttaccacgtgttaaatgctcacaatcttgttcggtgatttgttgccccaaagcatgcaatgtttttatttgtgcttcagcccacatcggctcagaatcaataatgacaccgtccatatcaaaaataacagcttttatttgcatactattttccttgcgaattatgacacttttttagcaaaaaagatgtgatttgattcaaaatttagcgaattaatgcaatttttagtgcattttgtagtgctttattattgggaaaggcttgttcaggctgaatttctgttagcgatttacccgttaaaacagtggaaaaagccggtttggcaaaaacagaaaaaccctgcatagttaagcactcttgtacaatattgtgattatccacggctaagacgatcacggctttgggcgtaaaacgcccctcatttctgccaaccagcactttaccctttttggcaatctctgcataagcctgattaaataaacgaatttgtcgccaaccaagtaaaatctgcaataaccacatacagacggcaaagccgatcaagatagcagtagaactcattttttctccttaaccgtcaatcatagaggggggcccccctctatgtcattagaacattacctgcccaccagtaatattgatggattgtcctgtgcaatacgcggcttgctcgctggcatagaagcgaagcacatttaatacatcttggtaatcacatcctcgttttaatgggactttatcaatataaacctgctccacttcgctttcaggaatacccaattttttggcgtattgtggaatcaatgattggaacattggcgatttaagtaaattacctaacattaatgaatgtacggtgataccgtgctctgctaaatcaagggctaacgattgagttaagccaactccgccaaattttgccgcactatatcctgaattatgcttactccccactttacctgatttggagttaatttggataatgcgccctttaataccatctcggatcattaatcgagaaaaatgtttggcagaaaggaaatagccagttaaattcactttcacagataaatcaaaatctttcaaatcaaaatctgtgattttggctgctttggctgtccctgcactatataccactaaatctacacgtccaaatgcctcatcagtggcttttgccatcgcttccacgctggtctcattggttgcatcgacttgtacgccaatcgcattttctgcaccatatttgccattaataatgcccgcaaccgcctgtgcattttcaccatttaagtctgccaccacaacccgataaccactgtcagcaagtccttcacttaaaaaagcccctaaggtttgaccaccaccaacaacaactgctacttttttcattttaaaatccctcttaattatttaaaaagacaaactcactgcctacgctaatttcatttggcacatcgccctgtaagtgaatagaacctggaaattgtgcttcgcttgccccatcaaaaaacagtgtaatatgcccaagttgagctaagttttctgaggcgacctcccctacggcggtaataggataacgcttggcgttaatctgtaattccccccctacggcaagaggttgttttaaatcatcatggctatgcacaaagcagtaatccacaacatctgctggtgcgccacttttaaacataatcaacatattgtcttgcaatgcatcttgggcaaaatcgccaatttgctccacgaccacttgataaataacgctcattgtttttccttatgaatagatgaaaccagacactaaccacgccactaatacagtcggcgcacctgttaagaagcggctgactaatacagatggcaccccaacacgcaccgtatcttgtttggcttctgccatagataaaccaacggggataaaatcacaggccgcttgcgcat

SEQ ID NO: 2576 - DNA, 21827 bp, synthetic construct
  source 1..21827: mol_type = other DNA
  misc_feature 1..21827: note = Synthetic
taggtacggggccttttgagtttgtctcttatcaaaaagattctacgattcgttataaagcctttgaaaattattgggaaggcaaaacaccagtagatcgtttagtgttctcaattacaccagatgctacggtacgtgcagctaagttagcaaaaaatgaatgtcaggttatggcatatccaaatccagcagatattgaaaaaatgaaagcggatactaatttaaccatgctagaacaaccaggtttaaacattggctacttaaactttaacgttcagaaaaaaccatttgataatatcaaagttcgtcaagcgttgaactatgcggtaaataaagatgccattgttaaatcggtatatcaaggcgctggaacggtagctaaaaatccaatcccttctaccatgtggagctataacgatgaggttaaagattatgaatattcgccagaaaaagctaaagctttattaaaagaagctggtttagaagctggtttgaaactgaaatttgggcaatgccagtttctcgcccatacaatcctaatgcacgtcgtgcagctgaaatgatccaggctgattgggaaaaagtcggcgtgaagagcaaaattgtaagctatgagtggggtgaatatctgaaacgtatgcgtgatggtgaacatccaactggcttcatgggatggaatggtgataatggcgatcctgataatttcttcggtgttttattaaattgtgcatccgtcgcacaaggatctaactatgcgaaattctgtaataaagactttgatgctttaattattaaagcggcgcaagtttcagataaagcacagcgtacagatctttataaacaagctcaagttctattcaaagaacaagcaccttggatcaccattgtgcattctgtgaactatgaaccaattcgtaaagaagtaaaaggttatgtaatgagtccttttgcattacataacttctatggtgttggtttagctgaataatgctattaaaagtgcggtataaaatcacaaaatttgttgatgaaaattgatttgatatttttttatcaaatagaaattttcaaattttgaccgcactttcatatcttaatgataacaaaacctaacgagaagtttttatgtttcaatttgttctcaaacgtattctaatggttatccctacatttttggccattactttaattacgtttgctttagtccatttaattccaggcgatcctgtggaaattcgtatgggagagcgtggcgttgacccagctgttcatgcacaaatgatgtcacaaatgggcttagataaaccattggcagagcagtattttaattatgtcaaaggtattgcacagggcgattttggtcagtcatttagaaataatgaacccgtattaaaagaattttttactttatttccagcaacagttgaattagctttttttgctttgttgtggtcattgattgtagggatatttcttggtgtcattgctgcagtaaagaaggatagttggatatctcactcagtcaccgcactttctttaacaggttactcaatgcctattttctggtggggattaattctaattctttatgtgtctgatttctttggactacctgctggaggtcgtttatccgatgaattttggatcgattttgatacaggatttatgttgattgatacttggaattcaggagaacctggagcttttgtagcggcgattaaatcgcttatcttgcctgctattgttttaggtactatccctcttgcagtggtaacacgtatgacccgttcatctatgttggaagtattgggggaagattatattcgtacagcaaaagcaaaaggtttaagcaccacaagagtcgtcattatccatgctttacgtaatgcattgatccctgtcgtgaccgttgttggtttaattgttggacagcttttatcaggagcagtattaaccgagaatattttctcttggccgggtattggcaagtggatcattgatgctattaatgctcgtgattaccctgtattacaaggttcagttttaattattgctacgattattattgttgtaaatttatttgttgatgtgctttatggcgtggtaaatccgcgtatccgccataattcatagaatttgtgggatcttttaatggcaactgaaataatttcacctatacctaaaacgcccttacaggaattttggtattattttaaacagaataaaggtgccgtcattggattggcttttattgctgtggttttctttgtgtgtgtattcgcacaatatgtctctccttatgatccaattgctcaacatcgagatgccttattgttaccacctgcttggttagaaaaaggttccagtgcatttttattaggaacagatgatattggtcgtgatattctttctcgcattatttatggtgcaagattgtcggtatttattggcttgatcattgtcgtcttatcttgtgtacttggcattttgcttggcgttttagcaggctactacggtggcatggttgatatcatgattatgcgcatggttgatattatgatggctattccaagtttattattaactattgcattagtcaccatacttgagccttcattatttaatgcagcaattgccatcgcaatagtttcagtgccgagttatgtgagattaactcgtgcttctgtattgaatgaaaaaaatcgtgattatgtaatggcatctcgagttgctggtgcaggtgtattacgattaatgtttatcgttattttacctaattgtttggctccactgattgtgcaaatgaccatgggaatttccaatgctatcctagaattagcagcactcggttttttaggcattggcgcccaacctcctacaccagagctaggtacaatgttggcagaagctcgtagctttatgcaatcagctaactggttagtgacgattcctggtattgctattttgcttctcgtattagcattcaatttaatgggcgatggcttacgtgatgcactcgatccaaaattaaaacagtaaggagaggatgatgtcattattaaatgtaaaccaactttctgtccattttggcgatcacaacataccatttaaagcggtagatggtattagttattccattgataatggtgagatattaggaattgtaggtgaatcaggatcgggtaaatctgttagttctttagctattatggggttaattgattatcctggacgtgtttcagcagcgtctctttcatttgatggcgtagatttattaagcttaaccgaaaaacaaaaaaggaaattagtgggagcggaagtctcaatgattttccaagatccgatgaccagtttaaatccttgctataccgttggttatcagattatggaggcactaaaagcacatcaaggtggaagtaaaaaacaacgtcgtgaacgtacaattgaattactcaaacaagttggcattccagcccctgaatcacgattagaggtttatccacatcagttatctggaggaatgtcacaacgggtaatgattgctatggctatcgcgtgtaaaccgaaactgttaattgctgatgagccgacaactgcattagatgttaccattcaggcacaaattgtcgatttattattaagcttacaaaaacaagaaaatatggcattagtgctgataacccatgatttagccttagtcgccgaggcagctcatcgtattattgtgatgtatgccgggcaagttgttgaggaaggaattgcagatgaaattttcaaggcacctaagcatccttatactcaagctttattaagatccttacccgagtttgcagaaggtaaatctcatttagattctttgcctggtgtagttcctggcaaatatgatagaccgcaaggttgcttgttaaatccacgttgtccttatgcgacagatcattgtcgtcaagtagagcctgaattaagacagttagattcagctcgtgtgaaatgccatacaccattaaatgcacaaggagaaccaagcaatgactgagcaaatgaatcaaacagcaccattgcttgatgctgtcaaacttaaaaaatattatccagtgaagaaagggctatttgctaaacctcaaatggtcaaggctttagatggtgtttctttccgtctagaacgtggtagaactttagctgtggtaggagagtctggttgtggtaaatcaacattaggtcgccttttaacgatgatcgaaacgccaacagcaggagaattgttttataacgggcaaaattttttagtgaatgataaagccacacagaaattacgtcgtcaaaaaattcaaattgttttccaaaatccttatggttcactgaatcctcgcaagaaaattgggacaattttagaagaacctttagtcattaatactgatctttccgctacagaacggaaaaaaagagtgctagaaattatggctaaagtagggcttcgtccagaattttatgatcgttatccacatatgttctctggtggtcagcgtcaacgtattgctattgctcgaggattaatgctacaacctgatatcgtcgttgcagatgaacctgtttctgcattagatgtttcagtacgtgctcaagtattaaatttaatgatggatctacaacatgaaatgggattatcttatgtgtttatttcccacgatctttctgtggtagagcatattgctgatgaagtcatggtgatgtatttagggcgttgtgtcgagcaaggaactgtggagtctattttccaaaatccacgtcatccttatactcaagctttgctttccgctacaccaagattatcgcctgagttacgcacagagcgtattaaattggaaggggaactaccaagtccattgaatccgccaaaaggttgtgcttttcatgctcgttgtcgtttagcaacagacaaatgccgacaagaacagccagtattaaaaacctatccagatggcagtcgtattgcttgttttatggtggattaatttaaaaagtgcggtagtgaaatagaaaatttttgtaaattttaccgcactttagtctcaattttataattatcagcacgtaataaaaaacggtaagacaaaatcttaccgttttctttttgctctatcttataatagctggttatacgtaaccataattcattaaacgttcaaagcgacgttttaataagctttctttatcaagtgtatctaattcttctaaatcatttaaaatacgctcttttaaggctttagccatttcatcataatgacgatgtgcaccacctaaaggctcttgaacaatattatcgattagatttaattcttttagacgacttgcagttaatcccatgacttctgctgcggttgaagctttttctgcacttttccaaaggattgaagcacagccctcaggagaaataacagagtaagtactatattgcaacatattaactttatcaccaacaccgatggctaaggcaccgccagaaccaccctcaccgataacagtacaaataactggcacagttaacgttgacatttcacgtaagtttcgagcaattgcttcagattgtcctcgttcttcagcacctacaccagggtaagctcctggggtatcaataaaggtaataattggtaagcggaaacgttctgccatttgcattaaacgtaatgctttacgatagccttcaggtgcaggcatgccaaaattacgtaacactttgtcttttactgtacgacctttttggtgcccaataaccattactgggcgcccatctaaacgagctagcccgccaacaatagctttatcatcagaaaaagcacgatcaccagccaattcttcaaattctgtgaaaatacgagaaatatagtctaaggtataagggcgattaggatggcgagccatacgagaaacttgccatgcatctaaatcagcaaaagtcttcttcgttaattccttactttttttctgtaatcgtttgatttcatcattaagatcgattttattatctttatctgtcacagaacgtaatgattcgatttttgcctcaagttcagcaattggtagttcaaaatctaaatattcagtttggttttgttgactcatttttgttctcaatatccttaacacaaaataataattgcactttaccagtatttttatagtggtgcaaatgtgagacttattttacgctcttttggtataaaaatctgtgattttttatgaggtttatccactttgactatgaacaaattagcaatataaaaaaagcatttcttcgacaaatttaggtacaacttcagtggcaggcccgtagtgaccaattctgaaagctgctcgacctttactaggttctagattcaattcaatagttttagcaccattgaaattagcttcttgtacaaaaccggcggcaggatatacatttccagaggttccaatagaaataaaatataaacaatcacgaatttcttcatcaatacgatccattgccagaggcatttcattgaaccatacaatattaggacgcaaaggttgaggagtatggcaacaagtgcatttatcttgcgcagtccattctttttcccacgcatacactttgcctgaatgctcacaacgaagttctaataaactaccatgcatatgaataacgttttttgagcctgcacgttcatgcaaattatcaatattttgtgtaacaattagcagattatcgccgaatttttcatctaattttgcgagtgcaagatgtgctgcattcggttgaattttaggatcaaataatttatgacgtaaaccattataaaattcacgcactaactgaggatttctggcataaccttcaggtgtggcaacatcttcaatatgatgttcttcccataacccatcttcagagcgaaaggtgcggattcctgattcagctgaaatacccgctccagttaatacaacaattttaggtaattttggcatagcttaactctcaatataaaatcaactgttttatgatactcctatctcaataaaattgggcaattaaatatagatatggatcaaaaaactgtagagtaatttcagattggtaaagtgcggtagcgaaacagaaaattttagttttttataccgcactattaaatcaaattattttataaaatttcattgcctttatagcaaagaaaatgactaagaatattgctatttttgatatttgcctgtattgaaccagttgacatagtttagctggtcataaaattttttaccattccaacctgaaaattcaaacaaatctcctacttgtgattgatgctcaaaaccaggtatataaagtgaagatgcaaactctggatattttttgtgagtaaatattattttatttggaaacggcagtgcatcaaaggcttgtaagtgctcataagtacaaccgtcacgatctgtcattaaaataaaaagattatctaaattcatccgtttagttcgttctatccatttacgacttgcctcatcttcagaatgatagtgcataaaatggatcgttagatcttctaatttccctacaggataatgtttatcggaagccacaaaatttaatttagcttgcatataatgatcaatattttgcaaatatttaataaaatcagcaggttctaaatataaattcacaaaaggcgaattaaatttttcgcctaaatcatgcaagataaaagcaccattgcaattactggaaattacagtcatatcatggtttgtcagatgttgacgatttttttgattaatggattgacgtaaaaatctattgattgctttttttattaaattttgcatgatatttattctctaattgatagggtaaaattttagacttcaattaggattattttactcattatgagatgaaataaaagtgcggtcttattcggcaaaattttcttttatttttcatataaataccagcaaccgtttgcttgcgaaatagatcacaaatagaaaagaaaagtataataaaacatttgaattttctttattttccgataggctaataacatttttactcatatttgttcaaaaacgaaaggaagaacgatgaaaactattttaaatattgctgagaagtggttagcacaagatcccgatagtgaaactcgtgcagaattatctcaattaattgaaaaaacaaaactaggtgatgaacaagctttaattgaattagaaagccgttttaatggacgtttggaattcggtactgcggggttacgtggacgcttacaagcaggttctatggggatgaaccgtgttttagtcgcacaagctgctggcggtttggctgaatatattaaaggatacgataaacaaccatctattgtgattggttatgatggacgtaaaaattcggatgtttttgctcgtgacacggctgaaattatggctggtgcaggagtaaaagcctatttattacctcgtaaattaccaacacctgtgttagcttatgcgattaatcatttgaacacttcagcaggtgttatggttacggcaagccataatccgccagatgataatggatataaagtttatttaggtaaagaaaatggtggtggacaaattgtttctccagcagataaagagattgcagcattaattaataaagtagcggaaggaagtattgctgatttacctcgcagtcaaaatattgttgttttagatgatgaagtggtgaatgcatatattgaaaaaacagccgccttagcaaaacagccatcatctgagattaattatgtttatacggctatgcatggtgtaggctatgaagtattaagtaaaacgcttgaaaaagcgggtttacctcaaccacaattagtgccagaacaaatttatcctgatggcacattcccaaccgtgaattttccaaacccagaagaaaaaggtgcattggatttagcgattaaagtggcaaaagagaaaaatgcagaattcattattgctaacgacccagatgcggatcgtttggcagtcgctatccctgatgcgcaaggcaattggaaaagtttacatggtaatgtattaggttgcttatttggttggtatttagctcaacaatatcatgcacaaaataaaaaaggtgtgctagcttgttcattagtttcctcaccagccttagcagaaattgctaaaaaatatcatttagactcagaagaaaccctaacaggctttaaatatattggtaaagtaaaaggtttgctatttggctttgaagaagcaataggttacttagtggatcctgataaagttcgtgataaagatggtatttcagctgccgttatgttcttagatttagttcgttacttaaaacatcaaggtaaaactattctagattatatggaagattttaatcaaacctttggtgcttatgtgagcggacaaatttcaattcgtgttagtgatcttagtgaaatttctaaattaatgaccgcacttcgtaacaattcaccaactgaaattggcggattcaaagttacacaagcactcgatcatttaaaaactgaacgccaaaataatattttggtatttatgttagaaaatggaagtcgcttaattgtgcgtccatctggaacagaaccaaaaatcaaattctacttagacgctaaaggcaaagattcagcagatgcagaccaagtattagcaaactttgatgcatcagtgagagcaatgcttagacaagagcaatatggtaaacaagattgctaaaaataaaaactaaacaaaagcgaacaaatatgttcgctttttttataaacgatgccccttgaaccgaagtccaaggggcagagcgttgcgagaaatttttctcttattgtaacaacgtttttcatttcgcagtgctattacaacgggaaaataatatctaggcactagctgaaagtcaatatattttctattgatattatggtaaaagtagagtctataatattcaattctaatgagtgggagaataatgaatatgttgaaaccattaaactatattttaggtctagatttaggaataggatctgtgggttgggctgtagtggagattgatgagcagggaaatccgcttcgcttaattgatgtgggcgtgcgtacttttgagcgagctgaagtagcaaaaacaggcgaaagtttggcgttagctcgtcgtttggctcgttcttctcgccgtttagtgaaacgccgtgctgcgcggattaaaaaggcgaaacgcttgcttaaagctgaaaatattctgctttcagttgatgagattttaccaaacgatgtttggcaacttcgtgtaaaaggtttagatcacaaattagaacgccaagaatgggcagcagtattgttacatttattgaaacgtcgtggctatttgtcgcaacgcaaaaatgaaagcaaaagtgaaaataaggaactgggggcgttgctgtcaggtgtagtgaccaatcatcaaattttgcagacggacgaatatcgtacgccagcggaaattgcagtgcataaattccaagcggaggatgggcatattcgcaatcagcgtggggattatacgcacacctttagccgtttggatttattggcggaaatggaattgctatttcaacgtcaaaccgaattgggcaatctgcacacttcttcaaaattattggaaaatttgaccgcacttttaatgtggcaaaagccagcattggcaggtgaagccattttaaaaatgttggggaaatgtacttttgagccaaccgaatataaagcagcgaaaaatagctactctgccgagcgttttgtgtggctgacgaaactgaacaatttacgcattttagaacaaggagcggagcgagctttaactgatagcgagcgttttgttttgctcgatcagccttatgaaaaagcgaaactcacttatgctcaagttaggacactgttaaaattgtctgatgaagcaatttttaaaggtgtgcgttatcaaggcgaagataaaaaaacggtggaaagtaaaaccacgttaatggaaatgaaagcctaccaccaaattcgtaaggcattggatggggcagatttaaaagacgaatggaatacgcttaaaaatgattctgcgttgcttgatgaaatcggcacggcattttcgctatataaaaccgatgatgatattagtcattatttaggcggtaaattgtctgaaaaggtattgaacgtgttattggaaaatctgaatttcgataaatttattcagctttcactcaaagccttacagaaaattttgccattgatgttacaggggcaacgttatgatgaagcggtttcagcagtttatggcgatcattatggtaaaaaatcagcagaatcttgccgtttgttgcctgccattccagctaatgaaatccacaatcctgtagtgttacgcacactgacccaagcccgcaaagtgatcaatgcggtggtgcgtttatacggctcgcctgctcgtattcatattgaaacagggcgtaaagtgggcaaatcctatcaagatcgtaaaaaactggaaaaacagcaagaagaaaaccgcgaacagcgtgaaagtgcggtgaaaaaattcaaagaatatttcccgaattttgtcggcgagccaaaaggtaaagacattttgaaattgcgtttgtatgagttgcaacaatcgaaatgtttatattcaggcaaatcatttgatcctaatcgcttgttggaaaaaggctatgtggaagtggatcacgccctgcctttttctcgtacgtgggatgacagctttaataacaaagtatgcttgccaatgaaaaccagaataaaggcaatttaacaccttatgaatggttagatggcaaaaataatagtaaacgttggcaagattttgtggctcgagtacaaacctgctgtttctctcataggaaaaaacaacatattttaagtcataaattagatgaaaaaagctttattgaacggaatttaaacgacactcgttatgtggctcgttttttgtgtaattttattgctgataatatgttgttgacgggtaaaggtaaacgcaaagtgtttgcttcaaatgggcaaattacggcattattgcgtggacgttgggggttacagaaagtgcgagatgataacgatcgccatcatgccttagatgcagtggtgattgcttgttcaacggtggcaatgcagcaaaaaattactcgctttgtgaaatatgaagagggtaatgtatttagtggtgaacgtattgatcgtgaaacaggtgaaattattcctctgtattttcctacaccttggaagtttttcaaagaaaatgtagagattcgtatttttagtgagaatcctaaattagaacttgaaaatcgtttgcctgattacccgcaatataatcacgaatttgtgcaaccgttgtttgtgtcgagaatgcctactcgcaaaatgacagggcaagggcatatggaaaccattaaatcagcgaaacgtttagatgaagggattagcgtgttaaaagtacctttaacgcaactgaaactagctgatttagagaatatggtcaatcgtgaacgtgagttggcattgtatgaagccttaaaagaacgcttagagctatttggtaacgatcctgccaaagcctttattgagccgttttataaaaaaggtggagcattggtcaaagcagttcgtgtgaaaaaagtgcaaaaatcaggagttctcgtacgtgatggcaatggcgtggcggataatgcgttgatggtgagagtggatgtctttaccaaaggcggaaaatactttcttgtaccgatttatacttggcaagtagcgaaagggattttaccgaataaggcagtaactgctaatattgatgaaattgattggcttgaaatggatgaaagttatcaatttatctttactatgtatccaaatgatcttgtcaaagtaaaattgaaaaaagaagaattctttggttattatggtggtttagattgagcaacaggagctattgtcataaaagaacacgatttagaaaaatccaaaggaaaacaagggatttatcgtattggcgtgaaattagctctatcatttgaaaaataccaagtcgatgaactcggcaaaaatatccgtccttgtcgtctaactaaacgacaaaatgtgcgttaattcaatccccacacttttacgagtgtggggatttttgtatttaaggaataatctatgacttggcgtagtattctaattagcaaaggtggaaaattatctctgcaccaaaatcagatgttaattcaacaggaaggcaatgaatttactgttccgttggaagatattgcgattgtggtggtggaaagccgggaaaccgtgattaccattccgttattgtctgcttttggattgtatggcattacgcttttaacgtgtgatgagcaatttttgccttgcggacaatggttgccgtttaatcaatatcatcggcaattaaaaacgctaaaattacagctagatgcgagtttgccacagaaaaaacaactatggcaggcgattgtacagcagaaaatccgtaatcaagccagcgtgctgaaaatttgcaaatttcagatagaatctgaccgcttattgaaaatggctgaacaagtgaaatctggcgataaggagaatttagaggctcaaagtgcggtcatttattttcaaactttatttggtaaaggatttaaacgtacggaagatgaaaatgcaataaacagtgccttaaattatggctatacggttatgcgttcggcggtggctagggcattagtactgtatggctggttaccgcaaattggcttatttcatcgcagtgaactcaatgcctttaatttatccgacgattttatcgaaccatttcgtccattggtagacttgcttgtggttaagctcgccaatgaagataaactctcctttcatttatcacctacgttaaaacagtgtttaattaaggtgctgaattatcagctactgtttaaacaagaaaaagttaatgctttaacggcaatagatcgaacggtaagttctttacaagctgctctgataagtcgaaatagtgatttgctaaaattacctggaattttaccacttgcggagcatcaatatgagtgagaatgtttttatgcgtatgattgtgttatttgatttgcctgtcacaaccaaggcaaaaatgcgtgccgccaaccagtttcgtcaatttttactgaaagatggttaccaaatgttgcaactttccatttacacacgtcttgtgcgtggtcgtgattcaatggaaaaacatcataaacgattagttgaacatttgcctgaagaaggagcaattcgctgtatttctatcacagaaaagcaatttgccaatatggaaattctggttggtgagaaaaaactgcaagaaaaaaaggttaattccaaccaacttttgctgttttagtgctattttttatgtaagaaaaaagccttgaaacgctgtatttcaaggctttttagcatcccattatagcactgcgaaatgaaaaagggagctacaacaagggtttaatgatcttaccttatgatgtgattatagtactgcgaaatacaacacttgtattattaaacgtaattttttgacttattattaaaaagtaaattacttgatataggtttttatttaaaatatattcgagaaaaattattttcaatataacaaaaataagccctaaaaagggcttattttaataaagtttattcccactcaatcgttgcagggggttttccgctgacatcatacaccacgcgggaaatgccgttgacttcgttgatgatgcggttggagattttacctaataaatcatacggcaagtgagcccaatgtgcggtcataaagtcgatggtttctaccgcacgcagtgataccacccagtcatatttacgaccatcgcccattacgccaacggattttactggtaggaacacagtaaaggcttggctcactttgtagtaccagcctgaattgtagagttcctcaatgaaaattgcgtctgctttacgtaataaatcacagtattcttttttgatttcgcctagcacacgcacgcctaagcctgggcctgggaatgggtggcggtttagcatttctgctggtaaacctaacgccaaaccgattttgcgaacttcgtctttaaacaactcacgcaatggctcaactaagcccaatttcatataatctggtaagccgccaacgttgtggtgtgatttgattacgtgtgctttgcccgttttacttgcggcagattcaatcacatcagggtaaatcgtgccttgagccagccattttacgctggtgagttttttgctttcgtcatcaaatacatcaacaaacattttgccgatagttttgcgttttgcttcaggctcatcaatgccttttaaagcgtctaagaaacgatcttctgcattcacacgaataatatttaagccgaatttgtcgccgaacatttccattacttgatcgccttcgtttaagcggagtaagccgttatccacgaacacgcagtgcaagtttttgccgatagcacggtgtaataacagtgcagttacggaggaatctacaccgcctgacaagcctaaaatcacttcatcattgcctacttgttctttaatgcgagctactgcatcttcaataatgttttcaggtgtccagttacgctcacagccacagatatttaccacgaaattagttaataatgctaaaccgcttttggtgtgggttacttctgggtggaactgcacgccatagaaacggcggctttcatctgacattgctgcaatcggacaagttggcgtaacacctgtaacttggaagccagcaggtaagcgagtcactttatcaccatggctcatccaaacatctaattttggatcgcaagcggtcacatcatcatttaatttttcaaataatttgtccgcactttgtagttgaaccgatgcataaccaaactcacgatgatcggacgtttcagttaaaccgcccaactgcattgccatggtttgcataccgtagcacacgccaagcacaggtacgccagcgttaaacacatattcaggggctcgtgggctattgtcttcagtggtgctttctgggccgcctgaaagaataatccctgttgggttaaattcacggatttgctcttccgtgacatcccaagcccaaagctcgcaataaaccccaatttcacgcacacggcgtgctatcagctgcgtatattgtgagccaaagtctaaaattaaaattttatgattatgaatgttgttcattggttttctctttaagtaaatcatttctctgaattttcacatccagaggtatcaagaacttgtaatccttcttttttatagattgcaaatttgccttgtcggcaactagcaccaaaaatattttgaaactgcttagttgattttccttcagcaattaaatatagatcgccacgttcatctgtcatttgttttttgatgacccaattatttttttgtaaggctttcagtacgctttcttgggactgaccttcatacatatcgggtacgccactggatgaccaatcatttgcgcaagctgaaatcataaataccactgaaagtaaaattaattttttcatttgatttattctcctaactaaatatgcaagtgcttaaattgcttaaaaattttgtaaaatctaaccgcttattatagcttagcccatacggtagttcggggcttctttggtaatggtcacatcgtgaacgtggctttctttaatgcctgcaccgctgattcgcacaaattgcgctttggtgcgaagttcttcgatggtggcacagcctgttaagcccatacaagaacgtaatccgcccatttgttggtggataatttcttttaagaaacctttgtaagcaatgcggccttcaatgccttctggcactaatttgtcagcagcgttgtccgattggaaataacgatctgacgagcctttgctcatcgcacctagagatcccattccacggtaagatttgaatgctctgccttgataaagttcgatttcccctggtgcttcttccgtacctgcgaacattgaacccaccattacacagcttgcacctgccgcaatcgctttggaaatatcaccagagtagcgaataccaccatcagcaatcacaggaataccacgatcttttaatgcttcagcagcttctgcaatcgctgtaatttgtggcacgcccacgcctgttacgatacgagtagtacagattgaacctgggccaatacctactttcaccgcacttgctccagcgtctgctaaggcaattgccccttcagcagtagcgatgtttccggctacaattggtaaattaggatatttagctcgagtttcacgcacacgttgtaacacaccttcagagtgaccatgtgagctgtcaattaaaagtacgtctacgcccgcagcaactaatgcctcaatacgctcttcattaccagggcccgctccaacagcagcgcccacacgtaagcgaccgaattcatctttacaagcattaggtttttgttctgctttttggaagtcttttagggtaatcataccttttaatttgaaggcatcatcaacaactaatactttttcaatacggtgttggtgcattaattcaaaaatttcttcacgagcagcgccttcttttactgtgacaaggcgttctttaggtgtcatgacatcagcaactaatgtatctttgtcgctcacaaaacgtgtatcacgaccagttacgattcccactaaatcaccattttcagtggtaacaggataacctgcaaatttattttctttcaccatttctgccaattcgcctaatgttgcagtcggacgaacagtaacaggactagaaacaatcccactttcaaattttttcactttacacactcgatctgcttggcgttcaatagacatatttttatggataaaaccaatgccaccttcttgtgctaaagaaatagctagttttgcttcagtaactgtatccattgccgctgataacataggaatgtttaaacgaatggttttggttaattgagtagaaaggtccgcggtatttggaagcacagttgagtgtgcagggacgagaagaacgtcatcaaaagtgagggcttcttgtttgattcgtaacattgcaatatctctctttgttataaggttaagttaaaaaatattgcggacgtattatacagggttcaaaatcattttaaaataaaatttaaaaaaaaattcagtttctattaaaagtatgatacaaagataaattaaatttttactgagggaatttatgtctaccttattagaagttttagcggatgggcagccgcattcttttgaagaacttaccgcacttttaaacctttcaaaaatagacttactcgatcaacttgaaacattacaatttcaaggcctccattttcatagttcattaaatgatgttcaattaattcctcaattagatttattagatcaacgccgtttatctgaggcattaaaaccaagcaatgtgattattaaaccgattattgattcgactaatcaatatattattgaacatttggatgaattaaaaaaaggcgatttatgtttatctgaacaccagacagctgggcgaggtcgaagagggcgtcaatggctatcaccttttgcaggtcagttaattatgagcttttattggacctttgatcctagaaaatctttagatgggttaagccttgtgattggtatggcgattgcggatgcattaaaaagtgcgggggcaaatacaataaatttaaaatggcccaatgatctttatttatcggggcgtaaattggcgggaattctaattgaaattgctaatcgaaaaaatggtttattaaatgtaattgttggaatcggtattaatttgtctttgcctaaacaggagcatcttattgatcaaccttgggcagaattatgtgaatctctaccgcacttagatcgcaatcaattagttattcaggttgttaataaactatatcagtatttaaaccagtttgaacggcatggaatagacgaaacttttcgtaagaaatggagtgaaatggattttgctattaatgaactcgttaatatcattacggataaacagattattgtcggagtcaatcaaggcattgatgagagaggttacattgttattaaaacagaatctggcgaaatcatgaaatttaatggcggtgaagtgtcgttgagaaaaggtaggtagctactatattatagataaataaaagtgcggtggaattttaaaaaattttaccgcacttttattgaagattagataactttctggatcaatgcagaaacatcactcgggaaagttttagtttttgccatatcttcaatttgttgtggtgtataactattagcgttatacaccacaacaatgctggtatcatctttttgtaaataatgtgtttcaccaaatttagtataacgagttgcacctacgctgataatcgcttgtttaggatagttagccaaagcgattaattcagcaatattgttcattggcccctgatctggctgaatattcatacgatctataatccaattaagcaatttttcgtgaaaataactatagccagtcacagggctatccacgccatatacattagtttcaccattacgttcatgaaaacaggcaatatgatattgatctgcttcgcatcctattttaaagcttgttaatgtgaacaaggtgtttgatagacctttagtatttgctccccagtttttcttttcacaaattttatttgcatttggacgacgaatagaacagtcattataagcaccaaatgcacagggtattaaattaaccactttattattttcatagacgatatcacatagaatggccaattcaggttcaatttgaagattatctgagtcaccaccaggggggacagcgtatctgaacttaaaggataaatggataagaaacctgctttttcagagggtacataaaaagggaagattgctttaggttggattttttcatcagtttttacagcaacaaagtccgcagcttctccagcttgctctaaatgaccagcaaaattcccagctacacctaagccaataatatttttatatttcatttcttatacctattatagagtaaataatgaattactttactggtaatctgtgcacaaaacaatctaaattggttgattaatatgcaaaagcaaaaaaaattttaaatttttgaaaaaagcacttgcaaaggtttctgaaatccctataatacgcagcacacaacgacgcactgttgtgaagcgataagaaaacactgtgcgtcgttattttttgctctttaacaatttatcagacaatctgtgtgggcacttgtaagatttggttttgaaaaaatataaagtcttaaggtgctgaacaaagttaatttaattagcgattaaagtcagtattttgagcgattaaacttttttaaattgaagagtttgatcatggctcagattgaacgctggcggcaggcttaacacatgcaagtcgaacggtagcacaggggagcttgctccctgggtgacgagtggcggacgggtgagtaatgcttgggaatttggcttatggagggggataactacgggaaactgtagctaataccgcgtaatgtctacggactaaagggtgggactatttggccacctgccatgagatgagcccaagtgggattaggtagttggtggggtaaaggcctaccaagccgacgatctctagctggtctgagaggatgaccagccacactggaactgagacacggtccagactcctacgggaggcagcagtggggaatattgcacaatggggggaaccctgatgcagccatgccgcgtgaatgaagaaggccttcgggttgtaaagttctttcggtgatgaggaaggcaggtattttaatagaatacttgattgacgttaatcacagaagaagcaccggctaactccgtgccagcagccgcggtaatacggagggtgcgagcgttaatcggaataactgggcgtaaagggcatgcaggcggttgtttaagtgagatgtgaaagccccgggcttaacctgggaattgcatttcagactggacagctagagtactttagggaggggtagaattccacgtgtagcggtgaaatgcgtagagatgtggaggaataccgaaggcgaaggcagccccttgggaatgtactgacgctcatatgcgaaagcgtggggagcaaacaggattagataccctggtagtccacgctgtaaacgatgtcgatttggggattgagcaataagcttggtgctcgaagctaacgtgataaatcgaccgcctggggagtacggccgcaaggttaaaactcaaatgaattgacgggggcccgcacaagcggtggagcatgtggtttaattcgatgcaacgcgaagaaccttacctactcttgacatccatagaagaactcagagatgagtttgtgccttcgggagctatgagacaggtgctgcatggctgtcgtcagctcgtgttgtgaaatgttgggttaagtcccgcaacgagcgcaacccttatcctttgttgccagcgacatggtcgggaactcaaaggagactgccagtgataaactggaggaaggtggggatgacgtcaagtcatcatggcccttacgagtagggctacacacgtgctacaatggtgcatacagagggaagcgagcctgcgagggggagcgaatctcagaaagtgcatc

SEQ ID NO: 2577 - DNA, 21764 bp, synthetic construct
  misc_feature 1..21764: note = Synthetic
  source 1..21764: mol_type = other DNA
aactcggcctgattttcaccgttgccccctaccttctgcccaagctcattaccgcgctgcgtgaaaccgcgccgaaaatgccgctgatgctggaagagaactatacccacatcctgaccgagtcgctcaaacgcggcgatgtcgatgcaatcgtcgttgccgaaccgttccaagagccgggcatcgtaaccgagcctctgtatgacgaacctttcttcgtcatcgttcccaaaggacatcactttgaagaactcgatgccgttacgcctcagcttttgggcgaagaacaagtgttgctgctgtccgaaggcaactgtatgcgcgaccaagtattggcaagctgttccgaattggcttccaaacagaaaatccaaggtttgaccaataccctgcaaggcagctccatcaacaccatccgccacatggttgccagcggtttggctatcagcgtcatgccggctaccgccttgaccgaaaacgaccatatgcttttcagcattatcccgtttgaaggcaatgcaccacaccgccgtgtcgttttggcctatcgccgcaactttgtccgcccgaaagcactgactgctttgcgcactgctattttgcaatcgcaactgaccggtgtaaccttcgtcaacgaataaaccacaaaacaaaaggccgtctgaatgttcagacggcctttttatttttaaccgaataaaggattagtagcgagtatgaacttggctgccgataacgccacccaaagccgcaccacccaaggtagaaccggtatcgccaccaatcaagttacctgccacgccacccaataccgcaccagcagcagtgttgcgttgggtttgagtcatattggcacatgcacccaaagaggcggccagcatgatcaaggtcacagtttttgcaaaagttttcttcatggtttgattctccatcagggtttaagctgtatatggagcagtatggcacaacctttcattaatatgttttctgataagtaaagacagattaaactaagataacgcttttgatgaacggttaacttcaaaaacaaacggaaattccaatagaatatttataaaatttaatatatttggcataaaattgcgcatacatcaaccgcatttggtagtgatacaatgacgacttgtctgaactaccggaaacacccgtcatgagtacctacgcactggcacacatcatccacgtttattgcgcgattgcctttgtcggcggcgtatttttcgaaatgctggttctctccgttttgcacaccagccgcgtttcgcgcgaatcgcgccgcgaagtcgaacgtgccatgtcccatcgtgccgtccgcgtgatgccgattgtcgtcatcgcccttttcatcagcggcatcgttatggtgtacaaccgttatctgccaatgttgcaccatcctctcgacagcgccttcagcattatgttgagcatcaaaatcctgttggcagtaagcgttttgatacattttgccatcgccgttgtcaaaatggcccgacacaccctcaccgtcggctggtcgaaatacatacacgccgttgtcttcagccatatgctgtttatcgtcttttttgccaaggcgatgttctacctgtcttggtaaaccttacccataccccacacacaaggattttttatgacccaatacccgtccgtcggctcgccgatgttttacggcatcttctttattgccgtcttaatcatgatcgccatcgatatggtatcgctgaaaaaaaacggcgcccacaaagtcagcatcaaagaagccctcgcctggagcggcatttgggtggccgtatcctgcgcatttgcaggctggctctattttgaactggctggcaacccgacttacggggccgttgtcgccaaagaaaaagtcctcgaattcttcaccggctatgtactcgaaaaatcccttgccgtcgataacatattcgttttcctgatgattttcggctacttcaaagtcgaacccaaattccaacaccgcgtcttgctctatggcgtattcggtgccatcgtcctgcgcgccatcatgatcttcatcggcgccgccttggtacaacaatttgaatggattttgtacctcttcggcgcgttcctcttatacaccggcattcacatgatgaagcccgaagccgaagctgaagaagacctttcccaaaacaagatcctgaccctgctcaaaaaagtcatcccgaccagccaacagtttgacggtgaaaaattctttacccttgaaaacggcaaacgcatcgctacaccgcttttgctggtattgattatgatcgaattgagcgacgtcatctttgccgtggacagcatccccgctatttttgccgtaaccaccgaccctttcatcgtcctcacttccaacatttttgccatcttgggcctgcgtgccatgtacttcttactggcagactttgccgaacgctttattttcctcaaatacggcttggctttcgtattgagctttatcggcatcaagatgctgattatgcactgggtgcatatcacgatttccatctccctgtccgtcgtcttcggcgcactgggcgcgtccatcctgacttctttggtatatacgcgccagcaagagaaaaaataatctaccgatataaaaaggccgtctgaacatttcagacggccttttcaaatatcaaacactagcttatttagcagcgtctttcaatttgtcggcagcttcttgagtcgcatcggctgctttacccatagcgtctttagctgcgtctttggcagcatctttagcatcagaaaccgcttctttagcttcttcaaccgctttaccggcagcatctttagcgtcagaaactgctttatctgcagttgctttagcatctgcagcagcgtctttaacatcagaaacagcttgctcagccgcacctttggcttcagaagcagcagcatcaacagcagaagctgcattttcagcagcagtgtttacatcggaagcaacagcagaagccgcctcttgggtttcttttttcgcttcttgtgtacacgccgccaagccggctaccatcattgtagcaatcaataattttttcatgttgtatatcctttggtctaaaaaatatctgtcaaaactgacagactaaaaaatcataacataataaacgctcaaaaaagggagaattaacgccaaataacagctggtttacgttttttgaaaaaaatttcaaaaaaacagttgacgaaaagaaacaagctacctataatgcacagcttatcgggtcgttagctcagtcggtagagcagcggacttttaatccgttggtcgagcgttcgaatcgctcacgacccaccaaatatgaaaacctgctttgaaaaaagcaggtttttttatattctccatcaagcctttcttcactcaatacctccattattatcaacatcaagaatattcgagctttgtcacaatgctgttatagatataactcaaagcatcaccaacctcttgaatcaatcaaacccaactccccacccatcatctttttctaaaaacttccaaatacctaccatcaacccacgccaaatcctcttgtatgccagacaatttaggcatagactaaaactacatccaactacaataacaggagaaggtttgatgaaacaactgtctatgtatatcaacggccgctttgaaaccgactttaacggcacatggcgtgatgtattgaatccggcaaccgaagaagtcatcgcgcgtgagcctaaaggcggaaaagccgatgttgatcgtgccgttgccgcggccagagatgcacaaactgcatgggagcgtttgcctgccgttgaacgcggcgcatacctgcgtaaaattgcccaaggcatccgtgaacgcgccgacgagctgacggataccattgttgccgaaggcggcaaaaccaaagatttggcacgcatagaagtcatgttcactgccgattatctcgactatcaagccgaatgggcgcgccgttatgaaggcgaaatcatccaaagcgaccgtccgcgcgaaaacattttattgttcaaacgtcctttaggcgtgatcgccggcattttgccgtggaacttcccattcttcctgatcgcccgcaaaatgggcccggctttggtaacaggcaataccatcgtcgtcaaaccaagcagtgttaccccgattaactgccacatttttgctgaaatcgtccatgcctcaggcttaccggctggcgtattcaacgtcgtcaacggcccaggcgcagaaatcggcaatgccttggcatcacatccacaagtcgatatggtcagcctgacaggttctgtcgatgccggccgtcaagtgatggaagccgccgccaccaacatcaccaaagtttcactggaactgggcggcaaagcccctgccatcgttctgaaagatgccgacttggatctggccgtcaaatccatcttggcttcacgcgtgggcaatacaggccaaatctgtaactgcgccgaacgcgtatatgtccatagcagcctgaaagacgcgtttatcgaaaaaatgaccgccgccatgaaaggcgtgcgctacggcaacccggccgaagccgaacccggcgcactggaaatgggcccgttgattgaagagcgtgccgtaaaatccgttgccgaaaaagtcgaacgcgcagttcgacaaggcgcaaccttggtttgcggcggcaaacgcgccgaaggacgcggctatttcttcgagccgaccctgctgaccgataccgacaacagcatggacatcatgaaggaagaaaccttcggtcccgtcttgccggttgccactttcgacacgctcgatcaagtcatcgctttggcaaacgacagcgaattcggcctgactagctccgtctataccaccaatctgaatgaagcgttttatgtaacccgccgcctgcgtttcggcgaaacctacatcaaccgcgaaaacttcgaagccatgcagggcttccatgccggttggaaaaaatcaggtatcggcggcgccgatggcaaacatggtttggaagaatatctgcaaacccaagtcgtttatttggaaaccgatatctaaccgtcgatacggcccttcataaaacaaaaggccgtctgaagttgatttttcaggttaaactgcaccccaaaagttgctactccaactaacaaggtgcagttttttataactaatttttattaaataggaaagtaaccatgttgcacaaaatcgggataataagcgcattgatcttgggttttgccatgccggctgctgccgaatgtttgattcaaaaagatggtatcggaggaattaaattagggcagaacttaaagcaggtaaaacagaaattcccgaaggcaaaaatggaaagagaaagcgatgccgaaggtgtggcgtttattgccattacgctgtcgaaagacgttatggttatcgcttttcaagatggagacgacgatcctgattctcctataaaactccataaaaaaattaattttttggagaccaattctcctacctgtcacacggcttcaggtgtacacccgggcatgaagattaaagatgcagaagccaagttgggcaaagtcaaaaaatcataatgtcggaaatagaagtgcgtgaatatgtaacatttgcccgccaacctaaacattttacatttgaagtggaacgtggaacagggatttatccgggtaaaggtgaagcaccgaatcaaactcggcgttaccgtcaaacgggacgtattgaggcaatttccgtatctcaatccagaggttttgataattgaagagcaagatattagacagaatgaactgcacccccaaagttgccctccaactaacaaggtgcagttttttatgacccaatatacttacacttcaaatactaagaccaatactgtatctcacgcacccatctgcgacgttggataaccgcctgtcaggaaagcggcatcggcgcattcaaacccttcagtctaaaatcatgatcgaccaccgcaaaaatcccttcatcgccgacaagccgatcacaaaaatacagtttggggaggcagttcaggtttcagacggcctttctgcctttatagaaaaaaacactgacatcgcgtaaaatagagccaatttttcactttattcaggccgtctgaaaactccggcagcctgactcatttttccggaaaacaccatgagcgaacaaaacaatccgcaaatcgagccgcagttggacgaaaaccaaatcatcgccctgcgccgcgagaaactgcacaacatccgcaaagaacgcaacgcctaccctaacgatttcaaacgcgacagctttgccgccgacctgcacacccaatacggtgaaatcagcaaagaagaactcgacccgcaaggcattcccgtcaaagttgccggccgcatgatgctcaaacgtcaaatgggcaaagccagcttcgccaccattcaagacgttaccggtcaaatccagctttatctgaacaacaaaggcgtgagccaagaagttttggacgacttcaaccactgggacttgggcgacatcatcggcgcggaaggtactttgttcaaaaccaaccacggcgaattgaccgtgcgcgtgtccaacatccgcctgctgtccaaatccctgcgccctctgccggacaaacacaaaggcttgagcgatcaggaaaccagataccgtcaacgctacgtcgatttgattgccaacgaagaatcgcgtaataccttcatcaaacgcagccaaattatccaatccgtgcgcaatttcatggtcaacgagcattatttggaagttgaaaccccaatgatgcacccgattccgggcggtgcgacggcaaaaccgttcgttacccaccacaatgccttggacattccgctctatctgcgcatcgctcccgagctgtatctgaaacgcttggttgtcggcggcttggaacgcgtgtttgaaatcaaccgcagcttccgtaacgagggcatgtccgtacgccacaaccctgaattcaccatgatcgaattctacgaagccttctccgactacgaacgcatgatgcaaatggcggaagacatcatccgcaacgcttcccgcgcggtaaacggcacggcaaaaatcagctacaacggcaaagaagtcgatttggaaagcccgtttgaacgcctgaccattctcgaagccatcaagaaatacaatccgcactacaccgacaagcagttgaacgatgaagaatggctgaaaaaagaaatcgtcaaacacggcgaaagcctgcctccgtctccgggcatcggcagcctgcaacttgccctgtttgaaggttgtgcagaaagcaaactgtggaacccgactttcatcatcgactaccctgtcgaagtatcgccattggcacgcgcatccgacagcaaaccgggtttgaccgaacgcttcgagcttttcgttgtcggccgcgaactggcaaacggctactccgagttgaacgatccggaagatcaagccgaacgcttcaaggcacaagtggcgcaaaaagacgctggcgacgacgaagccatgcactacgatgccgactacatccgtgccatggaattcggcctgccgccgaccggcggctgcggcatcggcatcgaccgcttggtaatgttgctgaccgattcgcaaaccatccgcgacgtgattctgttcccgcaaatgcgtcccgaataacacattgaaataaaatcaaggccgtctgaaaacaagattctgttttcagacggcctttttgttcaaatatgtaaaacggaaaaattaaaatcgacaattcctttacattataataataaaattccatgataatcaaaagcataatataaaaaagaatatgtaaacgtttttcagtttgttgacagtctgctagaatacatccaattacaggacagcccacacacacaggctgtctgaaaatgcaaaaactctgaaaggtttgtatggatcaatttttcgaacagcttcacggctgggtaaacgccatcaacgacccaatgtggtcggggttggtatatatgcttttaggcgcaggcctctttttcaccgttaccaccggttttgtacaattccgcctcttcggccgcagtatcaaagaaatgctgggcggccgcaaacaaggtgatgatccgcacggaatcacaccgttccaagcattcgttaccggcttggccagccgcgtaggcgtgggcaacatcgccggcgtggcgattgccatcaaactcggcgggccgggcgcggtattctggatgtgggtaaccgccttaatcggcatgagttcggcgtttgtcgaatcttcactggcccaactctttaaagtccgggactacgacaaccaccacttccgcggcggtcctgcctactacataactcaaggcctgggacaaaaatggctgggcgttttgttcgccctgagcctgattttctgtttcggctttgtatttgaagccgtacagaccaataccatcgccgataccaccaaagcggcatggggctgggatcaacactatgtcggtgtcgccctggtcattctgactgcccctattatcttcggcggtatccgtcgcgtatctaaagccgcggaaattatcgttccgctgatggcggttttatatctcgtcatagcactcttcatcattgctaccaatatttccctgattcctgatgtgttcgatcagattttctccaacgcgttcaacttcgattcggctgcaggcggtttcctcggcggtctgatttcgaccaccatgatgcagggtatcaaacgcggcctgtattccaatgaggcgggtatgggttctgcgccgaacgccgcagccgcagccgaagtgaaacaccccgtctcccaaggcatgattcaaatgctgggcgttttcgtcgataccatcatcgtctgctcatgcactgcctttatcgtcttgacctatcaacagccttacggcgacctgagtggtgcggcgctgacccaagcggcaatcgtcagccaggtaggcgaatggggcgcgggcttccttgccgccatcctgtttatgtttgccttttcaaccgttatcggcaactatgcctatgctgagtccaacgtccaattcatcaagagccattggctggttaccgccgttttccgtatgctggttttggcatgggtctacttcggcgcagttgccaacgtacccttggtatgggatatggcagacatggccatgggcatcatggcatggattaacctcgttgccatcctgctcctgtcaccacttgccttcctgctgttgaaagactacacagccaagctgaaaatgggtaaagacccagagttcaaactctctgaacacccaggcttgaaacgcaaaatcaaatccgatatctggtaataccaaaggccgtctgaaatttcagacggcctttttaatccctgccatctagataaaacgatgccccttaaagcagaagccttaaggggcagagcgttgcggcacatcttttcagacggccttattgtagcaacgtttctcatttcgcagtgcaacaatatggacggattctaattccaaatcggcacccagtcaagcatttcatttgcatagtaatacttacctaggatatatttatacttaccaaacatcacattacggagaaactgatggctgcattcaaacccaatccaatcaactacatcctcggtctcgatatcggcattgcatccgtcggctgggcgatggtagaaattaacgaagaagaaaaccccatccgcctgattgatttgggcgtgcgcgtatttgagcgtgcagaagtaccgaaaacaggcgactctctcgcagcggcaagacgcttggcacgcagtgttcgccgcctgacccgccgtcgcgcccaccgtctgcttcgggcccgccgtctattgaaacgcgaaggcgtattacaagccgccgattttgatgaaaacggcttgattaaatccttaccgaatacaccatggcaacttcgcgcagccgcattagatcgcaaactgacgcctttggagtggtcggcagtcttgttgcatttaatcaaacatcgcggctatttgtcgcaaagaaaaacgagggcgaaactgccgataaggagcttggcgctttgcttaaaggcgtagccgacaatgcccatgccttacaaacaggcaatttccgcacaccagccgaattagctttaaataaatttgagaaagaaagcggccatatccgcaaccaacgcggcgattattcgcatacgttcaaccgcaaagatttacaagcagagctgaatttactgtttgaaaaacaaaaagaattcggcaatccgcatgtttcagacggccttaaagaaggtattgaaaccctgctgatggcgcaacgccctgccctgtctggcgatgctgttcaaaaaatgttggggtattgcacctttgagccgacagagccgaaagccgctaaaaacacctacaccgccggacgtttcatctggctgaccaagctgaacaacctgcgtattttagagcaaggcagcgagcggccattgaccactaccgaacgcgccacgcttatggacgagccatacagaaaatccaaactgacttacgcacaagcccgtaagctgctgggtttagaagataccgcctttttcaaaggcttgcgctatggtaaagacaatgccgaagcctcaacattgatggaaatgaaggcctaccatgccatcagccgtgcgctggaaaaagaaggattgaaagacaaaaaatccccattaaacctttctcccgaattacaagacgaaatcggcacggcattctccctgttcaaaaccgatgaagacattacaggccgtctgaaagaccgtgttcagcccgaaattttagaagcgctgttaaaacacatcagcttcgacaagttcgtccaaatttccttgaaagcattgcgccgaattgtgcctctaatggagcaaggcaaacgttacgatgaagcctgcgccgaaatctacggagaccattacggcaagaaaaatgcggaagaaaagatttatctgccgccgattcccgccgacgaaatccgcaaccccgtcgtcttgcgcgccttatctcaagccagaaaagtcataaatgccgttgtacgccggtacggctcccctgcacgtatccatattgaaacggcaagggaagtaggcaaatcgtttaaagaccgcaaagaaatcgaaaaacgccaagaagaaaaccgtaaagaccgggaaaaagccgccgctaagttccgagagtatttccccaattttgtcggcgaacccaaatccaaagatattctgaaactgcgcctgtacgagcaacaacacggcaaatgcctgtattcgggcaaagaaatcaacctaggccgtctgaacgaaaaaggctatatcgaaatcgaccatgccctgccgttctcgcgcacatgggacgacagtttcaacaataaagtgctggtattgggcagcgaaaaccaaaacaaaggtaatcaaaccccttacgaatacttcaacggcaaagacaacagccgcgaatggcaggaatttaaagcgcgtgttgaaaccagccgttttcctcgcagtaaaaaacaacggattctgctgcaaaaattcgacgaagacggcatatatcgaatcggtgtcaaaaccgccctttcattcccaaaataccaaatcgacgaactcggcaaagaaatcagaccatgccgtctgaaaaaacgcccacctgtccgttaaattaatctatccctgtttcagacggcctgaagcagggattttttataaaaaataaggggaaaaacatgacttggcgcagcctgctcattcaaaacggcggtaaattatccttacaacgccggcaactgctgattcaacaaaacggcgagtcccataccgtaccattagaagacatcgccgttatcatcatcgaaaaccgcgaaaccctaattaccgccccgctcttatcagccttagccgatcatagtgcaaccctgctgacatgtgatgagcaattcctaccctacggacaatggctgccttatgcccaatatcaccgccaacttaaaatcctcaagctgcaactgaatataagcgaacccttaaaaaagcaactctggcaacatatcgtccgccaaaaaatcctaaatcaagcatttgtcgcagacgaaacaggcaatgatcttgcaaccaaacggctgcgcactttggcagtcgaagtccgttcaggcgatacaggaaaccgtgaagcccaagctgccgccctctacttccaagccctctttggggaaaagtttacccgtacgtcaatgccgcattgaactacacctacgccgtactccgtgcagcagtagcacgcgccctgaccttatatggttggttgcctgcattaggcttgtttcataggagcgaactaaatccattcaacctcgccgatgactttctcgaacccttacgcccattggccgacctggtcgttatacatttgcataaacaaggccgtctgaaaactgaactgacacccaacctcaaacaaaaccttatcaagatccttcactatcaaatctgcatcgaacggcaacatttcagcaccttggctgccatcgacaaaatgatttcttcatttcaagccagcgtaactaacaaaaacgctaaacagctgaaactgcccgaaatcttgccattgaaagaataccaatatgagtgaggctaaatttatgaggattatcgtcttcttcgacctacctgttaccacggcggccaagcgcaaagccgccaatcaattccgccagttcctttaaaagatggataccaaatgctccaactttccgtatacagccgtattgtcaaaggtcgagattcgttgcaaaaacaccacaataggctatgtgcaaacctaccgcaagaaggctcaatccgctgtttggaagtaacagaaaagcaatataccaccatgaaactgctgttgggagagctgaaaatccaagaaaaaagggtaaattccgaccaactattattattttaaggctgcttttttagacaaaataaaacgggaaacccttatagaataagggtttcccgttgaagtattgtagcactgcgaaatgagaaagggtctatccaaataaaaaagcaccacctaaacaggtagtgctttcatattaatttgcttattcagcagaatcagctgctttatcaaccaattcaaccaatgccaaaggagcattgtcgcctttacggaaaccgtatttcagtacacgaatatagccgccgttacgagcagcaaagcgtggacccaattcgtcaaacaatttaactacaacatcacgatcgcgagtgcggtcaaaagccaaacgacggtttgccaaagaaggttttttacccaaggtaatcaagggctcaactacgcggcgcaattcttttgctttaggcaaagttgtcacgatggtttcgtgagtcaacaaggaattcgccatattgcgcagcatcgcagcacggtggctgctagtacggtttaatttgcggttgccattacgatgacgcatgtcattatcctttaatcttcaaacttacggcttttctaagcctacaggcggccaagcttctaatttggaacctaatgtcagacctttagaggccaacacttctttgatctcattcaaagatttacgacccaaattaggggtcttgagaagctcggtttcagtacgttgaatcaaatcgccaatatagtaaatatcttcagctttcagacaattagctgaacgtacggttaattccaaatcatctacaggacgcagcaagataggatcgataggaggtgctttttcttcaacctcttcaaccggagtaccttgcagatctgcaaaaatagacatttggtcaattaagatacgtgcggcactacgaacagcttcttctggatcaatagaaccattggtttcaatatccaaaaccaatttatccaaatccgtgcgttgctctacgcgtgcaggttcaacttcaaagctaacacgactgatgggcgaaaagctcgcatccaactgaatcgcaccaatctgtttgttctcatcacgcaatacgcgacggcctgaaacagactgataaccacgaccttgctctactttaatttccatgtcgatttggccattgtcagccaagtggcaaataacatgttcaggattgatgatttccacatcgtgtggcaaatcaatatcaccggctacaactgcaccggcacctgttttcttcaaagtcaactgaacttggttacgaccgtgaagcttgaatacgatacctttaatgttcaagagaacgtcaacaacatcctcctgaacaccatcaatagtagagtattcgtgcaatacgccagaaataactacttcagttggggcaaagccattcatggatgacagtaagatacgacgcaaagcattacctaaagtatgaccaaaaccacgctcaaatggctgcatagacaccttagctcgagtagaagacaaggtatctacatcgatttgacgaggtttcaaaaattcggttgtgctattttgcatttaactgtccctcattgagctagcattatttagagtagaactctaccaccagctgttcattaatatcgccagacaattctgagcgatccggcatatttttgaatacaccttccaatttgtcggcatcaacagatacccagcttggcaagccaatttgagtagccaagctcaatgcctcttggatacgtacttgtttcttagctttttcacgaacagctacaacatcgcctgctttaacttggaaagaagggatattaacaacctgaccgtttacaacgatagctttatgagaaaccaattgacgtgcttcagcgcgggtagagccaaaacccatacgataaacgacattatccaaacgggactccagcaattgcaacagcaattcaccggtagaacctttacgacgatcagcttccgcaaagtaacgacggaattggcgttctaacacaccataaatacgacggattttttgtttttcacgcaattgcaaaccgtagtctgacaaacgtggttttttcgcaccgtgctgaccaggtgcagaatccattttacattttgaatccaaagagcgacgtgcactcttcaaaaacagatccgtaccttcgcgacgtgctaatttacatttagggccaatataacgtgccatgttttaaatcactccaatattaaatacgacgttttttaggcggacggcaaccgttatgaggcaacggggtaacgtcagtaatgctggtaatcttgaaaccaagagcgtttaaagcacgtacagaagattcgcgaccagggccagggcctttaatgcggacttctaaatttttaacgccatactcttgggcaactttaccagctgcttctgctgcaacttgtgctgcaaatggtgtacttttacgagaacctttaaaaccagcgccgccagaggtagcccaagacaatgcattgccttgacggtcagtgattgtaatgatggtattgttgaaagatgcatgaacgtgcacaataccttcgcttacggttttacgtacttttttacgtacacgcgaagctgtgtttgctttagccattaatcaaattccttaaaatttatttcttaccggcaatcgctttgcgcggacctttacgggtacgagcatttgtgcgagtgcgttgaccacgacaaggcaagccacgacgatgacggaagccgcgatagcaacccatatccatcagtcgtttaatgctcatcgttacttcacgacgcaaatcgccttcaacttcatatttagcaacttgctcacgcaaagcgtctaattgagcctcgtccaaatcttttgctttagtagtaggagcaatatttgctgcctcacaaatcaatttagcacgagtcgcaccaataccataaatagcctgaaggccaattacgatatgggcattattagggatatttacccctgcaatacgagccatattttttcctttttagggcaaagtatgtcactataccacaaaatcaatggttaagaaaactagcttcttaaccttgacgttgtttgtgacgtgggtcagtacaaattacgcgaactacacgattacgacgaataatcttgcaattgcgacaaattttctttacagaaggttgtacacgcattttatttccttttatcgtttatcttgctcggaaaacaatccgagcacgggttaaatcataaggagttaattcaactgttaccttatcacctggagaaatacggatatagtgcattcgcatttttccagagatatgaccaagtactacatgatcattttccagttttactttaaacgttgcattgggcaaagtctcaaggatttcaccctgcatctgtatggtatcttctttagccataagcctacttacgtgataaagatttcatatctggacgactcatcaaatcttcatactgactgctcattacgtaggaattgatttgcgtcctaaaatccattgtaacgacaaccaagataagcaaagatgttccgcctaaatagaaaggtacattcaatgctgtcgttaaaaattcaggtatcagacagattgtagtgatatacaaagcaccaaataatgttagtctcagtacaactttttccaaatatctagaagtttgctcacctgggcgaataccaggtacaaatgcaccacttttcttcaaattctcagccatttctttagggctaaatactaaagcagtatagaaatagcagaagaagataatagttgttgcaaacaatccaatatacaaaggctgtccgtgttgcagcattgcagcaaccttatgaagaacagaattcgtactatttgaaccaaaccaacctaaaagtgtagatggaaataaaataatactggaagcaaaaataggaggaataacacctgccatatttagcttgaacggcatatgaatgctttgtcccggcattattccagagccaaactgtcttttagcataatgcacaggaactttacgctgagcactctcaaaataaactacagcatagatcaacagcaaaataccaatcacaattgataccgccatcaacatactcatagagccttgttcagtcaaagttaataaccgaacaataccggatgggatacccgatacaatgcctgctgtaataattaaagaaataccattaccaataccacgctcggtaatttgctcccctaaccacatcagaaacatagtacctgtaaccaaacagaccactgtagaaatatgaaactcaagcgaactcgttacaacaacaccttgttgataaacaaatgttgcaacaccaaagctttgcaatacagccaataataccgtcccatacctagtatatttcgtaattattttcctaccagcctcaccttccttctttaaagcttttaaagaaggaacaatttcagaagcaagctgaacaataatcgacgatgaaatataaggcatgataccaattgcaaatatactaaagcgctccaacgaaccacccgagaacatatttaacattccgaatatgccgtttgcagcgccttcgtataacttagctaatgcaacagcatctacgcccggtaccggtatatgagcaccaatacggaaaacgactaaagcacctaaaaggaacaccagacgttttttcagatcaccaaatttggataatcctgataaagattgttgattagccactgtagtgcaagccttattcttctactttaccaccggcagcttcaatagcagctttagcacctttagtagcttttacacctttcaaggtaactgcttttgagatttcaccagaagcaataacttttacattagaagcagttgcaggaatcagaccagcttgtttaagaaccaagacatcaatctcgttcacagcaatcagattcaattcactcaaacgaacttcagcattagcggccgcagtcaaagatttgaaaccacgtttcggcagacgacgttgcaaaggcatttgaccgccttcaaaacctaccttgtggaagccaccagaacggcttttttgacctttatgaccacgaccacctgtcttacccaagccgctaccaataccacggcctacacgacgactagcgtgagtagcaccctcagcaggttgaatagtattcaaaaacatattaagactccactttcaacaagtagctgattttattgatcatgccacggttttcaggggtatccaaaacctctacagtatgttcacgacggcgcaaacctaaaccgcgagcacatgcacgatgagattcaattgtaccgatcaggctcttaaccaatgtaactttaatctttttttgctcagtcatggttagctcccaaaatatcttctactgtcaagccacgtttagcagcaatatcagcaggggtatacaatttagacaaaccgtctaatgtagcgcgtacaatattgtaaggattagtagaaccatgtactttagctgaaatgttatgaatacccatagcatcaaatactaaacgcattggaccaccagctttcacaccgctaccttctttagcaggttgcataaataccttagtagcaccatgacgaccaataacttcatgatgaatagtaccgtttttcaaaggtactttaatcatagagcgtcgagcttgatccattgctttttgaacagcaactggtacttcttttgatttacctttgcccataccgatgcgaccatcaccatcaccaacaacagtcagtgcagagaaagccatgatacggccacctttaactactttagtcacgcgattaactgcgaccatcttttcaatcaggccgtcaccgcgttcttcaatttcatgttttgccatctgaaagtctccaaatattagaagcttaaaccattttcacgtgcagcttcagccaaagctttcacacgaccgtgatattggaaacctgaacggtcaaaagcaactttttcaacacccactgctttagctttttcagcaatacgcttaccaactacagctgctgcttcaacgttactacctgatttcaggctactacgtacttcagcttccaatgtagaggcttgagccaatactttatcaccttcagcactaattacttgagcataaatatgattattgctgcggaacacacataatcttaccattttcaagtccgcaatacgcgcacgggttttgcgtgcacgacggagtcgggttgtatgtttatccattagtgaacctcaattattttttcttggcttctttcatcactactacttcacccacataacgaacacctttacctttataaggctcaggagaacggaatgcacgaatttcagcagcgacttggccaaccacttgtttatctgcaccagtcaaaacgatttctgtttggctaggagtttgaacagaaacaccttcaggcatttcgtatacgattggatgagagaaacccaaagacaagttcaaaattttgccctgagcttgggcacgataacccacaccaatcaattgaagttttttctcaaaaccttcagaaacacccttaaccatgttattaaccaatgcacgagcagtaccagacatagcattagcctgtttactgtcattttttgcagcaaaagtcaatttaccatcgttcagttcaatagcaacatcggaatgcaaaggaaaagacaattcgccgtttttacctttgataaccaatgcatctgttccgaattttacttctacaccagcaggaacagtcactgggttttttgcgacgcgtgacatttacttttctccactaggctacgatgcacaacaactcaccaccaacaccctcagaacgggctttgcgatcagtcattacacctttagaagtactaacaatagcgacacccaggccattcattacgctagggatctcacttgatgctttgtaaatacgcaaacctggacgtgaaacacgtttaatttgctcaatcacaggacgacctgcatagtatttcaattgaatttccaataccggttttgcatcagcagaaaccgcaaaatcctcgatataaccttcttctttcagaacttttgcaattgcacatttcagtttagaagaaggcatggcaactgctgctttattagcacgttgcgcattgcgaatacgagtcaacatatcggaaataggatcatgcatactcattatttatactcctattaccagctagctttaacaacaccagggatctcgccacgcatagcgatttcacggattttaatacggcccaaaccaaatttacggaaagtgccacgaggacgacctgttaaagcacaacgacgacgttgacgtacaggtgctgcattacgaggaatggattgaaatttcaaacgtgcctcaaaacgttcttcttcagtcgcattagcatcattaataacagcgaaaattgcctcacgtttagctgcaaactttttcgccaatgcttgacgtttcagctcacgattaataagtgctttcttagccatgattatcctttaaacggaaacttgaacagtgacaacaaagctttcgcttcttcatcagtttttgcagtagttgtaatagtaatattcaaaccacgcaaagcatcgattttatcgtattcaatttccgggaaaataatttgctcacgaacgcccatattgtaattgccacgaccatcaaatgatttaccgcttacaccgcggaagtcacgtacgcgaggcaatgcaatagtaatcaaacgatctaagaattcaaacatttgatcacgacgcaatgttactttgcaaccaactggatagttatcacggattttaaaacctgcgatagatttacgagcaacagtaacaactggtttttgaccagcaattttctctaaatcagaaacagcatgctccattacttttttatcagcaacagcttcacctacacccatatttaaggtgattttttcaatacgtggaacttccattactgatttgtaaccaaattgtttaaccaattcaggaacaactgtatctttataaaactctctcaaacgagccatgttatctccttatgctccaatgatagagccatttgatttgaagaaacgaacgcgtttaactttgccttcattttcaatcagcttaataccaacacggtctgctttattagtttccggattcaggattgcaatattagaaatatctaaaggcatttctttagcaataatgccaccctcaataccacgcattggattaggtttttgatggcgttttacaacattaacaccctcaacaacaactttatcacccaatactcgaactacttgaccttgcttacctttatctttaccggtaatcactacaacctgatcgcctttaatgattttattcatcgcgctattccttataatacttcaggcgccaatgaaacgattttcataaatcgctcagtacgcaattcacgggttaccggaccaaaaatacgggtacccagaggttcaagtttattattcaacaacacagcagcattgttatcgaatttaattaacgcaccatcaggacgacgcacacctttagcagtacgaacaactaccgcattgtatacatcaccttttttgacacgaccacgcggggctgcatctttaactgcaactttaataatgtcgccaacagaagcgtagcgacgcttagatccgcctaatactttgatgcacattacgcgacgcgcaccag

SEQ ID NO: 2578 - DNA, 21662 bp, synthetic construct
  misc_feature 1..21662: note = Synthetic
  source 1..21662: mol_type = other DNA
agcgcacggcgcgaaatacaaaggcaaatccgtcggcagcatcggacacgtcggcgcatggtcgttctgccaagacaaaatcatgaccacgggcggcgaaggcggcatggttacgaccaacgacaaaaccctgtgggaaaaaatgtggtcgtacaaagaccacggcaaaagctacgatgccgtgtaccaccgcgaacacgcgcccggtttccgctggctgcacgaaagtttcggcacaaactggcgtatgatggaaatgcaggcggcaatcgggcgcatccagctcaaacgcctgcccgaatggactgcctgccgtcaagcgcacgccgccaagctggcggaaagcctaggcaaattcaaaagtatccgcttggttgaagtcgccgactacatcggacacgcgcaatataagttctacgctttcgtcaaacccgaacacctcaaagacggctggacgcgcgaccgcatcgtcagcgaactgaacgcgcgcaaagtcccctgctatcaaggcagctgctccgaagtctatttggaaaaatctttcgacgacacgccttggcggccgaaagagcgtttgaaaaatgctgtcgaactgggcgacaccagcctgatgttcttggtgcacccgacgctgaccgacgacgaaatcgcgttctgcaaagaacacatcgaagccgtattggcagaagccacacgataaccattcagacggcatatgccgtctgaaaaatacacgccgccgacaacatgactctggaaaccctgatcgccctgccgcgcaacatcaagaaaatctgtttcctcatacacgattttctgatgattttcattgccttttggttcacccaaagcctaaaggccgactactcggacgaatggttcgaccccgccaactggcagtctttcctattgaccgcgtttttgaccgcctgcctgttcttcagaatggggctttaccgcgccgtcacacgcttcatcagcttccgcatcctctccaccgcgctggcaggcagcctcgcctccgccgtattgtttttcctcaatacgctgatatttgaagaacggctgcggctcgccctgccgattgtctatttcttactgctgtttgtttccgtgaccggctcgcgtatggttttgcgcggactgttgtccgaacaccccaaaaaacagatggcccccgtcattatttacggcgcgggacggtcgggcagacaactgcttaaggccgtcaaacaaatgcgcgaatattccgccgccgcctttgtggacgacgaccccaaactgtggcacaccgtcatctacgaccttgccgtttaccagcccgatgccatcgccttcctcatcgaacgctacggcgtggaaaaaatcctgctcgccatccccggcgcgactcaggaacaacgcctccgaatcatcaacaaactggaagcctatccgtgcgaagtgttgaccattcccggaatgaaagacctgatggacgggaaaatcagcatcggcacgctcaaaaaaatctctgtgtccgacctgctcgggcgtgattccgtcgcgcccgacaaccgcctgatgagtgccgacatcgaaggcaaaaccgtcatggtaaccggcgcgggcggctccatcggttcggaactctgccgccagattatccgccgccgccccgaaaagctgctgctgttcgagttatccgaattcgccctgtacgccgtcgaaaaagaattgcgcgaaacctgcatccaaaaacgcctcgacaccgaaatcctgccctttctcggttcggtgcaaaaccgcacgctgctcgaacacgtcatgaccgccttttccgttgcgaccgtctatcacgccgccgcctacaaacacgtccccatggtcgagttcaacaccgtcgaaggcatacgcaacaacatcttcggcacactcgagtgcgcgcttgccgccacgacatcgggcgtggaaactttcgtcctcatctccaccgacaaagccgtccgccccaccaacaccatgggtgccagcaaacgcatggcggaactctgccttcaggcactcgccgccgaacccggacaaaaaacccgcttcagcatggtacgtttcggcaatgttttaggttcgtccggctccgttgtcccgctgtttgaaaaacagattgcagaaggcggcccgcttaccctgacccaccccgaaatcacacgttatttcatgaccatacccgaagccgcccaactcgtcatacaggcaggcgcgatgggtacgggcggcgacgtattcgtcctcgacatgggtgaatccgtcaaaatcatcgaccttgcccgccaaatgattaccctaagcggcctcaaacccaacacacccgaacaacccgacggcgacatcgaaatcctcattaccggactgcgtcccggagaaaaactctacgaagagctgctcatcggcgacaacgtccgcaaaaccggccatccgcgcatcatgaccgccaacgagaccatgctgccgtggcacgagctctccgccctgctcgaccgcatccgtgcggcctgcgaccgttacgaccagcaggcaatccgcaccctgctcatcaacgccccgaccggctttgccccgagcgacggcatctgcgacctgctttgggtacgagaaacacacagaaaaaatgccgtctgaaccttcagacggcataacgtacaaaccaacctaccttacacacacggagtttgacatgcagttctcagcattcggcgaaaaattcacgcaacacagcggcatcctccaactgatggacgacctcggcgacgcgctcaaaagcgacaagcccgtcaatatgctcggcggcggcaatccggcgcgaatcgccgaagtcaatgccgtgttcgccgacgtattttccaaactggcagcagaacatgccgtcgaaaacatcggcaactactccaatcctcaaggagatgccgcgctgattgacgcgctgaccgccttcctcaaccgcgaatacggctggaacctgaccgccgacaatatcgcgctgaccaacggttcgcaaaacgcgtttttctatttattcaacctcttcggcggcaaattcaacctttcagacggcacatccgcagaaaaagccattttgttgccgctcgcgcccgaatacatcggctatgccgacgtgcatgtcgaagggcagcacttcgtttccgtcaagcccaaaatcgaaaacgtcgaacacgaaggcgaagcaggcttcttcaaataccgcgtggactttgacgcactggaaaacctgcccgaactcaaagcgggcaaaatcggcgcgatttgctgttcgcgcccgaccaacccgaccggcaacgtgctgaccgacagcgaaatggcgcggctggacgctttggcgcaagaacacgggattccgctgattatcgacaacgcctacggaatgccgttccccaacatcatttacagcgacgtaacgctgaattggcatgaaaacatcatcctctgcttcagcctttccaaagtcggcctgccgggcgttcgcaccggcatcatcgtcgccgcgccggaagtggtcaaagccgtcagcagcctgaacgcgattgtgaaccttgcccccacgcgcttcggcgcggccatcgccgccccgctactggaaagcggcgagatgaaacggcttgccgaccaagtcatccggccgttttaccgcaatcaggcgcaaaccgccgtctcgctgctcaagcgcgagctgggcgcgtacccgatgaaaatccacaaacccgaaggcgcgattttcctgtggctctggtttgaaaacctgcccgtttcttcgcaaaccctgtacgaaatgctcaaagccgaaggtacgctgattattccgggcgaacatttcttcgtcggcatcgacacgcaggattacccgcacgcgggcgagtgcatccgcatgagcatcgcgcaggacgctcaaacgctggaaaaaggcattgccgccatcggcaaaaccgtccgaaaactgtacgacaacgtttaaaccgcaaaaaatgccgtctgaaggcctttcagacggcatttttatccgcattcaatgtcgggaaaaatgcgcccacactggcctgcagttttccggcagttcgggacacgcgccgaggatgccgccgctgaagtcgtttaaacggtggaagtcgctgcccgcactggcgagcatgccgaagcgttctgccaaaaatgcgtagttgaggcggtcgtttttgcagcagttgccgctgtggacttcgatgcccgcgccgccgaggtttttaaattcttcaaacagattgcgcttggcggtagcggacaaatcatagcgcatcggatgggcgatgactgccatgccgcccgcgccgttgacggcggagacgcagtcttccagcgtcgcccattcgtgtcggacggcgcaggatttgccgtcgcccaagtatttggtgaacgcctgctgcttgtttttgacgtgtcccacccgaatgaggaactcggcgacgtgtgtgcggctgaccatttctttgtttgccgccagcgcgagcgcgccgtcgtatgcgcccgaaatgccgcgtttttccagcttggcggcgatggcttcgaggcgtttcagacggccttgccgcacttgcgccaacaggttttgcaggttttcgtcttgttcgtcaaagtctaagccgacaacgtgtatggtacgcccgcgccacgttacggagatttccacgccgttaatcaggcgcaaaccgagcctgtcggcttcggcacgcgcttcggcgatgccgccggtgtggtcgtggtcggtcaacgccagcagcgtgcagccgttttgatgcgcgaggcgcacaacttcggcgggggagagcataccgtcggaaacggtggaatggcagtgcaggtctatcataaggcgttatgtgcgtggtaaatggtgggcagggtgtttcaatattgtcgggcggtgtggcggcggtgatttcaaaaaacaggtgtatggcaaatgcaaaggaaaagccgctatgccgtcattccagcgcaggcgggaatccagactttgatttattggaaatgtttaaggttaaccgctatttcaaacttccggattcctgctttcgagggaatggcgatatgaccgttttcaattttaatctactataaaagactgtctgaaaacgtggttttatagtgaattaaatttaaaccggtacagcgttggctcgccttggctcaaagagaacgattctctaaggtgctgaagcaccaagtgaatcggttccgtactatttgtactgtctgcggctcgccgccttgtcctgatttttgttaattcactatatcaagccgaaccgttttcagacggcatcgtccgaccaacccgcttctttcaatttccgccgttgcgcgtcgtagcgggccttatccgcccaataaatcgtctgaatacacgcctcgccgcagtcgctgccgcagcattcccacgactcgggtcggacgggttcgtctaaaagcggctcgcccaaaagggcttcggctttatgcttcagggtcatatccatcggcgatttccaagcgcgcaccgtcaaactcgatgacttcgccgccgcgtattttggcggttttacgggtttcggtttcgccgttgcgcgacaccaacccttcggcaatcaacgccttcgcctgtccgccgctttcggcaagtccggccaatttcaagaggtcgcacagggcgatgtattcgttgtcttcgagatagacggtggcttccatgatgttcccttgcagaaagagcccgttattgtagcacctgccgccgccgtacccaaaattaccgcaaaaccagcgatgtatccgcaccgcctgttccgtaaaaatgccgtctgaaaccccgtatgccgccagccggtcaaagaaatcctgtccggcggcaggctgcaaatcctgttccccgacgaatccacattgacgctgatgcacctcctcaaacgcgaactgcccgatacaccagcaatcggcatcaaaacgaaatcaaaaacctgtttgaacgtaaaattaatttaactgcttgccatccgtccgaataaggtatatagttccttataactagtttgatagtcctttatatctatcaatactccttgggaagcctccgccatacggcaggaggcatttttttgccgtcgtaaaagttcaaaaaaccatttgcaggcaatgccgtctgaacccgaaacggcattacctacaccgccatctaaagacaaccctgctacaatacgccttttattgttcacgccgattttgccatgaccgagccgacctacatccccttgcgcctgcataccgagttctcaattaccgacggtatggtgcggattaaaaaactggttgccaaagcgcaggaatacggtttgcctgctttgggcatcagcgatttgatgaacgaattcggcttggtgaaattctataaagcctgccgcggcgcagggattaaacccatcggcgcggcggacgtgtggataggcaatccgaatgcgcccgacaagccgtttcgcgccatgctgattatccgcaacgatgcgggctatctgcgcttgagcgagcttctgacggcggcttatgtcggcaaagaccgcaatatccatcatgcggaactcaatcccgaatggctggaaaacggcgacaacagcggcttgatttgtttgagcggcgcacattacggcgaagtgggcgtgaatctgttgaacggcaatgaagacgcggcgcgtgcggcggcgttgaaatatgcggcatggtttcccgatgcgttttatttagagctgcaacgcctgcccgaacgccccgaatgggaggcttgcgtttccggcagcgtgaagctggcggaggaactgggtttgccggtggtggcgacccacccgacgcagtttatgagcagcgatgatttcaacgcgcacgaggcacgggtgtgtattgcgggcggctgggtgctgacggacaaaaaacgtccgcgcgatttcacaccgggccagtttttcattccgccggaaacgatgctggagcgtttcgccgatttgcccgaggccttggaaaacacggtagaaattgccaaacgctgcaatctgcacatcacattgggcaaaaacttcctgccccttttccccacgcccgacggtttatcgcgcgatgactatctcatcaaactctcaaacaagggcttgcaggaacgcatggttcagctttatcccgacgaggcggagcgtgcggcaaaaatgccggaatatcaggaacgtttggattttgagctgaacatcatcatccagatgaaattccccggctatttccttatcgtacaagactttatcaactgggcgaaaacgcacggctgtccggtcgggccgggacgcggttcgggcgcgggttcgctggtggcgtattcgctgaaaattaccgacctcgacccgctgaaatacgcgctgctgtttgaacgtttcttaaaccccgaacgcgtctccatgcccgacttcgacgttgacttctgtcaggcaaaccgcggccgcgtgatcgaatatgtgcgcgataaatacggcgctcaggcggtcagccagattgttaccttcggcacgatgtcgtccaaagcggtcatccgcgacgtggggcgcgtgttggagctgccgtttatgctgtgcgacaaactgtccaagctgattccgttggaagccaacaaacccctgagtttggacgacgcgatgaaggcggagccgcagattcaggaattaatcgaagcggaagaagcggacgaactgattacgctggcgaaaaagctggaagacctgacgcgcggtttgggtatgcacgcaggcggcgtgttgattgcgccgggcaagatttccgattacagccccgtgtatcaggcggatgaatccgcctctcccgtatccatgtacgacaagggcgacgtggaagacgtgggtttggtgaaattcgactttttaggtctgcgtaacctgaccattatcgaaatggcgcagaacaacatcaaaaacaccaccggcgacatcatcgatgtcggcaaaattccgctcgacgaccaagccgcctaccaaatcttccgagatgcgaacaccaccgccgtgttccagttcgagtcgaccggcatgaaaaaaatgctgaaaacggcgcacacgaccaagtttgaagaactgattgccttcgtatcgctctaccgccccggcccgatggacaacatccccgacttcgtcgcgcgcatgaaaggccaggaattccaatacatccatccgctgctcgaaggcatcctcgcgccgacctacgggattatggtgtatcaggaacaagtgatgcaggcggcgcaaattatcggcggctactcgctcggcggcgcggacctgctgcgccgcgcgatgggtaagaaaaagcccgaagaaatggtgaaacaccgcgaaatctttgccgaaggcgcggcaaaacaaggcatttcgcgcgaaaaatccgacgaaatcttcaactacatggaaaaattcgccggctacggtttcaacaaatcccacgccgccgcctacgccctgatttcctaccagaccgcatggcttaaagcccactatcccgccgaatttatggcggcgaccatgtcgtccgaattggacaacaccgaccagctcaagcatttctacgacgactgccgcgccaacggcattgagttcctgccgcccgacatcaacgaatccgactaccgcttcacgccgtatccggacatgaaaatccgctacgcgctcggcgcgattaaaggcacgggcgaagccgccgtcgaatccatcaccgccgcgcggcaaagcggcggcaagtttaccggcctcttggacttctgcgagcgcgtcggcaaagaacacatgaaccgccgcaccctcgaagccttgatacgcggcggcgcgttcgacagcatcgaacccaaccgcgccatgctcttggcaaacatcgacctcgccatgaacaacgccgaccaaaaagccgccaacaccaatcagggcggacttttcgacatgatggaagacgccatcgaaccggtgcggctcatcgacgcgccgatgtggagcgaatcggaaaaactcgccgaagaaaaaaccgtcatcggcttttacctctccggccacccgttcggcccgtatgcccaagaagtccgccaaatcgcaccgaccaaattaggccgtctgaagccgcaagacagcgtgcgcctcgccggattcgttaccgccgtacgcaccatgatgggcaaacgcggcaaaatcgccttcgtcagcctcgaagatttgagcggacaggttgaaatcatggtcggcggtcagacgttggaaaactgcgccgactgcctcaaagccgaccaagtgctgattatcgaatccaaagtcagccgcgacgactacggcggcggcgacggactgcgtattctggcaaaccaagtcatgaccctgcaaacggcgcgcgaacgctacgcccgcagcctcagcctcgccctcgccccgcatcacgacatcggcggactggtacaactgctcgccgcccaccaactgcccgacacgccgcgcatcccgctgcaactgtcgtatgccaacggaaaagcgtcgggcaggcttcaagtgccgccgaaatggacggttacgccgagttccgcattgttcggcgaactggaaacattgctcggcagccggtcggtgcgcgtgaattggtaacccaaaatataaatgccgtctgaagcccaaaaaccggtttcagacggcattttttaactgaaataaacgatgccccttaaagcagaagctttaaggggcagagcgttgcggcacatcttttcagacggccttattgtagcaacggttctcatttcgcagtgcgacaatatgtttgggattctagccgttgtgagatgataagtcaataatctatttgtatataaataagacaatcagatatattatcattatttgcaacgttgtttacggagtaataaatggctgccttcaaacctaattcaatcaactacatcctcggcctcgatatcggcatcgcatccgtcggctgggcgatggtagaaattgacgaagaagaaaaccccatccgcctgattgatttgggcgtgcgcgtatttgagcgtgccgaagtaccgaaaacaggcgactcccttgccatggcaaggcatttggcgcgcagtgtccgccgcctgacccgccgtcgcgcccaccgcctgcttcgggcccgccgcctattgaaacgcgaaggcgtattacaagccgctgattttgacgaaaacggcttgatcaaatccttaccgaatacaccatggcaacttcgcgcagccgcattagaccgcaaactgacgcctttagagtggtcggcagtcttgttgcatttaatcaaacaccgcggttatttgtcgcaaagaaaaaacgagggcgaaactgccgataaagagcttggcgctttgctcaaaggcgtagccgacaatgcccatgccttacagacaggcgatttccgcacaccggccgaattggctttaaataaatttgagaaagaatgcggccatatccgcaaccaacgcggcgattattcgcatacgttcagccgcaaagatttgcaggcggagctgaatttactgtttgaaaaacaaaaagaattcggcaatccgcatgtttcaggcggccttaaagaaggtattgaaaccctactgatgacgcaacgccctgccctgtccggcgatgccgttcaaaaaatgttggggcattgcaccttcgaaccggcagagccgaaagccgctaaaaacacctacacagccgaacgtttcatctggctgaccaagctgaacaacctgcgtattttagagcaaggcagcgagcggccattgaccgataccgaacgcgccacgcttatggacgagccatacagaaaatccaaactgacttacgcacaagcccgtaagctgctgagtttagaagataccgcctttttcaaaggcttgcgctatggtaaagacaatgccgaagcctcaacattgatggaaatgaaggcctaccataccatcagccgtgcactggaaaaagaaggattgaaagacaaaaaatccccattaaacctttctcccgaattacaagacgaaatcggcacggcattctccctgttcaaaaccgatgaagacattacaggccgtctgaaagaccgtatacagcccgaaatcttagaagcgctgttgaaacacatcagcttcgataagttcgtccaaatttccttgaaagcattgcgccgaattgtgcctctaatggaacaaggcaaacgttacgatgaagcctgcgccgaaatctacggagaccattacggcaagaagaatacggaagaaaagatttatctgccgccgattcccgccgacgaaatccgcaaccccgtcgtcttgcgcgccttatctcaagcacgtaaggtcattaacggcgtggtacgccgttacggctccccagctcgtatccatattgaaactgcaagggaagtaggtaaatcgtttaaagaccgcaaagaaattgagaaacgccaagaagaaaaccgcaaagaccgggaaaagccgccgccaaattccgagagtatttccccaattttgtcggagaacccaaatccaaagatattctgaaactgcgcctgtacgagcaacaacacggcaaatgcctgtattcgggcaaagaaatcaacttaggccgtctgaacgaaaaaggctatgtcgaaatcgaccatgccctgccgttctcgcgcacatgggacgacagtttcaacaataaagtactggtattgggcagcgaaaaccaaaacaaaggcaatcaaaccccttacgaatacttcaacggcaaagacaacagccgcgaatggcaggaatttaaagcgcgtgtcgaaaccagccgtttcccgcgcagtaaaaaacaacggattctgctgcaaaaattcgatgaagacggctttaaagaacgcaatctgaacgacacgcgctacgtcaaccgtttcctgtgtcaatttgttgccgaccgtatgcggctgacaggtaaaggcaagaaacgtgtctttgcatccaacggacaaattaccaatctgttgcgcggcttttggggattgcgcaaagtgcgtgcggaaaacgaccgccatcacgccttggacgccgtcgtcgttgcctgctcgaccgttgccatgcagcagaaaattacccgttttgtacgctataaagagatgaacgcgtttgacggtaaaaccatagacaaagaaacaggagaagtgctgcatcaaaaaacacacttcccacaaccttgggaatttttcgcacaagaagtcatgattcgcgtcttcggcaaaccggacggcaaacccgaattcgaagaagccgataccctagaaaaactgcgcacgttgcttgccgaaaaattatcatctcgccccgaagccgtacacgaatacgttacgccactgtttgtttcacgcgcgcccaatcggaagatgagcgggcaagggcatatggagaccgtcaaatccgccaaacgactggacgaaggcgtcagcgtgttgcgcgtaccgctgacacagttaaaactgaaagacttggaaaaaatggtcaatcgggagcgcgaacctaagctatacgaagcactgaaagcacggctggaagcacataaagacgatcctgccaaagcctttgccgagccgttttacaaatacgataaagcaggcaaccgcacccaacaggtaaaagccgtacgcgtagagcaagtacagaaaaccggcgtatgggtgcgcaaccataacggtattgccgacaacgcaaccatggtgcgcgtagatgtgtttgagaaaggcgacaagtattatctggtaccgatttacagttggcaggtagcgaaagggattttgccggatagggctgttgtacaaggaaaagatgaagaagattggcaacttattgatgatagtttcaactttaaattctcattacaccctaatgatttagtcgaggttataacaaaaaaagctagaatgtttggttactttgccagctgccatcgaggcacaggtaatatcaatatacgcattcatgatcttgatcataaaattggcaaaaatggaatactggaaggtatcggcgtcaaaaccgccctttcattccaaaaataccaaattgacgaactgggcaaagaaatcagaccatgccgtctgaaaaaacgcccacctgtccgttaaattaatctgtccctgcttcagacggcctgaagcagggattttttatatcaaaataaggggaaaacatgacttggcgcagcctacttattcaaaacggcggcaaactatccttgcaacgccggcaactgctgattcaacaaaacggcgagtcccataccgtaccattagaagacatcgccgttatcatcatcgaaaatcgcgaaaccctgattaccgccccgctcctatcagccttagctgaacatggcgcaaccctgctgacctgcgacgagcagttcctgccctgcggacaatggctgccttatgcccaatatcaccgccaacttaaaatcctcaaactgcaactgaacataagcgaacccttaaaaaagcaactctggcaacatatcgtccgccaaaaaatcctgaaccaagcatttgtcgcagacgaaacaggcaatgatcttgcagccaaacggctgcgcactttggcatctgaagtccgttcaggcgatacaggaaaccgtgaagcccaagctgccgccctctactttcaagccctctttggagaaaaatttacccgtaatgacaacaacgccgtcaatgccgcattgaactacacctacgccgtactccgtgccgcagttgcacgcgccctgaccttatacggttggttacctgcattaggcttgtttcatagaagtgaactcaatccatttaatctcgccgatgactttatcgaacccttacgcccattggccgacctgaccgtgatacatttgtacgaacaaggctgtctgaaaactgaactgacgctcgacatcaaacaacacctcatcaaaatcctctactatcaaaccagcatcgaacggcaacatttcagcaccttggctgccatcgacaaaatgatttcgtcatttcaagccggcgtaaccgataaaaacgccaaacaactgaaactgcctgaaatcctaccattgaaagaataccaatatgagtgaggccaaatttatgaggattatcgtcttcttcgacctaccggttatcacggcggcaaagcgcaaagccgccaatcaattccgccagtttttattaaaagacggataccaaatgctgcaactttccgtatacagccgtatcgtcaaaggccgcgattcgttgcaaaaacaccacaatagactatgtgcaaaccttccgcaagaaggctcaatccgctgtttggagacaacagaaaagcaatatgccgccatgaaactgctgttgggcgagctgaaaacccaagaaaaaaaggtcaattcagaccaattattgttattttaagcccattttttcataacaaataaaacgggaaacccttatgaaataaggatttcccgtcgaagtattgtagcactgcgaaatgagaaagggagctacaactacttaatacatactcactttcaatcgttaattgtagcactgcgaaatgagaaagggagctacaaccattgatgcgtaaactcgccgttattgcgtattgtagcactgcgaaatgagaaagggagctacaacacgcacccccagcacagttatcatcttctgattgtagtactgcgaaatgagaaagggagctacaacactaaaataatataaattaaaactttggaaattgtagcactgcgaaatgagaaagggagctacaacgatgggaacttagttcttaaatctttctcaattgtagcactgcgaaatgagaaagggagctacaacatctgcggacgcgcattgtcgggcagcaaaattgtagcactgcgaaatgagaaagggagctacaacacgccatcgaattcatagacgaactcccacattgtagcactgcgaaatgagaaagggagctacaactgtatagaaaaaatcaaaatcaaaaatttaattgtagcactgcgaaatgagaaagggagctacaactatatgccgaagccattactgaagtgaaagattgtagcactgcgaaatgagaaagggagctacaacgatgggaacttagttcttaaatctttctcaattgtagcactgcgaaatgagaaagggagctacaacacgccgtcgaactcatagacaaactcacgtattgtagcactgcaaaatgagaaagggagctacaacgaagctgctgactatgaaaatgatttgcttattgtagcactgcgaaatgagaaagggagctacaactcgtgcaggattcggttttccacctcccaaattgtagcactgcgaaatgagaaagggagctacaactcggtcaggtcatagacggctttgttgtcgattgtagcactgcgaaatgagaaagggagctacaactcaaaccttcgttgtaaagtcggtctgattattgtagcactgcgaaatgagaaagggagctacaactgacggctttgcccgtgccgcccaaatgctattgtagcactgcgaaatgagaaagggagctacaaccaagaagtccgccagttcgtgtagtgacggattgtagcactgcgaaatgagaaagggagctacaaccttaacgccatacaaatagtgtcaatgctcattgtagcactgcgaaatgagaaagggagctacaacaccgaaaaggcacgccgtatgccatccgccattgtagcactgcgaaatgagaaagggagctacaaccgagtaagtcaggcagcttttataatagaaattgtagcactgcgaaatgagaatgggcgctacaaccagccgttgcgataagcgaacgtgcgttaaagtcattgagacacagtgcaattatggcaagaaaggcgacagatattgtgtcacagatttgaaataagaaaaaaccgcccactcacagagtaggcggaaaacttgcgtttttttgattgtggtcgggttagctactgcattgacttaacagcaaagcaatcgctaaaatgaacttgtggttcacttcaacggacagcagcaactttttcccacgcataaggaatttaagcattttagcttctcctagtgaagttaatcacacaggcgagagccgaacaaaaatccccgttgcagcggggatttttgctgttccctgtttgatgattaaactaaaatcttgcaaaatgtatggttcattttcagcatagcgaaaagaaacattttctatttgaatatcaaagtgttctaaattttcaggcagcctgaaatcattgttctgctcgttttctgtttcttctagcacaatatccgccaaacgttcagcgtgcaatcctagcattttgatttgcacaaactggtcaatcaatgaccctgctttactctcaaactgacttttgtaggacataaacgccattaacgccccaacggtaaaaacaccgtccaacacagaaattgcaccaacaaatccattaagcggcgtaatacattagctttccattgaatattcaaagaggtagataagtacatacccgcccaagtttgtaacaatgataccaactgctgcacaatcatcaacaagccaaaacccaatgccaatgtcagcaataaatcacggtctgccgatacaatggcatggtctattacccattgcataaaaaaagggcttgccaaagcaaatacctgtaatacagtagccaacggtaaaagctgaaataaagatctttttaatcccaccactccgcgcaacatcggtagtacacgaattttacgcgtttcgtgtttctcttcaaattgcgtgttaggaaatagttccaatgctacacctgtaaaacagcgcgagacttcttccatacgcactttttgccaacccgaagcagggttcataatcataatgtgattgcgatgaacttcatgcaacaccacaaaatgatttaaatcccaatgcaaaatacagggtacgcgcaaatttgctaactcatctaaatccaaccgaacagcccgagcggttaaattcatgctattagcaaaccgtaccaaatccgccaatgttgcgcctttaagcgacaaagaaaaacgcgcccttaaatggcgcaaatccgtataaaaaccatgaaaccccaacaccgataccaaacacgctaatccacattcggctgcttccgtttgcaaaataacgggcaaacggcgcgagaaactgaatgataggcgagagagatatgttggcattagagttcctattttattttttatttaaaaaaaattattattaccgataataatactgataataaaaaaataaaactattttcatttgattacgacttaatggaggctgatgtattaatccgtaatgtacagataagccaaccaaaaaaatcaaaacaagaaagaaagccatgagtacttggtaaggattcatcaatgctattcctataattttgtttaataccctgttccatcaccgtaatcattacctgatcgatcattatccaaaatgctttcaatacctcgtccgatcacaccaccaatggcagatccagctcctgccccaattacagaaccaaccttaccaccatattgttgtccagctgcaacaccaactatagtaccacctggaccaaatggagagcctagaattcccccgatggttccaccacctgctttccctgcaatatatccagcaccaccaccaatagcacctcccactcctgtagtgaaatcagcaatgggaccagcaccactaactaattcaagttctacaatagagagttcatacatttttatttacctcaaaataaaatttaataataaaaaagaaatgagttagacagaatagtatcactataaaaatgatagaataaatattcatattaaaataaaaattttcctgtctaaatagagttattaaggcaatatacaaaataaccataaaataaaaagtaaatatttttacaaattctattttattttgatttttatttattcctcgtgcaaaaattaccattttataaatcaaaagcaatgttgaaattataaacgaaaatgctattaatatagaaatatgatttacaaaaggtatagttgataaattaaatctaactttactgtatataatgtatacgttcaataaaataaatgatattgaggatatattgattaaaatttttgtgttatttaataaaacacccattgattacctcacgatttcaataacatctaataaacataactccctaactaatttcttaatattttcttgttcatcaacactaaacaacgataatattcagctagggatatcatgtaaagcaagaaagaaagccatgagtacttggtaagcattcatcaatgctattcctataattttgtttaataccctgttccatcgccataatcattaccagatgcatcattaaaattttggtctagtcctgttaatttatcaactcctgaacttaaccaatcgcctaatggcgtttcatgatataaataagtacctgtattccagcctgctatgcctgccaaaccaattaatccacctcgagcagcacttcttgctatcatatccccagttgcagtagctgaaacagctctccatccacctgtcgctgcactagttacaccaataacatcaagagaactaaaatactttggttccgaaccacctgaaactatttccaggtcagaaatatttaattctttcattgctttccctttttaacaatcttatttttcaatatgattgaatagtacgctcatgccaataccaatcataatactaaatactatattaatgtaatctccgtcataattaggatgaagacgccaccctcctaattctgataatttcataaaaatatatattacaacagaatatccaattgcatgtaaaaatgttttcatatattttatatcctaaaatattaaatccatctcatcttataatttcaattatatctaactctcctagctgccaaactaatttattaatactttcttgttcgttagtattaaataacgataacatttcagttaaggggattatgtgtttattaactaaaatcgttaaaaatttcatactgatttcatcaatatttactttaatgccattcgcaataaagtatccttgtgaaagagttgagcaatcattactatttaatcttaaaaagcaatgctcaggtaatgtctgattatgagcatttccaaacaaatccatattgaatgctgtattggtgcgctgatttcccaaaaaatcttgcataaatgcttgataattttttgggttattcatcatttcagtaactgcttgagctgaatcatctagattttttttggtcatgttcccagcctatgaaattttgacgaatactctgaatatcaggtatttttttcatcaaccattccatatagttataaccgtttggtggaaatgtaccaatagctaaatggaatgtttcacaattcattggcataggattatgccaccaaccacgtggaatatatagaatatctcctgcttctaaaatgacttccatatccactgttttaggtggagtaatgtgcggcatatcttttgcttgctgcatatacaacggcatatcaaaatttggggcagaaattgtccaatgttttttgccaatcaattgtactgcaaatacatctcgagtatcccaatgattacgatatgatgatgagctaccaaaagctaaataaccactaacaacagtttatgcttgagcaaactgagcaatttgtttagcaatactatcaacaaatggctcattatcaatacggttataaaccattgtcgcgccatcttgcaaatactgatacacggctgttttattaaatcgatgacgtatcctacccacatcattgaatgattcaacataggcttcttttggaattatttccccttttcggaacttaaattgccaatcagtagggtctgcacgttgatacaattcattgatttctttccacgaaatacaacttacatctaaagattttttaaaaataaatggctttttatataaataattttcatggaaatatttgcgttccattgaaaagttaataagcacaaataatccttgttattaataatgattttgagtataaaaataaaatattagaacgtcaaatttcgttaagtatgtttaatttttttgaaaagtaccacaaatttaagccacaattactctcctaaaatttttcaagatattaaagtttttccaagtcatcggccgttaatttaaacattctcatcacaagttccatttatttaatggcatcatcattcatcatgcttttaaaatctatatacataatcagttgtttataaacatattcgttccagtcgttaccgaaaaaaattgtgcctttttcttttggtacttcctgctcaatatcttcttctgtgtactgaatgggtaaatctacacgttttctagccctttttgcgcgttcttcttgttgaaaataattataaaaattttttacaaatcgcgcatcaatatgaaccgtaccttgctgccgtgccgtttggaaaatttgcttgaatgtgccttttcccacttgctcaaatatctcattgatgacattttcttgctgtttgggagacaatacttcaaactgctcaatcaaaaattttctttgttcttcaagcttttgcttttctttttcttttctagcttgttctgcctgttcttcggcttttttccgctcacgttccgctttttcaattttggctttctcttgctgtttagccaaaatatccagctcccaacgttcggcaatggcttttttcgtgatgttggaacggtagaagtcgctaattagctcgcctttctgttcttgccgtttgatgtatagtggattaaattcaaaccagtacggcgttgcctcgccttagctcaaagagaacgattctctaaggtgctgaagcaccaagtgaatcggttccgtactgtttgtactgtctgcggcttcgtcgccttgtcctgatttttgttaatccactataatcatcaattcgggcttgaatggctttgcactcaacatctgaaaaatcggcgaacaaatcaagctcgggcgcaacttttggcagttcaggaactttttcaggctactgctgttgctttctcgtgaattcaaagcgaaaaccagtaataacgcgcccattttttctttgttcgtaagtagcggttaaatcagttttcttattgatttcattgatagaataatcaataaccctagttttaaaatttcctattcttgcatattcattaggaagtagaccaaaacgaaaacgcaaatcaacaagggaaacttcaagccagccttttcctgtttgtttatcaaagtactgcataaaaaactcgtacaagcgcatagcataaccactagacaactgtgcgacttgctcaatttcgtacacggtaaaccgtttttctatctccattaaaaaaagaatgattaaggaatgattgcagttgaaaaagtaa

SEQ ID NO: 2579 - DNA, 20017 bp, synthetic construct
  misc_feature 1..20017: note = Synthetic
  source 1..20017: mol_type = other DNA
tcgtcctaattttgctttagtggcaaatatgctgaagaaaacgttagtgcaactgaaagaggacagagctaccaattattcatagtgttcagggttgtttatatgagctagaacgttggcgaaatcagcatattaaaatcggaatgtttttatggacatcaatttgcaacagttgatgaattagaacaggcattgcataaacatattcgttactataatgagaaacggataaaaccaagcttaaaaaatttgagccctgtacaatacagagcccaatatcttagctaatttatgaactgtccaaatttatggggcagatcaacaagcggtctttttcgttaaatatcttcttcctcatcatagccgtcataattatcgttggctaatgaagtacatccgtattgttccaatttatttttggtaaagtttgaacgagtagcagaactacgattatttaagctgattacgccgatagtcgcatggttacattggtgtttattcacaaacactaagttataaccggattcacgaatataaccggttttattgattgctgcatcgaaaatctcttctcgtactaatgcactggtgttttgcataaatacattgcgttttcctgcacgaatatatgttgctttcgtattagatagctcttgaattttggtattattcagcgaatattttgccagcttaactaaatccatcgcactcgagatattagcgctagataaacctgagctatctctaaaacgagtagaacgcatacctaattgctgcgctttttggttcatcttttggatgaattgcgaacggctcatccctgcagaacgagagagtgcgtgagcagcataattatctgaatggactaacatcgcttttaataattcgctgcacgcaatcggtgtatatttgggcaatttagtgccggtgcctttgatgtaatcgaaatcttcatcagaaatcgaagcgctacagtttttatttttattattttctaagaaaacattcgctgtcattagcttggtaacagaagcaatcggctgaacattattcgctgatcggctttctaaaattttatcgtgagtaaaatcatacaccacataagattgggcaatactaagagctggaaaaaggaaaaaaacggaaagaaattctttaaacatattatgattcattgagttaaaaattagcctgttattttaacaggcttttattctgctcgctatggattaaacaattcttaggaatgccaaatgttctttacaaaaggcacaatggttttaagcgcttccgagattgaaattaagcctaaattcatttgttgcgctttttctttcgcttcaggcggcataaaggctaaatgtttgccttcttcattaatcggacgccaacggcgaggcaatgcagataaacggctcggataaaacccaatagttgcgacattcagtgcgccggcgatatgcagaggtccggtcgaaccagcaataaacagatcggcacaagcaatcgaacaggcaaaatcttgtaaaccgtcattcttatcgtacaccaccgctttagctgcagtaatttgtgcggctaattggtgggctttttcactttcgcctttaccggcagtgagcacgatttcacaatttgtttcatttgcaatgcagttaagcatttgcgcatattgttcaatggataaactggttgccgagccaccggtggacgcatgtacaaacagccatttacaagcggtcgaaatttgcagattttttgctaattttgctttttgttgtgcaatctgctcttcgctgaattgtaagtacggcggcttaggctcaaccactgcaatatggtgtttttgcagaaatgcacgagctaaatcgagattatattcgctttccgcttttgccgattgcgaacggcgctgggttaagcgctggttatacaaaaattgaaagactttggttgccggcgcaagacggtgtttaatgccgcttttccacgtcagtttggcattgtaccagtcggaaacaaagcagattaccgcatcaaattgcgcatttttgacagcttgcagaacacgattaaattcggctttatcttttttgttaggtgtatcgataataacgttatcaatcgaagggcatagtttggcaagcggggcggtatagcttggcactagcgccgtaatttctacatttagtatagactgtttcaacatcgcaaatgccggaaaacacaccataaagtcaccgattttatcattgcgaatgacaagaatttttttcattatattttttaccttttaaaacgaattgcgggctattttagcattttttaagtggaatttttggtaaaaaattatgaaaatttgaccgcttgtttagtgtcaaacgttagattaaaaatcattacgagatttccttctaaattttagatgtaatttttacaaaattgaactagaatagacggaatgacacaaatgcaaccgtttgcgtcagttgtcttttattgtgaaaatttataggaattcgtatgtcagcaacaattttagaatctctcccattaggtcaaaaagtaggtatcgcattttcaggtggtttagatacctcagccgcattactttggatgcgtaaaaaaggtgcagtaccttatgcttacactgcaaacttaggtcagccggatgaagacgattacaacgcaattccgaaaaaagcgatggaatacggtgcggaaaatgcacgtttaatcgattgccgtgcacaattagcacacgaaggtatcgcagcaattcaatgtggagctttccatatttcaaccggtggtattccatatttcaatacgacgccacttggtcgtgcggtaaccggtacaatgcttgttgcggcaatgaaagaagatgacgtaaacatttggggtgatggttcaacttttaaaggtaacgatattgaacgtttctatcgttacggcttattaaccaatccaaaattaaaaatctacaaaccttggttagaccaacttttcattgatgagcttggcgggcgtttcgaaatgtcgcaattcttaattgctaacggtttcgactacaaaatgtcggtggaaaaagcatactcaactgactcaaatatgttaggtgcgacccacgaagcgaaagacttagaagaattaagcaccggtatgaaaattgtgaaaccgattatgggtgtggcattctgggacgaaagtgtagaaatcaaacctgaaaccgtttcagtgactttcgaagaaggtgtgccggttgcgttaaacggtaaacgtatcgaagatgcggttgaattaattttagaagcaaaccgtatcggtggtcgtcacggtttaggtatgtcggatcaaatcgaaaaccgtatcattgaagcgaaatctcgcggtatctacgaagcaccgggaatggcgttattacacatcgcttacgagcgtctagtgactggtattcacaacgaagatacaatcgaacaatatcgtatcaacggtttacgtttaggtcgtttactttaccaaggtcgttggttcgatccacaagccttaatgttgcgtgaaactgcacaacgctgggtggcaaaagcaattaccggcacagtaactttagaattacgtcgtggtaatgacttcaccattttaaatactgaatcaccaaacttgacttacgaagcagaacgtttaagtatggaaaaagtagaagatgcaccgtttacaccggcggatcgtatcggtcaattaaccatgcgtaacttagatatcgtggatacacgcggtaaattaggtatctatactgagacaggtttattatccgttcaaaacaacgtattaccgcaacttggtaaaaagtaatcttgatctaatgctttagaaaacttagaatcagacaaaagccccatagtttacgctttggggctttaattttttaataagcggttaaaattgaagaattttttgcaaatgaaattagttgaaatatttacagacggttcgtgcttgggtaaccccggtaaaggtggcattggtatcgtattgcgttacaacggacatgaaaagcaggttagtaaaggctacttgcaaaccaccaataaccggatggaattacgagcggtgattgaagcgttggcaatgttgaaagagccttgtcaagtacagttaaattcagatagccaatatatgaaagacggtattactaaatggatttttaactggaagaaaaataactggagaaccgcaaacggtaagccggttaaaaataaagatttgtggatagcgttagatcaagagattcagcgtcacaaaattgagtggacttgggtaaaagggcactcaggtcatcgtgaaaatgaaatttgcgatgagttggctaaagccggtgcaaataaccctacattggaagatgtagggtataatgcggagtagccaaaagaggcaagcggtcaaatattgcaaaatttttgcaaatttgaaccgcttgtaaattttttcggcatatattatgccgttttttacgaagtttgctctacgcaaacgttttctttttttgtagaatataggttcttaacctttagaggtttttatggttgacattattattatcggattaattgcattttctatcttagtaagcctttggcgaggttttgtgagtgaagtgctttcacttgccggttgggtcgtagcgttttttgtggcaagcaatttttacccttaccttagcagctatctcacgcaagtaaattcggtatatcttcaaaactcagaatatttacgtaatggcatcgccgccgctatccttttcattattacgctgattgtttgtggcattattaccgctctactgagcaaattagttgacacaacaggcttatcggcgacagatcgtgtgttaggcggtgcgtttggcgcattacgcggtattttgattgttgcggcaatcttattcttcttagataccttctcatcagcaagtcaaacggaattatggaaagagtctcaacttattccacactttgactttattgtgaaatggttctttgaacaactacaagctaattccagctttttaaattcgactaaatagagaggttttttatatgtgcggcattgtcggcattattgggggatcgccggttaatcaggcgatttatgatggcttaacattacttcaacatcgcgggcaagatgccgcaggtattgtcacaattgatgatgaaaaccgcttccgcttacgtaaagctaacggcttagtaagtgacgtatttcgtcaagagcatatgctcagattacaaggtaatgcgggtatcggtcatgttcgttacccgactgccggctcatcaagtgtttcagaagcacaacctttctatgtaaactcacctttcggtttaactttagttcacaatggtaacttaaccaataatgctgaattaaaagaacgtttattcaaagaggctcgccgccatgtgaataccaattcggattcagaatcattattgaatatttttgcgcactatttagatcaatatccgacagcgcatttaactcctgaaaatatctttgaaacggtacgtaaaaccaacgaagtaattcgtggtgcttatgcgtgtatcgcaatgattatcggtcatggtatggtggcattccgtgatccgtttggtattcgtccgttagtattaggtaaacgtgttgtggaaggcaaaacagaatatatgtttgcttctgaaagcgttgccttagatattgtcggttttgaatttgtgcgtgatgtaaacccgggtgaagcggtttatattacttttgaaggtgaattgcattcggcaatttgtgctgataatccgaaattaaacccatgtatttttgagtacgtttattttgctcgtccggattcggtgattgacggcgtgtctgtgtatagcgcacgtgttcatatgggagaattattaggtgagaaaattaaacgtgaatggggcagaatggttgatgagattgatgtggttatcccaatccctgaaacctcaaatgacattgccgtacgtatcgcaaacgttttatataaaccttatcgccaaggctttgtaaaaaaccgttatgttgctcgtaccttcattatgccagggcaagcgcaacgtaagagttcggtacgccgtaaattaaatgcgatttcaagcgagtttaaaggcaaaaatgtgttattagtagatgactctattgtacgcggtacaacatcggaacagattgttgaaatggctcgtgctgccggtgcgaagaaagtttactttgcgtcagctgcaccggaaattcgttattcaaatgtatatggtattgatatgccgacttgtgaagagttagtggcttatgatcgctcagtggaagaagtagcggaaatgattggtgtagataaactgattttccaagatctcgaagcattatacaaagcggttcaggcagaaaacccaacaattcaacattttgacgcatcagtatttaccggtgaatacattaccggcgatgtagataaagcttaccttgacgcaattgcacacgctcgtaatgataaagcaaaagccaaagctgcaaaacaagcaactaatttagaaattcataacgaaaactaaattaaagcataaaaacaagcccttgagtctgagaagattcaagggctttttgtattaatgactatataaaacgatgccccttgaaaccgaaatttcaaggggcagagcgttgcgagaaattcatctcttattgtaacaacgtttttcatttcgcagtgccattacaatggctaaatagtatcgttgacattgattgttgtcaatatacatttattacaatttatgataaaaattaaacgccgtgtaaaaaaggattattacaaattataagaggtgaaattgtatgaaattgacgccactaaactatattttaggtcttgatttagggattgcttctgtcggttgggcagtggtagagattgatgagtctggcaacatcattcgcctaattgatttaggtgtccgaacttttgatgcagctgaaactggtaaaggggagagcctaaatttagtccgtagatctactcgagctaccagactgctgatttatcgtaaagctcaacgagttagagagttacgataccttttgaaaaatgaagggatgattgatgatgctatagctagttataaattgccaaataatgtttgggagctacgagttgagggcttagatcgaaaattaaacaaagaagaatgggcagctgtattactacattttgtcaaacatcgtggatttaaatcttcaagaaagcatcagcctaaagacggcgggaaacaaggacagttaataaaaggaataaacgataataaaatattattagcttcaggagtatatcgttcaccagcagagctggcgatcaaaaaattctatgtagaagatggttatattcgtaaccaacgacaatatcaacacacgtttggcagagaagaattagctgctgaatgcgctttattgtttgaaactcaacgcaaactaggtaatccattttcttctaaggaatttgaatctaagtgggcagatatatttaataaacagaaaaaagcacttacaagaaaacaaatgttagcgatggtgggtatctgtacctttgaaaatacaaaatatggtttaactgaacaaaaaagagcggctaaaaatacctattctactgagcgatttgttgcaattcagcgattacagaatttacgtattgttgaaaatggtgaagaaaaaggattaaccgacaatgagtttcaaaaaattttatcacttggttatgaattagaaaaaggtgtcagctatgctcgagttagaaaagaacttaatttatctgaaaaagccttttttaaaggactacaatactcaaaatatactaaaaaaactgaagatagtttatttttaaactttaagttttaccacactctccacaatactttattatccaataatttagaaaatgaatggaatgaaatttctaaaaacgataaattaatggataaaattggtacagaattatcactttgtaagaatcaagatgaatttttagaatctcttagtgatgaattaccaaaaaatgttttaaatgtattatttgaaaatatacattttgataaatttattcatatttctcttgttgccttatataaattattgccattgatggagcaaggatataactatgctcaagctcatactgaaatttatgggtattcgcaaatagaagataaaaagtttttatctgcaattcctttggcggatattcataatcctgttgtattacgttcactgactcaagcaagaaaagtaattaatggtattattcgattatatggttctccaactcgtattcatattgaattatcaagagatttagggaaatcaaaggttgatagagatgcaataagtaagcagaatgcaaaaaatagagctagtaatgatgaactagctaaacaaattcgagaagaatttcagttcgaacctaaagcaaaagatattcttaaatataggttgtatattcagcaaaactgtcattgtatttattcaaataagaaaattgattgtaagcgattatttgaagataactatgtagagctcgatcatgctctaccgctaagccgttcttgggatgatagctttaataataaagtgctagttttaaaatatgagaatcagaataagagaaatttaacaccttatgagtggttagatggtaaaaatgatagtttacaatggcggacttttgttgcgagagtaaatagtttttctgaaatttctaaagagaaaaaacaaaagttgttatcacataatattaatgaagatgaatttaaatctcgtcatttaaatgatacacgttatattgctagatacttaaaaaatcatattgaagaacatttaatgataacaggaaaaggtaaaaatgtattggcaacaaatgggcgtataacgagtttattgcgtaaagtttgggggctaaataaagatcgagatttaggggatcgtcatcatgctctagatgcggtagttgttgcttgtacacagagtaagctcattcaacaaataacagaggatattcaacataaccgtatttgccgttttacaggagagcctaagaaaaaaatatttataccttgggaacattttactgcagatgtaaatattcgagtatttagtgataatccaaaattagaactggaaaatcgtttgcctgattatccgcaatataaccatgaatttgtgcaatcattatttgtctctcgtatgccaactcgcaaaatggtagggctaggacatgaagcgacattacgttcagcgagaattcttgacacaacaggaaagagcattaaaaaagagtttttaactgatttaacgcttaagaaccttgagaatatgatgaataaagaacgtgaaccagaactttatcaatcattagttgaacattttaaaaaatatggagataagcctaaagaaaaattctttaagaaaggtggtacagaagttaagtcaattcgaatctgtaaaactcaaaataaatttgtagatttaggcaataaaactatcgcagataatggagatattgttcgcacagatctatttttaaaagggaaaaaatactattttgttaatatctatgcttggcaggttgcagaaggtattttgccaaatgaaacaacaatggggaatttattagatgattcttacatattccaatttagtttatttaagaatgatatattagagatacctcatcctgaagataaaaataaaagtgtatttgcttattttattcgtccagatgatgatagacgatggattttaaaatttcatgataatgctaaaattcctgagatctatagcaaaaaagatgacacatctatccgtttaagcgttcaagggcaaaaatttattcgtaaataccaagtcgatgaactcggtaaaaatatccgtccttgtcgcccaacgaaacgacaacacgtacgttaatttaatccctacactctctgagtgtggggatttttgtatttaaggaagaaattatgacttggcgtagtattttaattagcaagggcggaaaactttctttgcaaaaaaatcagatgctgattcaacaagagggcaatgaatttactgtacctttagaagatattgcgattgtagtggtggatagtcgggaaacagttattaccattcccttattatctgcttttggtttatatggcatcacgtttttaacttgtgatgaacagtttttaccttgcgggcagtggctaccatttaatcaatatcatcgacaacttaaaaccttaaaattacagctagaagccagtttgccacaaaagaaacagctttggcagagaattgtgcaacagaaaattcgtaatcaagcaacagtactgagcatttgcaaatttcaagcagaatctgaccgcttatttaaaatggcggagcaagtgaaatcgggtgataaagataatttggaagcgcaaagtgcggtgatttatttccaaacgttatttggcaaaggttttaaacgcacagaagatgaaaacatggtcaatagcgcattgaattatggttatactgtaatgcgttcagcagtggctcgtgcgctagtgctatatggttggttaccacaaattggcttatttcatcgaagtgagctgaatgcgtttaatcttgcagatgattttattgagccttttcgcccgttagtggatttattggtggtgcaactggcgaatgaagccaaactatcagctaatttgtcaccgattttaaagcaacgattgattaaggtattgaattatcagttgttatttaaacaagaaaaagtgaatgctttaacggcgattgagcgaagtgttggctcatttcaaacggcattaagccaacgcaataccggtttgctaaaactgcctgaaattctaccgcttgtggagcatcaatatgagtgagaatgtatttatgcgaatgattgtgttatttgatttaccagttaccaccaaagctaagatgcgagcagcaaaccaatttcggcagtttttactgaaagatggctaccaaatgttgcaactttcgatttatacccgcattgtacgtgggcgagattcgatggaaaaacaccataaacggttggtggaacacttgcctgaagaaggctcaattcgttgtatttccattacggaaaaacaatttgccaatatggaaatccttgtcggcgagaaaaaactgcaagaaaaaaaggttaattcgaaccaacttttactcttttaacgcgatttttttagtaagaaaaaagccttgaacccttatggttcaaggctttttagcgctccgaattatagcactgcgaaatgaaaaagggagctacaacttagtcaccggtgacggctcaattatgatgattatagcactgcgaaatgaaaaagggagctacaacattaagaaatttggtacacaatggttgccaattatagcactgcgaaatgaaaaagggagctacaacagttacgaagaacagataaagcagcttgaaattatagcactgcgaaatgaaaaagggagctacaactaaacccctttaaacccccctctttttccgattatagcactgcgaaatgaaaaagggagctacaacttatcgctacaacagatttagcgctttggaattatagcactgcgaaatgaaaaagggagctacaactgagataagttcgtactctaagccaccaccattatagcactgcgaaatgaaaaagggagctacaactggctttcggagtgaatggtggcaaggaaaattatagcactgcgaaatgaaaaagggagctacaacataatttgttgattttacaagcggttgaatattatagcactgcgaaatgaaaaagggagctacaactgacagcaataagtatgcgacatcaaaggcggttaaaacagttaatgataacgcgaatggtcgtctgtctaaaactggcgatacgttaaccggtgtgcttgatattaaaaatggcgactacagtttaattaatcagtggaatagtgcaggcaagcaaacaagaacggagacattacccgataacgaagataatttttcaaaaattagctatcgctcaaataatggcaatcaagaagaacattcggcgttttttagaaaaagaggaatgaatcaaattgtagcttacgaaaattgggtgagccaaaatttcaataaaaaagaggttgctgtattaatgggggttttagagcatggcgcgactatcccgttgccagccggattcagtgaatcacagtgtaaatggatgttatcaattaatgaagacaatccagataatcaagcttgggatattgatgagaatgaagcccatgtgcattatcgttttcgctgctgggcaaatggtcgcaaagttgaggcactaacttatttaggtgggcacggcaaaacaccgggaagatggattcccggtcgtgcaaattatattgttattggagttaaataaatgtattacatcattaattcagaaaaccgcattgtcggtacaagcgattatgagttgaacctagatgatttacaaagtcgaggtgaatttgttatcgaacatgcaacaatggtaaacccctattttgacggcgaaaagctagttgaaaaaggggatgcaccaacggcaaaccatatctttgattataaaaaggcaaaatgggtatataacgctcagttcaatttaaacgctttttaactacggtttaaagagtgtttttttcattaaaacaatgaaagcttttaagtttatttacttcgcagtttttttgattgtgttttgcagtttttttggttcgcaacattggcttttattgcagcacaattccccgatacttttaaacagtttgtcccttggattccttatttattaggaattgtgatgttaggcatgggcttaacactaacctttaaagattttgcggaagttactgaaaatccgaaagtcgcgattttaggtatcattgcacaatttatggtgatgtcgagtcttgcatttgctttggcaaaagcattttaacttttgccggatttagcaatcggtgggattttggtcggctcttgccccggcggcacttcgtcaaatgtgatgacttacttagcaaaaggtaataccgcattgtctgtagcgtgtaccacggtttcgacattattagcaccattacttaccccggcggtattttatatttttgcaagcgaatggttagagattgatgcgagagcgatgtttgttctggtattaaaaatggtgttattgcctatttttattggcgtagtgattcgttcaatctttaagcaaaaaattgagcaatttagccaaactatgccgttgatttctgtattcgcaattgtgctgatagtgacggcagtcgtgtcggtaagtaaggagcgtattattgaatcaggcttattaattttcttagtggtggtattacacaacggtttaggctatttgattggatacttaatcggacgtgtatttaaattactgattgctgatagtaaaacaatagcgattgaggtaggaatgcaaaattcaggggtggggggctgcgcttgccgcattgcattttaaagccaatcctctgattgccgtaccaagcgctgtatttagcttttggcataatatttcaggctcaatattagcaatgatttttgccgcaatgaaaaatcagtcggatagcaaggaataggctagcgtttgagagaattgaaagtggtcgaaatttgtaaaaaagatgcaaatttcgaccgtttgtttttctagattagaatggacctcggctacgtggttgaaaaccgatttgttcgctatccgcacgctgagtggtaatcacctgttctccttcggctacaccagctgtaatttcagtatattgactatcggctaatcccaattcgactttcttttcaatcggctgattgttttctaaaacttgtataaaggtttcgttaccttttttctttaaagcggatgtcggcaccacaagcacattttcacgtttggcaatttctacttgtccttgcacggtcataccaatccgtaaacgttgctcagtattatccactaaagagttggcgtaataataaattgcctcggtattaccggctttttcggtatatttatttgaagcgctgtcatcactgagcgtagttaatgctggatcaacgctatcaattttactatggtatttatgattaggctcggcaagcgtcgtgaacgtcatatcttgcccttgtgccacttgagaaatatcaccctctgaaatctctaatttgattaacattttcgataaatcggcaacgtgtacaatggttggcgaggtttgtgccgaattcacggtttgtccgacagaaatcggaatggagacaatcgtaccgtccatcggtgagacgatttgggtgtaatttaaattggttttcgcatcagctaccgaaatttgtgctgatttgatttgcgatttcgcttcatccacacttgctttagcggtggctaaggtattttttgctgtttcaagatctgactgagaagcgcttgcttgtttatatagtttacttaaacgtgtgtaatttgattgtgcgacttccagcgccacttttgcagaagaaagtttagcttgataagaggcaagattcgcttctgccgtgcttaagctgttactttggttgctggaatcaatatctgcaatcaggtcaccttttttgacggtttggccaagtgtaacgtagagattaattattttccctgaaacctgtgcaccaacttccgtacgtttacttgcacgtacagaaccggtagcaagtacgcttttatctattgtgctacgcgtaacaggctcggtaatatagtgaacctgttgtgcctcatcgttactcgaaaaatagaagtaacttgctgtggtaatacccgcaagcactaatgcggtaatgataggttttagtttcatttgttttccaattttagtgggtaaagatcaataaataagcggtcgtttttgacctgttttttgcaaaataattccgaaacttgaccgcttacttgaaacttaaataataccaaaggtcgcacggatatagctagcgaccgcttcatgtttgtgattaccgatcacctcgttatgcggaagggcttgttttagccttgggtcggcattctccataatgcaacctttaccgacatgagcaagcatttctatatcgttcataccgtcaccgaatgctaagcaatcttgtaaggtatagccgcgtaatctgactaattcctcaagtgcattcgctttacaaacggatttatgcataatctctaagcataaaataccggagtaagtaatataaagttgatccccgaaatgttgtctaatataagcctcaatcggaatcagatcttcaggggttttgcctataaagaaaactttttccgtttgttttccgtgatgctggctgaaatcggcaacttgataggtaaaaccagaatctttgtgatattttttcaattgtttgatatcaatattgataaaccactcatcaccttgataggtattaaggcatacacgagttggatcaaaaggtatttgcattaattgaaaggcaagttcttcgggaatgtaatggtttaggacggtatcaccggaaaggaaattagctcttgcaccatttgaagtaattagcatcgcttcttttaaatcgactttattgataatgtgttttacgtctggcaaattacgtccggtcgccagaaaaatatcaacaccttgagcagcaagtttacttaatgtttcaatcgtaaaattgccaattttatgttctgcatttaataaggttccgtctaaatctgaaacgatggctttaaatggttgattcattgttatttcctcaaatattttttagacaattattctacaaaggctagcaaatttaagctttatcttcaaagaagatagtaattttacgttattttaaccaaaaatcgtttaaaaaatcacaaagcgaataaaaagtgtaaggttttgttatttctcaaaaggcattgcttttatttggggtaataatcttaatttgggattaattgctaattaatttattaaataaagaatttatcactgtttttatatttaaaattaccaggaaaacgtttgcgaggagtgaaaaattctattgacttcactctatttggggctaatatagctcttgtattttgaataactatgcaaacataaacacacacaacacaatggaaaaactactttctctccgacttcttttgttatcgcattctgtgcgaggataaaggttggttggacgaaaatagttcactatccacactttacccgcacatcgatgcgggtttttttattttttcttaactttttgaaagaaataataaaaaagaaaaacgagtgtttatcgtaggtattttacttattttaattaaatcggtgttttaacactaatggagaagcccatgagcaataacaacattattatttttgatacgacattacgtgatggtgaacaagcattaaaagcaagtttaaccgtaaaagagaaacttcaaattgctttagcgcttgagcgtttaggggttgatgtgatggaagtaggttttcccgtttcatctgcaggagatttcgaatcggtaaaaactattgctcagcatattaaaaacagtcgtgtttgtgcgttatctcgtgcggtagataaagatattgatgttgcagcggaagcgttaaaagttgcggaagcattccgtattcacacctttattgcaagctcagctattcacgtagaatctaaattaaaacgttcatttgatgatgtagttgaaatggcggtgcatgcagtaaaacgtgcaaaaagttataccgatgatgtggagttttcgtgtgaagatgcggggcgtactggtatcgacgatatttgtcgtattgttgaagcggcaattaatgcgggtgcaaccacagtaaatattccggatacggtcggttactgcttaccgacacaatacggcgatattattgccaatgtgatgaaccgcgtgccgaatattgataaagcagttgtttcggtgcattgtcataacgatttaggtatggcaacggctaattcattaagtgcagtattaaacggcgctcgccaaatcgagtgtacgattaatggcatcggtgaacgtgcaggtaatacagcattagaagaagtggtaatggcgatcaaaacccgtcaagatatgtttaacggcagagatactcgcattaacacgcaagaaattcatcgtgccagccaaatggtgagccagttatgtaatatgccgattcagccgaataaagcgattgtgggctcaaatgcgttcgcgcattcatccggtattcaccaagacggtatggtgaaaaacaaaaatacttatgaaattatgtcgcctgaaacaatcggcttgaagaaagaaaaattaaacttaaccgcccgctcaggccgtgcggcggtgaaaaatcatatgaccgagatgggataccaagaaagtgattatgatttagataaactctatgatgcattcttaaaattagccgataagaaaggtcaagtgtttgactacgatttagaagcgcttgcttttattgatatgcaggcaggtgatgaagacagattacatttggatgtgattacttcgcaaatggttagcgggttaccggcctcggcttttgttcaggttgagcttgatggtaaatgcgttagcgaggtgtcgaacggtggtaacggtccagtagatgctgtgtataatgcgattcttaaaattgtaggaatggatattaaaatgtcgcattataaccttaccgcaaaaggcgaaggggcagaggcgctaggacaagtagatattgtggttgagcatgaaggtcgtcgtttccacggtgttggtttagcaaccgatattgttgaatcatcggctcgtgctttaattcatgcgattaatgctatctatcgtgcgcataaagttgcggatttaaaagcaaataagtagaaaaaacatcagaaaatattaaaaaatagaaagaagcggtcagatagagtggtatttttgcgaaaatccagtaaaatctgaccacttcatttataggacaatgatctttttgttagcgaaaaattgaattttcttatacctgggtagtctagtaagcagcatatatttgcgtcaatactagcttcttatgttgtattcggattaaaatgatttgtaaattttttaattggcctattcttttaggaacttttacatggttttatatactaagtgatatacgatatgaaagtgactaaagaatatacgcgtaactaagttaggagaacgcagatagatgagtgagcaggtagccgatcaaattttggttgggcgtgcacagcaaggtgacaaaaaagcatttaatttactcgtcgtgcgttatcaaaatagagtagcgggtctattaactcgttatgtcgcacgcgatgatattccagatattgtgcaagaatcatttattaaagcttatcgttcattagagtcttttcgtggggaaagcgctttttatacgtggctttatcgtattgcagtaaatacagctaagaatcacttaacagccttaggaagacgtccacctaaagaagatattttggcagaagatgctgaaagttttgatgcaggtgtgcaacttcgtgaaggggatacaccggaaagtatggtgttatccgaagaattaaagcgtgttgtttttgacacaattgagagcttgcctgaagagcttaaaaccgcaattactttgcgtgagttagaagggttaagctatgaggaaattgcaaaagtgatgcaatgtccggtaggtacggttcgttcgcgtatctttagggcaagagaagccattgatgcaagaattaatcctcttatgcagcaaatttaagattcaatcggagtttattatgcaacaaagagaaaacctttcggcttttatggatggacatagtgttgatgaagaattcatcaatgaattatgtaaagatccagaactaaagcaaaaatgggctagctaccatgcaattagcagtgttatgcatggtgatgaaatcattctaggtgatgatttctctgcaaaaatggaagcattgcttgaaaatgaagagatggaatctttatcattaatggtagctagcgaacagcctcagccaaaaggtatgttactcaaactaaaacgttggggaacgcctcttatgcagataggtattgcagcatctgtatgcttagttgcagtgttgggtgtgaatatgatgggaacggataatgatattgcgcaagcggatcaaccggttctacagactcaaccatttagcgattcggttcagccggttagttataatgcacctgaaaaagatgcgcctacagtagctcagttagagcagcaacagaataaaattaattcattattgcactctaacaaattacagtatcgttcaaagccggaagatcaaaaagagaaagcacaaacttcttcggtagatccagctgaaaatagtgaaatgcaaaagacaaattaagtttgagaacttatcatttccattttattattgagcaggttaaattattagcctaataatttaagcggtaagattgtagcgaattttttgcaaaaatttgctacaatcttaccgcttttttattacctattcagacctccgtcctctagccgatgagaatcaaacgaaatgttatctttttattcttcaaattaaggcggttagtgagtacataatgcgggagaacaaaataatgatggttgaaattgcgacagtgattagttatcggaatggcttagcaaccgtacaatgtagcgctaaaagtgcgtgcggtggttgtgtggcaaaagaaagttgcggaacagaatccttatctgctttagctggcgaaaaatttacaccgcaatttga

SEQ ID NO: 2580 - DNA, 17152 bp, synthetic construct
  source 1..17152: mol_type = other DNA
  misc_feature 1..17152: note = Synthetic
ttcactacaaccgtataaaccttacctccacgtttaaggataccgaaaaccaccactttacctgctgctcccctaccgcgctttcctttacgcttaccgccgaaatagctctcatccaattctatagtgccctcaaaaacctgatctgcttccaaagccaaatgatggctgataacaagacggattttacggtagaagagaatagccgtattgggctgaatacccaagatatcggcagcagaacgtgcggttacttccaatacaaaatattcaagcagttttctttgcagactcttctttaacttacagtgggttatcttcattttggcagcctatcatgactgctaatctacgtcagcccctattttttttttttctctcatcaaactgcttctcacatcaggcgggaaacagcagcaactgttatatagtcaatccacttatcgggtttgacttgagcatcttgagtttcagcaagtttgggagatactcgggtcaagcccgagtatgacgtatgtcctatttttaagtggattgactatacccgccctgctcccaaccgccgcccaaagccttatataaaccgatgagcatccgtgcgcgcgccagttgcgattgaatcaggttttcctgcatcgcttcttcgttcaggcgtgcggtgagggcgttatcgagcgttttatgaccgtattgaaacagtttttccgcatcgcccgcctgttttgccgcctgtttgtgtgcggtaatcagcaaagcgttttggcgggtgagtgcgctgtgtgcctgatatgcgctgtccacttcgccgagggctttgaggatgttttggtcgtattgcaataaggccgtctgaagccgtgcatcggcggcggcgatattggctttgatgcgcccgttggtgaaaatcggcactttgatgcctgctttgattaagctgccccagccttttaaaccgctgtcgctgtcgatgctgatggtgcctctgcccaaaaactcgatggaaaaccgcggcaataaatcggctttggcgctggcgagcttggcggcgtaggcgttcacttgcgcggcatgggcgcggatgtcggggcggcgctcaagcagcccttgcggggtttggccgctcggtgcggcgggttgcgtgcttaagatgttgacgctgctttcgggcagggaaaatgtttgcggggtttggccggtaagcacggcgatgctgcgcacatgggcggcgtattccgattcgatggtgctgtgtttggcgcgtaaagcagtgagttgggtagccacttcgtccacttcataagcggtaacgtggcctgctttgaaacggccttgcacatattttgccagccgctccatggtggcgatactgcggtttaccgatttcagacgcgcttgggtggcgcgggcttgcagataatactcggcaatttcgccgccgatcagcacttgcgtgccgtacacttcttcctgcctgccgagtgcggcataagcggcggcatcggcatcgctgcgtttctgcccgaaaatatccggctcccacgatgcggaaaaaccgcccgtaagactgttgcctttcaacgtgaaatgctcgcccgccaaatcggcagcctgcggaatcctgcccaacaaggcgcgctcttcgtcgctcagcgggttgctgatgcgggcgttgagacgcgatgcttccgcgcccgcgccgaccgtcgggcctttgtcggcatcggccaagcgctcaatggcgcgcgcttcgttcaaacggctgcgggcgatttggatatcgtggttttgctgcaaaccttgttcgattaagcggctgagtacggggtcgttccaatgctgccaccaacggccgatttccgcgctaccgcgcgccgcttccgcttggctaaaggcttgcggaatgtcgattttgctgtcgagcggcacaacggtgcttttgcaggcggcgagcatcaaagccgatgccacactgacgtaaaaatgtttcaagctgatattcataaaggctttctttaaaggtttcggcaggcatgctatattgaggccgtctgaaaaaccggctgcctgcgtgtttccatccaatcttcattgaaagaatatttcaatcaatcgtttagtgatattgatataaaacaaatatcatcagcttaccgcttcttcacagaaactaaataacggcttttgccgtcttgttgagcagacggctgcattttgcatgttgccgctttcgcgctgttttacgtctaacctactcaaggaaaggaagaaaacatggcccgcacactctgctcttctgaggtcaaccgtaaagtgattctgtggactaccctcatcggcggttttttcagctcgctggtgaaatggggttccgaagtgaatatgccgccgcgtatgccgggagaaatttctccaccgggtgccaatatcgacgcatggctgggttggctcggcttcaaccagcactctcttgattatatgtatcaaggcaacagcgtgttgggtgcggtaacgctttaccactggctgtttagttttgtgtttgcttttgtgtatgtgtgggtttcggcttattggccgaaaatccgcctgtggtatggcgcgttttacggcatcatcattaccgttgtcatgcactggctgctgattcccatgttcggtttccgtaatcccgcctatgccgacggcgcaacgggttgggcgtggaacctcaatgcggcggaacacatcagcgaaattctcggccatgtgtattggtcggtgtctatcgaagtgtgcatgattgccgtgctcgcttattatgcacgcccgattaaaggcgattgggttgaacgctgattcacctgtttcaaatgatcaggcagatattccaatctgcctgattttttgtttgagatgattttcataagttatgttcagacggcatcttagcccacagcttgcgcaaaaaagattttatggttgtcggggtcggtaatgccgcaagtcagcaccacttcccaatcgttaatgtctccggcttcaataccggctccaagcaacgctttgcggcaggcggcgatatcgtccacgccgataatcacttctgccgcagcaatcgcaccggagtctgttagctgcagccacgcattatcggcaatacgccattccgccatattttccatcggcaccacatccggctcgcccaaccatgtttgataccaccccaatgaggtttgaaagtcagatgcgttgattacggaaaccaaactgctggttttgaaaagtttcatgctttgttcctgtgttgtagaaaattgcgattatttttcagacaggcattgagccttcccgttccaacaatgtgttttactccgtcaaactgccatattaagcttcacagtttggtattttggacttagagcgtttagttatataagaatgccgtaccttgaatgtaagttgattattttcagacggcctgcttcattgtatggtagttcagcttaaaattaaaaatagtatatacaccatgctcggattaagtctggatataaagatgctgttactacgtcaattagtttaactataaataagctttaaatattaattttgggattattaagatcataaaaagacgatacccctgtttaagcagacttaaacaggggctcaactcatttctgaatctttacgtcgcggcacgtcttttcagacggccttattgtagcaacggctctcatctcgtagtgcaacaatgaagctgattctaagtgatgatgaaaacacttgtcaaatatttctttatttactataaataagcgtatgtattttttgtaaatcaagatgaaacgggggaagcaatgaaacaacagccgcaacgctatattttaggtttggatttgggtattgcttcagttggctggggtttgattttggtagatgaggaagaaaatcccatcggtctgctggattgtggggtgcgcacgtttgaacgggcagaagtgccgaaaactggcgattctttagctttggcccgtcggcaagcacgcagtgtgcgccgcctaatccgccgtcgcgcccaccgtttgttgcgtttacgccgcctgctaaaacgcgaaggggttttgagtgctgccgacttcaattcagacggcctgcccaatctgccaatccatacttggcaattgcgtgtagcgggtttggatagaaagctcacaaatcacgagtgggcggcggtattgctgcatttggtcaaacaccgcggttatctgtcgcaacgaaaaagcgaaacccaaacggaaaataaggaattaggacgtcttcttgccggtgtggccgaaaacagcaaattattatcagagagtgccaatcaataccgcacacctgccgaattggcggttaaattatttgcagaacaatcggggcatttacgcaataaaggcggcgattacacccacactttcaaccgcttggatttacagaaagagctgcatttactgtttgagcaacaacgtacattcggaaatccgtttgcttcggcagagttgcaaagcaaggttgatggattactaatgattcagcgcagtgccttgcagggcgaagccgtgttgaaaatgctgggaaaatgcacgtttgagccttccgaatacaaggcggcgaagcatacttattctgccgaaagattcatctggctgaccaaactcaataatctgcgtatcttagaaaacggcacagaacgcgctttaaacgaagccgaacgtaaattattgttggacgagccgtataaaaaagccaagctgacctattcgcaagcgcgcaaattgcttgatatacctcacgatgccacattcaaaggattgcgttacggcaaagattcagacggcctcaaagcggaaaccggcgcgttaatggaaatgaaagcctatcataaaatccgcacggtattggacaaagccggtttaaaaggcgaatgggaaaaccgtatccgcaaccccgaagtactggataaaatcggcacggcattttcactatacaaaaccgacgaagatatccaagcagccttggccgatttaaagctacctgaaaacgtgttggacgcgctgctggcaggtttgaacttcgataagttcatccaactttcgctgaaaactttaggcaatattctgcctttgatggaacgcggcatacgctatgacgaagcctgcaaagaagtttacggcgatcaccgcgccttggcagaatcgaaaaaccaaatgctgctgccacccattcctgccaacgaaatccgcaatcctgtcgtgttacgtacactcacaatcgaaaaaccaaatgctgctgccacccattcctgccaacgaaatccgcaatcctgtcgtgttacgtacactcacacaagcacgcaaagtgattaacgcgattatccgccgctacggctctcctcagcgggtgcatatcgaaaccgcacgcgagttgggcaaagcgtttaaagatcgaaaagaaatcgaaaaacgtcaggaagaaaaccgcaaagaacgcgaacgtgcggcggaacattttaaagaattgttcccacattttgccggggaacccaaaggcggcgatattctgaaactgcgcctgtatgaacagcaacaaggtaaatgcctctattccggcataccgatagacttaggccgtctgaacgaaaaaggctatgtagaaatcgaccacgccctgcctttctctcgcacctgggatgacagctttaacaacaaagtgctggtactgggcagcgaaaatcaaaaaaaacgtaaccaaacaccttacgaatatcttgacggagcgagcaacagccaacgctggcgcgaatttcaggcgcggctacaaggctgtcgttttccctatgcgaaaaaacagcgtattcagacggccaggttggatggcaaaaccaaacagggctttttggaacgcaacctgaacgatacccgttatattgcccgctttttatgcgtctttattgaagaaaacctgcatctgcaaggcgccggcaaacggcgcgtgtttgcatcgaacggccaaatcaccgccttgctgcgcggtttatggggcttgaaaaaggtacgggaagacaacgaccgccatcatgcgctcgatgccatcgtagtcgcctgctccaccgtttccatgcagcagaaaatcaccaaagccatgcagcggcgtgaaactttggaaactgtggacaccgaaaccggcgaaatcaaaacccgtattccgcagccgtgggatttcttccgccaagaagtgatgatacgggtattcagcgactctccgcatgaagagctggcagagaaattaagtggccggcctgaagcattgcatgattttgtatcccctttatttgtttcacgcgcccccaaccgcaagatgacgggacaagggcatcttgaaaccgtcaaatccgccaaacgcctgtctgaaaacatcagcgtggtgagaaagccgttgacagcgttaaaattgaaggacattgaaaacatcgtcggctatcccgaccgcgagcctgctttatatcaagctttgcgggaacggttacaggcgtataaagacgatccggttaaagcgtttgccgagccgttttacaagcctgcaaaaaatggcgggcaagggtcattagtaaaagccgttcgggtgaaagatgtacagaaaaccggcgtaatggtaagaaaagatcgtggcggtatagcacgcggcattgccgataatgccaccatggtgcgtgtagatgtattcggtaaaaaaggtaaaaattatctagtaccggtttatgcttggcaggtagcaaaaggtattttaccgaatcgggccgtagtagcttatgctgacgaagcagattgggatgaaatggatgacagctatgagtttaaatttacgctatacccaaacgatttagtggagatcatttccaagaaaggacggattttcggttattactctggtttaaaccgtgcaacaggtgccattgatattaaagagcacgatttatctaaggagaaagccaaaaatggtatacatcaaagtgtcggtgtaaaaaccgtcttatcttttcaaaaataccaagtcgatcctttgggtaaagaaatctgcctttgcaaggtagaaaaacatcctgaactaaacagtaaaaagaaaaaataatgttcaacggctgcgcatcaaatgcgcagccgttttgttgtgtaacctatttaacagactgcttacggagaaaaccaaatgacttggcgcagtattctaatcagccgccccgcacgcctgtcgctacaacaaaaccacttgctgattcaacaagacgaagccatacctataccgctggaagacatcgccgtgattgtggttgaagcaagggaggtgatactgaccgcacctctgctatcggctttggcacaatacggtatcaccctgcttacctgcgatgagcagttcttaccctgtggtcaatggttgccgtttgcacaataccaccgcagcctgaaagtactcaaacaacaaatcaacatgacggaaccacaaaaaaagcagttgtggcaacaaattgtgaaacaaaaaatccgcaatcaggcttggcttttggattacagcggccacgatatcgccgcaagccgtctgaacgctttggccgacagcgtaaaatcgggcgacaaaaactttgccgaaagccaagccgccgctttgcatttccgcgtactgttcggcgaacagtttacccgcagttatgaaaacagcgtgaatgcccatttgaattacggttacagcattttgcgctcagccattgcccgcgcccttgtacaatacggctttctacctgctctcggactgcaccaccgcagcgaactcaatcctttcaacttggccgacgaccttatcgaaccataccgccccattgccgatttatgggtttacgacaaaatgctttcaaacagtctaccagatgagctgacacccgcaagcaaacaacaattaatctctttgttatgctgccaagcagctttagacggatacaaatatagtgtattggctgccatagaccgcaccatccaatcttttcagacggccgtcagccaaaacaagcccaaactgttaaagctaccgcaaatgctgcgcttaaaggtacatgattatgagtgaggctaaatttatgcgcttaattgttttctttgatttgcctgtaaccactgccgccaaaagaaaagcagctagccaatttcgtaaatttttgcagaaagacggctatcacatgctgcaattatcagtttattcacgcattgtaaaaggaagggacgcgttgcagaaacaccacaaaagattgatgctgcatttaccggaagaaggccaagtacgctatttggaagtaacagaaaagcaatacgcaagtatggtcatgcttattggagaacccaaaccccgcgaaaaaaaggtcaatgccgaccaacttttgcttttttgaagccgttttttttaatcaaaataaaacaggtaagccttattttataaggcttacctgtttaagtattgtagcactacgagatgagagaggaagctacaactccaaaccccgttgcctttatggtcggtaaaattgtagcactacgagatgagagaggaagctacaactgttgccgcgcaattaaatagcgcaattcaattgtagcactacgagatgagagaggaagctacaacagtcgaaacttcctgaagctaactatgcctattgtagcactacgagatgagagaggaagctacaacagaaaaaaggatgcaatcatggtaagcccgattgtagcactacgagatgagagaggaagctacaacagccaaacaagacaaaaaggaagcagaagaattgtagcactacgagatgagagaggaagctacaacgtgtgtttaactttgacgcacaaacttgcaattgtagcactacgagatgagagaggaagctacaacgtgtgtttaactttgacgcacaaacttgcaattgtagcactacgagatgagagaggaagctacaaccagtatgaacaggcttgaagtaagcatgaaattgtagcactacgagatgagagaggaagctacaacctgtctacagtctctataggtagggggaaaattgtagcactacgagatgagagaggaagctacaacctacaacttttgctagacatgtacttcaaaattgtagcactacgagatgagagaggaagctacaacgagcatgtctgctgtagaaagtctaccactattgtagcactacgagatgagagaggaagctacaacctgcctgttgttggtctcggtctcgctggaattgtagcactacgagatgagagaggaagctacaaccgacgattaccacctgatttggcctgaactattgtagcactacgagatgagagaggaagctacaaccggttgaagtaagcgaggaatcggttaaccattgtagcactacgagatgagagaggaagctccccccctgctgcacctgcttcagctccataaaaaacgcagcgtttgcagcaaaggcgcgaacatttgatgctaaaggccgtctgaaaaagcgggtaactgatttttcagacggcctgaaacctttgtacaatctcaagaaaaaatctgagacgcttgcagacccaagttttgcaagggttctataatcaatctacccaattttaataacacaatcgtagaggcagagtacatgtccgcccgcaacggtttgacggggaaggacagtatctacgattttgttactaaacttaagttgattaactgtatatcgtgaatcaactttaggcttgacctgattatataaaccgtatgattattaactggttagccatattttgaccccttgaccgatgttcgcgaaagtatcaggccgtctgaatacccaaaggcaaaaccgatgaggattctgaaaaacattttttatctcgcttggaaagaattgcgcagcctcttttcagaccctgtgttgatgatattgattgtgtttatgtttacggtaacggtttattcggctgccgaagtgaaccaagacgtgcataacgcaccggtggcagtgattgatcacgatcgttccgcgttgtctttccggctgcgcgacgcggtgcgcccgccgcatttccggccgcccgaagaagtgtcgccgcagcaggcagacgaggcaatggataagggagaatacatttttgcatttgaaattccgcccgggttcgaacgcgatgtgctgatgggcagaagcccgcagattcaactcttggttgacgcaacggcaatgtcgcaggcgggtttgggtgcaaactatctgatgcagatatttacgcgcgaaaccgccgtctttctcaaccggcctgccgccgaaacgctgttgccggtcaaacccgtgatcagaatgcatttcaatgccaatgccgaaggcgtgtattacggcccgccgatggaaatgggcaatatggtgctggtgttggccttgatattggtgggtgcggcggttatcagagagcgcgaacacggcacaatcgaacaccttttggtaatgccggtaggcgcggcggaaatcatgttggcaaaagtaacagccaacagtttggtgattttgattgcctcaatgctgtcgatgtggtttgtagtgaaacaaagcctcggtattccgattaacggctcactggctttatacgctttgggcatctgcatctatcttttttcgctttccgctttggccatcatgctggcaaccatcgccccgagcatggcgcaattcggattgctgatgattccgctgtatatggtgctgctgctgttttccggcatggcctctccgcgcaacaatatgcccgaagcggcacaatggatcagcgaatattggccgagcacccaatttgtgcagttttcccaaaacgtgctgttccgcgatgcgggtttgagtatcgtatggccgcagcttacggcgatgacgctcaccggagtgctgtttttgacctttgctttggtacgcttcagaaagatgcttgagcagcagggataaggctttcagacggctgtcagaaaatcttagctactccgtttgaccctgttgggacacatttttagcagcaagtattgtgcaaactgcaaaccattccttacgcagaaacccgaagctacaaacaataggtggggcgcatcggcaaactgcaggctgtgcgtgccgtagctgccgccaacgggcagatcaagatttccatcctgataatgtgccaccgcgtgatcggctgcaacggcgatttaaccgactacggtggcgaccttgtatgaaagaaagcattgaaagtttttggaatcaggcgaaacgtgtcttgcgcaaatacaacgaaatcgaccggaaatcttttcctctgtttttgaaagaaaaagcagcagttaaaaattctgcggctttggtgtggtatttagggttactctacttcagccccaagaaatatccagttcagccgacgggcggcatatcttaaggccgttacttcaaccactccagccaacccaaggtattggcaaagaccagcagaatcgctacgggcgcggcataacgcaaagtttgataccaaaccgctgcgatttttgcatgaagcgtgctgccttgccgcatgtgtgccaacaccttgcttttgggcagtatccaagccacaaataaagccgtcatcaaagcgcctaccggcataatccaagaagtaatcagataatcccataaatcaaatacggttttgccgaataaggtaaattcagacatcgcaccgaaagaaagcgccgaaggaatgcccaccagtaaaatcgccaaaccggtcagccaagtaacgcggcggcggcgttgctcattgttgtggatagcggcggcaatcaccgtttccagcatcgcaaatgccgacgtaagcgtggcaaacgttaccagcaacataaacacggcaaaaagcaccgttccgaaagggattttctgaaacaccgcaggcaacaccgcaaaaatcaagcccggcccttctcccggctcgaaccccaatgcaaaaacggcaggaaaaatcaccaaacccgccaacaacgacaccaacatattcaaccacataatgctgttggctgaacggaacaaatcctgtttgtcatccagataggccgcataagtgatcatggcggaaacccccaaactcaacgagaaaaacgcctgccccaatgcagtaagcaccgtgtcggccgttactgccgagaaatcgggtttcagtaaaaaagacacgccttccatcgctcccggcagcaacagcgaacggacggccaacaacagaaagacaataaacaaagcaggcatcagataacggctggccttttcgatgccttgagaaataccattttgaaccaccaaaatcgtgagcagcataaacaggctctgatagccgacagcggaagccggattgctgatggtttcgccgaagagctgtttaaaatcggtttccggagcaatcgcacccgtgaatgcgtgtacaacataagccaacacccatccgcccactacgctgtaaaacgataataagataaaacacgccgccacacccatacggcctacccacggccatgaggacttcggagccaatgccttaaaagcatcgacggcattgcgctgggtttgcctgccgatataaaactcggccagtagcacgggcaacccgatcaacaccgtaaaaaacaaaaacagcagaaaaaataccgcaccgccgttggtgcccgccgtataggggaatttccaaatcgcccccaagccgatggcagaacctgccgcagataaaatgaaacctattttggatgtccaatgggagctgatcgacatagaaattctcgtttgtgtttaggtaaagataaaagataaaacaggtatttatttctgctgcccctcgacattcagacggcctctgttgaaacacctcttcttactgtcatcgttcgcacgcagatgccgaatttggccgaaaacaccgccatacggccgattgtcggcagactctcaaataacctgataaaaaatagcgagataataccaaaaatagccgcatcgggcacaactgtctttatctgaaaacacatcacgcagcccgaatgccttcagacggcctcaaaccttttccgccaatccaacggcaaccaagcgcgatgctgcataaccataacaataaaacaggctttgacgaaaccgccaaagccttgttccgcaaccggcatcacaccggcggttataaacccaactctttcaaaaagcgcacatcgtccgcccaaccggatttcaccttcacccacactttcaaaaacactttggtatcaaacagtttttccatatccaaacgcgcttcggtggaaattttcttcaatttctcgccgcctttgccgatcacaatcggtttttggttttctttatccaccaacacggcgatataaatgtggtacatgccgttttcttcgttaaactgctccacttccacattcatggcatagggcagttcttcgcccaaatagcggaacagtttttcgcgcacgatttccatcgccaaaaaacggctcgatttgtccgttaccatatcttcggggtacaacggaatactttccggcagataaggtttgagcgtttccagcagatgcgcaatccgcaaaccgtgcttagcgctgactacttcatggccggcaaattcaaattcggcactcacggtatcgataaatgcctgcaatgccagcttgtctttggctttgtctttatcgattttattgaccaccagcaataccggcgtatgcttgggcaattgtttcatcaccgtgcggtcggcttcggtaaagcgcatcgcttccaccacaaacacaatcacatccacgccgctcatggcttcggttacgttcagattcaaacggtcgttcaaagcgttgcggtggtcggtttggaagccgggcgtatccacaaacactaattgcgcggtgtcatcggtatgaataccggttactttatgccgagtggtttgcgcctttttgctggtaatgctgattttctgcccgatcaaatggttcatcagcgtcgatttgcccacgttcgggcggccgacaatcgccacaaaaccgcagcggtagccgtcggcattggggagcatatcgttggtattttccatattcatttcattctttccatcggttacggttcagacggccgtctgaacacatcgggtcggcttatttttttctgcttttaaggatatgcttttgcggatggtttgcctccagccaagcataggcttctttggccgcttcctgctccgccgcgcggcggcttgatgctttggcgcggctgataaaacccaactcgcccaaatcgcaggcaatgctgaattcggcatcgcaaccctcgccctgctggtgctcgatgcggtatttgggcaaaggccaacgccttgcctgcaacgattcctgcaacaaggttttggcatctttatcttcacggttcagatcggcttttttcacacgctcggcaaacagatggcgcacggtgttttcggcggtggaaaaatcggcgtcgaagctcaccgccgcaaacatggcttccatcgcgtcggccagaatagaaggccgtctgaaaccgccgcttttcagttctccctgccccagaaacagagcatcgcccagattcaaatcggcagcgatttcggcaagcgtatcttgattgaccagattcgcgcgcatacgcgaaaggcggccttccggcaaatcgggaaaagtgtcgaacaacattttggccacggtgtagttgaggatcgaatcgcccacaaactcaaagcgttcgttgttgcgtcccgaaaaactgcggtgggtaagcgactgctccaacagctgtggctgtttgaaggtgtagccgatacgccgctggatctgctccaaagcgtgttgccggacaggattgtgtttcatctgcatactttcatcggcagcccgaatgcttttcgacacttcaaccgtaaccggaacggcatgcgccggtaaaatgctgaaaaggtttaaggctgtatcatcattaaaaaaattaagttggcggcaccggaaaacggctgccgcgaaaatcaggccgtctgaaaatatttcagacggcctgtattgtatcctatttctacgctctaccgtttacttgcccaacgcagacaacacctctgcttttaccgcttcaaccggctgcgtaccgtccaccttgatatatttcggtgcgtgttcgcccgtgagcttaccgtaaaagtcgatcagcaccgccgtttggtcgtgatacacctcaaggcgttttttcaccgtttcttctttatcgtcgtcgcgctggatcaaatcttcgccggtaacgtcgtctttaccctccactttcggcggattgtaagacacatggtaagtacggcccgaagccaaatgcacgcggcggccgctcatgcggtcgacaatcaccgaatccggcacgtcgatttccaccacggcgtccaaatccacacccgcttcaatcatggcttcggcctgtgccagcgtgcgcggaaagccgtcgaacaagaaaccgtttttgcagtcatcctgtgcgatgcgctctttaaccatgccgatgatgatgtcgtcacgcaccaaaccgccctcatcgatgatttttttcgcttccaagcccaacggcgtgccggccttaatcgccgcacgcaacatgtcgccggtagagatctgcggaatgccgaaagctgccgtgataaattgagcctgtgtgcctttacccgcacccggtgcgccgagcagtaatactttcattggtgtgttccttaaaaatgttgacaatcatgatcaagatattgcggggcttatcttaatatggttaagctttcatgaaaaggccgtctgaaagcaaagcgaaaactttttctgaacaccgcgatttatgcgataatctgcgccgaaatccttaccaccctgccacacggaaacatcatgtcagacgaaaaaagcaaagcgttagccgccgcgctcgcgcaaatcgaaaaaaacttcggcaaaggctccatcatgaagatggacggcagccataaagacgaaaatttagaagtcatttccaccggctcgctcggtttggacttggcactcggcgtaggcggcctgccgcgcggccgtatcgtcgaaatcttcggccccgaatcatccggtaaaaccaccttgtgcttggaagccatcgcccaatgccagaaaaacggcggcacctgcgcctttatcgatgccgaaaacgctttcgaccccatctacgcccgcaaactcggcgtgaaagtggaagatctgctcgtttcccaacccgacaccggcgagcaggcgcttgaaatctgcgacatgctggtacgctccggcggggtggatatggtcgtggtcgattccgtagccgcgctcgtgcccaaagccgaaatcgaaggcgaaatgggcgacagccacgtcggcctgcaagcccgcctgatgagccaagccttgcgcaaactcaccggccacatcaaaaaaaccaacaccttagtcgtattcatcaaccaaatccgcatgaaaatcggcgtgatgttcggcagtcccgaaaccaccaccggcggtaacgcgctgaaattctacgcctcggtgcgcctcgacatccgccgcaccggttccatcaaaaaaggcgacgacgttttgggtaacgaaaccaaagtcaaagtgatcaaaaacaaagtcgccccgcccttccgccaagccgaattcgacattctctacggcgaaggcatcagctgggaaggcgaattggttgatttgggcgtgaaatacgacatcgttgaaaaatcaggcgcatggtacagctacaacggtgccaaaatcggccaaggcaaagacaacgtgcgagtatggctgaaagaaaaccccgaagtggccaacgaaatcgacgccaaaatccgtgccaaagtgggcgtaaacgttcaaattaccgaaggcacattggatgataccgacggcgagcagccggaagagtaatttggttgaagagtaatttgatttaagtaaataaacatgccgtctgaaaaatatttcagacggcatgtttatatatcaaatattgttatctgtgtta

SEQ ID NO: 2581 - DNA, 6670 bp, synthetic construct
  source 1..6670: mol_type = other DNA
  misc_feature 1..6670: note = Synthetic
gcctgcaacttgccctgtttgaaggttgcgccgagggcaaactgtggaacccgactttcatcatcgactaccctgtcgaagtgtcgccattggcacgcgcatccgacagcaaaccgggcttgaccgaacgcttcgagcttttcgttgtcggccgcgaactggcaaacggctactctgagttgaacgatccggaagaccaagccgaacgcttcaaagcgcaagtggcgcaaaaagacgccggcgacgatgaagccatgcactacgatgccgactacatccgcgccatggaattcggcctgccgccgaccggcggctgcggcatcggcatcgaccgcttggtcatgttgctgaccgattcgcaaaccatccgcgacgtgattctgttcccgcaaatgcgtcccgaataacgcattgaaataaaatcaaggccgtctgaaaacaagactctgttttcagacggcctttttgttcaaatatgtaaaacggaagagtttaaatcgataaatcctttacaccataataataaaattacatgataatcaaaaagataatataaaaaagaatatgtaaacgtttttcagtttgttgacagtctgctagaatacatccagttacagacagcctccacacacaggccgtctgaaaatgcagaaactctgaaaggtttgtatggatcaatttttcgaacagcttcacggctgggtaaacgccatcaacgacccaatgtggtcggggttggtatatatgcttttaggcgcaggcctctttttcaccgttaccaccggttttgtacaattccgcctcttcggccgcagtatcaaagaaatgttgggtggccgcaaacaaggtgatgatccgcacggaatcacaccgttccaagcattcgttaccggcttggccagccgcgtaggcgtgggtaacatcgccggcgtagcgattgccatcaaattcggcggaccgggcgcggtgttctggatgtgggtaaccgccttaatcggcatgagttcggcgtttgtcgaatcttcactggcccaactctttaaagtccgggactacgacaaccaccacttccgcggcggccctgcctactacataactcaaggcctgggacaaaaatggctgggcgttttgttcgccctgagcctgattttctgtttcggctttgtatttgaagctgtacagaccaataccatcgccgataccaccaaagcggcatggggctgggatcaacactatgtcggtgtcgccctggtcattctgactgccccgattatcttcggcggtatccgccgcgtatccaaagccgcggaaatcatcgttccgctgatggcagttttatatctcgtcatagcactcttcatcattgctaccaatatttccctgattcctgacgtgttcggtcagattttctccaacgcgttcaacttcgattcggctgcaggcggtttcctcggcggtctgatttcgaccaccatgatgcagggtatcaaacgcggcctgtattccaatgaggcgggtatgggttccgcgccaaacgccgcagccgcagccgaagtgaaacaccccgtctcccaaggcatgattcaaatgctgggcgttttcgtcgataccatcatcgtctgctcatgcaccgcctttatcgtcttgacctatcaacagccttacggcgacctgagcggtgcggcgctgacccaagcggcaatcgtcagccaggtaggcgaatggggcgcgggcttccttgccgtcatcctgtttatgtttgccttttcaaccgttatcggtaactatgcctatgccgagtccaacgtccaattcatcaagagccattggctggttaccgccgttttccgtatgctggttttggcatgggtctacttcggcgcagttgccaacgtacccttggtatgggatatggcagacatggcaatgggcatcatggcatggattaacctcgtcgccatcctgctcctgtccccacttgccttcctgctgttgaaagactacacagccaagctgaaaatgggcaaagccccagagttcaaactctccgaacacccgggcttgaaacgcaaaatcaaatccgatatctggtaaaaccaaaggccgtctgaaatttcagacggcctttttaatccctgccatttagacaaaacgatgccccttaaagcagaagccttaaggggcagagcgttgcggcacatcttttcagacggccttaaaaaaggtattgaaaccctgctgatgacgcaacgcctgatgctattcaaaaaatgttggggcattgcacctttgaaccgacagaaccgaaagccaccaaagacacctacacagccgaacgttttatctggctgaccaagctgaacaacctgtgtattttagagcaaggcagcgagcggccattgatcgataccgaacgtgccatacttataaatcagccgtatacttacgcacaagcccgtaagctgctgggtttagaagataccgcctttttcaaaggtttgcgttacggcaaaggcaatgccgaagcctcaacattgatggaaatgaaggcctaccatgccatcagccgtgcgctggaaaaagaaggattgaaagacaaaaaatccccattaaacctttctcccgaattacaagatgaaatcggcacggcattctccctgttcaaaaccgatgaagacattacaggccgtctgaaagaccgtgtacagcccgaaatcttagaagcgctgttgaaacacattagcttcgataagttcgttcaaatttccttgaaagccttgcgccgaatggtacctctaatggagcaagacaaacgttacgatgaagcctgcgccaaaatctacggagaccattacggcaagaaaaatacggaagaaaagatttatctgctaccgattcccgccgatgaaatccgcaaccccgtcgtcttgcgcgccttatctcaagccagaaaagtcattaacgccgttgtacgccgttacggctcccctgcgcgtatccatattgaaacggcaagggaagtaggcaaatcgtttaaagatcgcaaagaaatcgaaaaacgccaagaagaaaaccgtaaagaccgggaaaaagccgccgctaaattccgagagtatttccccaattttgtcggcgaacccaaatccaaagatattctgaaactgcgcctgtacgagcaacaacacggcaaatgcctgtattcgggcaaagaaattgacttaggccgtctgaacgaaaaaggctatgtcgaaatcgaccatgctctaccgttctcgcgcacatgggacgacagtttcaacaataaagtgctggtattgggcagcgaaaaccaaaacaaaggcaatcaaaccccttacgaatacttcaacggcaaagacaacagccgcgaatggcaggaatttaaagcgcgtgttgaaaccagccgtttcccgcgcagtaaaaaacaacggattctgctgcaaaaatttgacgaagacggcttcaaagaacgcaatctgaacgatacacgctacgtcaaccgtttcctgtgccaatttattgccgaccatatgctgctgacaggtaaagggaaaagacgtgtctttgcctcaaacggacaaattaccaatctgttgcgcggcttttggggattgcgcaaagtgcgtgcggaaaacgaccgccatcatgctttggacgccgtcgtcgttgcctgctcgaccgttgccatgcagcagaaaattacccgttttgtacgctataaagagatgaacgcgtttgacggaaaaaccatggataaagaaacaggagaagtgctgcatcaaaaaacacacttcccgcagccttgggaatttttcgcataagaagtcatgattcgcgtcttcggcaaaccggacggcaaacccgaatttgaagaagcggatacccccgaaaaactgcgcgcattgcttgccgaaaaattatcgtctcgtcccgaagccgtgcaccaatacgttacgccactgtttgtttcacgcgcgcccaatcggaagatgagcgggcaagcccacatggagactgttaaatctgccaaacgactggacgaaggcattagcgtgttgcgcgtaccgctgacacagttaaaactgaaagacttggaaaaaatggtcaatcgggagcgtgaacctaaactatacgaagaactgaaagcacgtttggaagcacataaagacgatcctgccaaagcctttgccgagccgttttacaaatacgataaagcaggcaaccgcacccaacaggtaaaagccgtacgcgtagagcaagtacagaaaaccgacgtatgggtgcgcaaccataacggcattgccgacaacgcaaccatggtgcgcgtagatgtatttgagaaaggcggcaagtattatctggtcccgatttacagttggcaggtagcgaaagggattttgccggacagggctgttgtacaaggaaaagatgaagaagattggacggtaatggatgatagttttaagtttaagtttgtactttatgcgaatgatctgattaagctaactgctaagaaaaatgaatttttaggctatttcatcagcctaaatagagccacaggagcaattgatattcgtacacatgatacggatagcaccaaagggaaaaacggcattttccaaagtgttggtgtcaaaaccgccctttcattccaaaaataccaaattgacgaactgggtaaagaaatcagaccatgccgtctgaaaaaacgcccgcctgtccgttaaattaatctatccctgtttcagacggcctgaagcagggattttttatatacaaataaggggaaaaacatgacttggcgcagcctgcttattcaaaacggcggcaaactatccttgcaacgccggcaactgctgattcaacaaaacggcgagtcccataccataccattagaagacatcgccgttatcatcatcgaaaaccgcgaaaccctgattactgccccgctcctatcagccttagccgaatatggcgcaaccttactgacatgtgacgaacagttcctgccctgcggacaatggctgccttatgcccaatatcaccgccaacttaaaatcctcaagctgcagctgaatataagcgaacccttaaaaaagcaactctggcaacatatcgtccgccaaaaaatcctaaatcaagcatttgtcgcagacgaaacaggcaatgatcttgcagccaaacggctgcgcactttggcagtcgaagtccgttcaggcgataccggaaaccgtgaagcccaagctgccgccctctacttccaagccatttttggagaaaagtttacccgtaataataacaatgccgtcaatgccgcattgaactacacctacgccgtactccgtgcagcagttgcacgcgccctgaccttatatggttggttgcctgcattaggcttgtttcatagaagcgaactgaatccattcaacctcgccgatgactttatcgaacccttacgcccattggccgacctggtcgttatacatttgcatgaacaaggccgtctgaaaactgatctgacccctaacatcaaacaaaaccttatcaagacccttcactgtcaaatccgcatcgaacagcaacacttcagcaccttggccgccatcgacaaaatggtttcttcatttcaagccagcgtaaccgccaaaaacgccaaacagctgaaactgcctgaaatcttgccattgaaagaataccaatatgagtgaggccaaatttatgaggattattgtcttcttcgacctaccggttaccacagcggccaaacgcaaagccgccaatcaattccgccagtttttattaaaagatggataccaaatgctccagctttccgtatacagccgtattgtcaaaggtcgagattcgttgcaaaaacaccacaatagactatgtgcaaacctgccacaagaaggctcaatccgctgtttggaagtaacagaaaagcaatttgccaccatgaaactgctgttgggggagctaaaaacccaagaaaaaagggtcaattcagaccaactattattattttaaagccattttctcagactaaataaaacgggaaacccttatagaataaggatttcccgttgaggtattgtagcactgcgaaatgagaaagggagctacaactatattcaccccattgaatgaaacaataaaattgtagcgttgcaaaataaaatggagacttcctaaatgaaaaaagcactacctaaacaggtagtgctttcatatcaatttgcttattcagcagaatcagctgctttatcaaccaattcaaccaatgccaaaggagcattgtcgcctttacggaaaccgtatttcagtacacgaacatagccgccgttacgagcagcaaagcgtggacccaattcgtcaaacaatttaactacaacatcacgatcgcgagtgcggtcaaaagccaaacgacggtttgccaaagaaggttttttacccaaggtaatcaagggctcaactacgcggcgcaattcttttgctttaggcaaagttgtcacgatggtttcgtgagtcaacaaggaattcgccatattgcgcagcatcgcagcacggtggctgctagtacggtttaatttgcggttgccattacgatgacgcatgtcattatcctttaatcttcaaacttacggcttttcta

SEQ ID NO: 2582 - DNA, 16818 bp, synthetic construct
  source 1..16818: mol_type = other DNA
  misc_feature 1..16818: note = Synthetic
gtctgggaccttgcgtgccttgtagctgccgctgcttgactgataggcctcatactcaaacaatcttgaagtcaggtcctgcttggagtaaagatagtagtccacactctcgtgaacccttttgcttgagggcttggcgattgcgttgaaggtggtcatgctgcggtaacggaaatttgggttaatcgctgacttgatctcatcgcgggttttctttttgtcatggataagcacttttctaacccggcttgcccctgttgtgccggctgattcaatatagtcataaataatcttgccggaaacgctggtatccgccacaaatgttaatttagtatttctgttctggaagtcggcattggttctgtatgccttctcgttattcagcacagaatttacaaagctgctaaacccggccgttgtgccgtcatagccgaatacactgtagccaacggcatatccgtgccgctgaagaggctttgacgaggcaaacctgctgccgccggagaatttgttattcgttattccaacatccttcatttttttctcagccacaaatatcacgggttccctgtacggaatgcggggggctaaatcaacattatcctgaagcccatcaccgtcagtatccttaagggttgggtctgagtagtaatcaaacacaggaacatacagcctggaatttgccgggaaggaccttcccagataatgcgcagcggcctttgtaagattcataacagccttgcttcccctgataagctcatcggcatccatcagggtatcgccgtcggtatctgtgtccctgtacgtaaaatccgggtatttatcaagagttaccacacccccgcccctaaggataattgacgttctgccgttaacaggcgtaaccggcctggaaacaagctgggaaaggcgttcggccttttgtgcggcctcatggctctggtagatgcagtagtgaccgtttgaagtaatgcccccggttctacctacgttgtaaaaatgggagtattgcttgtgcttgcctgacatgacagacagtgcgatcccttttctgtgggcgttgtctattgcatctgttgttctgtatgaaaggtcatctctgtaatctaatccagaaaaaagtattaggtgtctgtttggcgaggaactgccaaagttattcaacaagctgttcaggtcgctgttaagggtgcttgttgccctggcagaccataaaaatgatttaaggttatttttagcctgtgccgcggaggaggtccacccgccgggacgccaaacgccggaggagcttatttccgccaaggaaaacctaaggccggggttatcttcagccattttgtcaatcagcagtcttatatgtgtttccgtttgtacattcttcgaattcttggttgttaccgcaatcataacatccgcgctgacagctgacgacagccgccgcaccgccgcgcccccggggttcctccatgaccctccatgtgcggaaatttgggaattagggtcatgcgtacccggaataaattgagatgtatatacctcggcattgcttatgccggatacagattggccaatgttaatgcttttggatgccccgggggctatgggcgagtcaaagctcagaccccttatcaggcatgagtctccgtttagtgtcaccagggaaccctgatggatgttatccgggctgatattcccggtgaaattaaagcggacataccaattttcaatatccgtatccccattgttggaaacagaaatatgaccgttattgaacccggtgcttacgtcagacacaggcaacaaaaccggatcacaaagctcaaacgattcaggcagcaatgggttatctcctaagaggaagaagccaaagcttgccgactgaccgggagatatattcagattaccaggggtgccgggattggatatgatggcataatcctctgagtgataggaaacaatgccgcttacaagctctgatatttgacagtcctgaagctcaaagcccaatgaccagtttctgattgtttccgtaccggtattttctattctgcattcgatacggtgctttgcagggctgccgccgtcatgtatgctgtattcaaccatgaagccttctccgttgtacacggttttgttacccggtgaaggctcaggcgatgtatctgggggcaagggcgatgggtcttcctctatgatttcatcttccacatccaccatgtcaccattttcatcgacctcaaaccagtagtcgtcgtcttccatatcaatatcaagatattgcatatagtcaacaatatctgcggcaaaataaatcccacttccctctagcccggcgtatatttcgttttcccctccgcttttagtatctataggaataagatccttatcatctggtgtacatcggaaaatcataatttcatttaatgggcggggttcttctaacgtaaatgtaattcttccgcctttaactctgtcagaaaggtcaatatctacagctttacctataatagcgggattacgcgtaacagccaaatcctttgaaccggcaataaatacctcgttccttgccaagccgcatgagcgaacatttatgctgggtatcgcggtattgccctcaaagaaatcatcatcgtatgaatcatcacccaagtcttgatcaaattcccgttcagaatccaatgtactcccatctgacatgggctctgaagggtttaatttgggattaaggctcagatttaagttcagcgcgatttcttcaccatctgtgagttcatcaccgtctgtatcttcgttttcgggatcggtgccatatattgcaatttcttcataattagtcagttcatcgtcatcatagtcatatgccccaacctcttcaattgtcagcgaataaacggctgaatcagaaatattcccgccaacttttatgtactgaacctcgttgagcaaaattgtctgaagtagcaagtcatccgaaaggctattacgctcaggatcatagcgttcaattgtaatatcagggttgtcacattcaaatgtaatgtcagctaaggtatcaatttcaggtgtaaacgcaaaccaattttctttaatttcagcgtcaatatacccaagaaaatccaatgacgattctgtttccagtagctcaatttcggcatcctcaaaacgtgttgggtaagtatcggggtcaatgggggcaaattgagccgtatataccgttatattgcttattgcatagacattcccactatgaaggttaatttgttctgtaccatttatctgcacaatagaattattatacaagctacgaagcaggcaatagtcgttatattgctccaccagtgaaccttgattgatgtcgttcggtatatttccaacaaaatcaaaactaatataccaattgtctatgggttcatccccaatgttagcaatggaaatgaagccattgtcaaaaaacacactcgtactgtcagttacatccgttaagtacggcttgcagagttcaaaggcttgagggagtattggatcatcagctgtgataaaaaatgtaaaatgaacagactgatcggggataatatttagatttccgggtctgccggaattttcaataataagataatcatcaaaacgatgggatattagctggctgtttaattcacttattatttgaccatcgggcaactcaaagcctaatgcccaatttctgattatttccgtaccagtattttctattctgcattctatacgatgctttgcggggctgccgccgtcatgtatgctgtattcaaccatgaagccttctccgttgtacacggtttggcttgatgatgccattccccggattggcattaggctgatgataatcattacggacaataagagagaattgaattttctggtcatttttttcatttggaacattccttccagtataaatttttttgcagcttggccaaaatgcagaggtttatgagaagataaccgatatattaaccataatttctacccacatcctactccgtcatcttatcataaatttgtatattgtcaatattttttgtcctgctactgccgtaatcggggtggtttggtatatttatctaaaataaaggggaggatacagccacaggtaaagcttggagtgtgatgaattgatggttaagggtctatcgcgtaaggttgttttagtaaaattcccggagcttggcgtatttgagcaggcgatgtttgtggtacgagacgatgcggcagcaaagcaaggtgtttctgccgatgacgtcatcaatgaggcctgccggattgcccaaaatcactcgccgcgtgcattgagaaaggggcggagtctgccagggcttgcttactttttaactggaggggcgagcgttggtgctgcatggatactcgtggcgttgtttggctgaggtgtcccggtcaggtgaaactctaaaaattcatatttgctgctgggtagtgtgcaggcagggaaatacagcacaatgcccttaggcgtaagatagctgttgcgttcttggtaatgcctatacacagcctttttccaggccaggggatcggtacccggcggcatggcgtttaggcaagccttgattcccttgctgcgcctgggcaagggaagggggtagggaaggccatcctccaatgaccagctgtcgccgcatcgcacctccgccaggggctgagcgggactgtgctgggaaatctcataatagagagacagaatgcccttgtcattataagtaaccgtgtatgaagctgcaagcttatagggctcagccaaatttccggcattattttcacgcgccttttgcagcaggcttgtctttgcccagcgcaacagaaatttgctcagaaaaatataatgccgattgattcgttcggcagctttgctggggatacctgaaattttgggaagagtaatgcttgtttccaatataattttgtcatcatgctcccaggcctgcctttcattaaaatcctccaattcggcacaaacaggttccccgggtctttttttttgcgaaaatgccataaaaatcacctcggctcattatatggggccgaggcaaaaagggttcagccatatttccagctgaccccatcgggcagggagtaacggcttttgctgtcaatcaatcaatggcaggcgtgcattgttgatatgagctgccacgatttccatgtctgcgtgaaatttacgcagggcatcttctaataatttgggatgatcatttgtcgcgtatttttccagatacccaagctcagatgcaaatgccatcatccctaattgaactaggtcgcgcctcacaatgcctacatcattcaaaaactgcttatgaatatcggcactgtgtataacaacaaccggggtataggcacgcaaataatgcaccgcgtttcgggtgaagcggtcaagcgcgcttaaataggactgataccctccgaagttttttatcgcgagctgtaaatcaaaggcaaaatgctttatttctctcagctttcctagatcgaacataacttacctccgcccattggcagtataattttcaggcaatggtcgcgtactgcctgcacaagcagtggccactcgcactcgctcataactcttttttgcagtacttccggagtatcatcctcccttacggcgatagccttttgtgcgataataggcccgccgtcagctacctccgtaacatagtgcacagtcgccccggttagcttaactccccgggcaagcacagcctcatgtacacgcagaccgtaaaagtcttttccacaaaaagcaggtatgagtgagggatggacatttatcgcacaatatttttcgctgaagcaaggggtaagaataaacataaagcccgccagaaccaccaaatctatatcgtgtttttgcagaatatccattatcccctcggtaaatccttggcgtgtttcaaattcctcggggcaaagtataacggcaggtattcctgcaagcccggctcttttcagggcataggccttagcactggaggagatgactaacgataagtctccgttttcatatggcgatgcatcaattaatgcctgtaaattggtgccgccgcctgaaactaaaacgcatattttgaccatactgaatcctcccttggatattctttaatgcaatcttaaaaacctgctttataaaagtacaattccatgcttgccctcttccaccgtccctattaccgggcatcccgatttttcagcatcctggggagaaagacatatggcaagccccagccccatattacctacattgtacatttccctgagcggaatgcggccgtctcttgaaattttagaaaaaatctcggggacaggcattgcggttgtgtcaacaactgcctgcagcccatttggcagcatacgaggtatattctcaatccagccgcccccggttatatgagctaatcccttcagtgtgaccctttcccggagttttctaatatccttgacgtaaattttagtgggacagagaagctctgctgcccattcgggtgaagggtgtgggtatattttacggtagagcgaaaatccattggagtgcagcccagaggaaggcaagcctactattaaatctcccggatgtatggccttgccatcaatgcgattgtccaggtcaacaacgccaacgcaaaatccagctatatcgtactcatttccattgtatatcccgggcatttccgccgtttcaccgccaattaaagctacccctgactgacggcagccatctgccacaccagacacaatagatgcaattttctcaggtataagcttgccgcatgcgatataatccaagaaaaacagcggcagtgcccccgagcataaaacatcattaacgcacatagcgacacagtcaatacctatggtatcatgcttgtctatggaaaatgcgagctttagctttgttcccactccatcggttccagaaactaacactggacgtttcattccggtcaggtcaggggcaaaaagtcccccaaagcctccaaactcacctaaaactccggctgtatcggtagagcgtaccgcctctctgattaagtcaacagccctgtagcctgcggctacgtcaacacccgcttctctataaaccttgctcatctgaaccctcctgcacacggtcatgccgtaaattttgaatatcagaaccttatctgccgattactcgtaaaatactccttgccttatcagctctttttagtgcctcttccacagttttgccggttgctgtgaaatgccccattttcctcccgggcttagacttcttctttccgtaaaggtgaacatgagtacacggttcggcataagcctcttccaatcccaaaagctccgcctcgccttcatcctcttgacccaaaagatttaccataacagcagctccggttaaatccgtgcttcccagggggagtcctgtgattgcccgtatgtgattctcaaactgattggtctggcagccttctatggtgtaatgtcccgaattgtgcgggcggggagccacttcattgacgtatatttcgtctttctcggttacaaagagctctatgcaaaacgtaccgacaccttcaaaaacctccatgacctgtccggcgatcaaatgcgccttgtccagcacctcatggctgaccgccgccgggacaactgtggtatctaagatattgtctctgtgtatattttcagctatcgggtatgttaccgtagttttatcaataccgcggcaggcaatcaccgagatttccctgttgatgtgaatatactcctcgaccataatctcatttttgacctctcccaacttgcaaaatgcttttgaagcaccctcagcattcttgatgagggcattgcctttgccatcgtatccgcccagcattgttttgagcattagaggatagccaaattcttcgcccgcctctaaaatttctcgcacagatgaagccacgcaaaaacgcgggagaggtattcctctgccctgaaggacttttttttgaaaaaatttattttgaatatattttaagctgatcggcgatggataaattaaatgccccttttcctccaagcactctaatgcatcggcattgatatgctcaaattcataggtaattacatcgaccttgcctgccagtttatgataaccctttgtgctgtcaaagccggcaacgatatgctcatcacttatgctgtgagcagggcaagctttgtcggggtctaaaatcacaatatagaagcccagcctcttggcttctaaaatcatcattttaccgagctgaccgccgcctatgatgccaattttctttcgtatagcactcatttatgaccctccatttaattgctcaagataagccttggcaccttgttttttcaatttttcggacttttcgcaaactgccaggcccatgccatccttatgcaaccgcagcttttctgctatttcatcattaaaaaccgatagaatggatgctgccaatatcccagcgttttttgccccatttatagatacggttgctacagggattccgtccggcatttgcacaattgaatacaatgagtcaaccccattcaaggcctttgtttttatcggtaccccaatcaccggaagagtggttattgaagcaaccatgcccggcaaatgagcagatcccccggcacccgctatgatcacccatataccgcgggcttttgccgtttctgcgcattggtacaacattttgggcgttctgtgagcagaaacaatgcttatctcatagggtatccccatacagtcaagaaaatccgccgcttctttcataaccggcaaatctgagtcactgcccataataatttccaccttcataaatgtaattgccccctatatatttttcttgcacaggacagcccataagacgcatacgatagaggagggaccgagttctaagtcaggaggggctgattgtggtatttgaaacggttagttctattttactgcaagggttatatttttgtcttcggctgacagggcggggaggttcgtttcctcgtccgcttccggttgaggaggaagaagaagccttggcattgcttgcgcagggcgatgcccgggcgcgggaaaaattgattttgcacaatctgcggcttgtgcctcacgttataaaaaaatattacactaacgccgcagatcaagacgatctcatttcaatcggcactgtaggcctggtcaaggctattgacagctattcaccggacaaaaaagccaagctacctacttatgcgtgcatttgcatacaaaacgaaatttttatgcattttcgcggacagaaaaaacgccaaggggaaatgtcgttgtttgagccgttagaaaacgatgcagaaggctctcctttatctgttatggatgtgcttcaaacagaggacaatacgcaggaacggctagagcttgaggagcattgccgtcatgtacggaaagcagtggacaacatgggcgaaccccgcatgagggaaatcatccgcttacgttacggcttaaatggccaatccccccttacacagcgcgaaaccgccgctcgcctcggcatttcaaggtcgtatgtgtcacgcattgagaagaaagccctccaactgctcgggcaatacataggaccgcgtgcggaataggtgaatttgccgactaacagcacaatgatactatatggggaaagtcattgtcaagcaaaaatacctggcgttgaattgaagattaatctcccagattgaaaaaaattcctctgaaaaagttattgacaaggcgttggtgccgtgctatactgaagttgctctttaccacaaagagaagtgctaggtcactgcaataagagttcactatcttgttggtagtaatctcgcgaggatgtcgccccatcatttggtggggcggctttcttttgttgcaatattttagcgaacatggtagaatacctcatatatattcataatcagaaaggggtgtgtcttacacatgcactataaaattggacttgatattggcatggcttccatcgggtggagtgtcctggcgcttgatgagcaaggcgaaccgatgcaaatcctgcatatgggcagccgtgtttttgaggcggccgaaaaccccaaggatggctcttctcttgctaagccaagacgagaagcccggggcatacggcgtaggcttcgccgtcatgttcatcgaaacgaacggatccggcggctgattgtcagccggaatattctcacgcatgaggcgttggcaaagctctttgacggagacctgcaggacatctacaagctgcgcacaaaggggcttgaccagctgctcgcacccggcgagtttgcccgggtgctgattcatctggcgcaacgcaggggcttcaaatccaaccgaagggcagacagcaaagagggtgatgccggaaagcttttgaaggctgtggaagagaatcaaaagctcattggtgagggtaagaaataccgcacggtgggcgaaatgctgaatagcaggcccgctggtgagcggaaacgcaaccaaggcgactacaagaatgtggttgcccgggatgatgttgcccacgaagtccgggagattttcaaggcacaacggtatctgggtcaggcccaggccgatgaagaaaccgagaggctgtatctggagattttgctgtcgcaacgctcgttcgaccaaggccctggcggggacagtccctacaaggtggactttggagcgttggccgggaattgctctttgatcgaaggggaaaaacgtgccccgaaatcctgttacagcttcgaacggtttaaccttctgcaaaaggtcaatcatatccgcatccatcaaagcggcagggaacgccctttaacagatgccgaacggcacaggctcattgactatgcccacgaaaaagccacattcaattatggtgatatccgaaaactcctggggctggacccggcggacatgttcaacatacggtatggctccgacaaagcggaggatgttgagaaaaaaactaagttcaactttctcccttgctatcacaaaatcaaatcggctctgagtaaaatcaaaaaggggcgtattgtccattttgcagaccggctggacgacattgcctatgccatgaccataacgaaggacgatggcaagcttggagagaagctcacggagcttggtctggagatgctggatgccgatgcgctggttgcggccaacagcgaaaaaagcttttcaaaatttggtcacatctctctcaaggcttgtcgcatgattaaccctcatcttgacaaggggctgacttacaatcaggcctgtgaggccgttggattggactttcagggttacaaccgcggcaaaaaatccaaatttctgcaccaccatcaaatccccgagctggatggcttgaccaacccagtagtccgccgtgctgttttgcaagcgattaaggtcatcaattccattataaataaaatggggtcatcccctgactttatcggcatagagcttgcccgggagttatcgaaaacaaaacaagagcgggacagagcagacaagtccatgaaggacaatcaagccacaaatgatctaataaaagagcagctccaagagtacggcgtatccgcccccaaaggatatgatattgtcaaaatgaagctctggaaagagcaggactgcatatgcccatattgtctcaaacccctcaaaatcgaggagcttttctcgggggctggttgcccggaggtggaccatattgtcccctatagcatcagctttgacgacagctataaaaacaaggtggtcgtttgtgccgtctgcaatagaaccaaggggaaccgacttcccatgcaatatctgacagggggagtccgtgatgactttgaaatttgggtcaaaaaccacatccgggataaggtaaaatgcttgcggctactcaaggaaggtcttacggaggaggacgagggatacaaggaccgggcactgaatgatactcgctacgtttgccgtcttatgctcaatattttgcaaaattatctggagctggccccgcctcctccgggtgtgaaaaaacaaatcatcgctgtgaatggcggcattaccgcatatatccgcaaacgctgggggatttccaaaatccgtgccgatggtgacaagcaccacgccattgatgcaactgtagttgcttgtgtgactgatggcatgattcggaaaatcagccgttacgcccaacgcagggaactgcagtacacccaaacagagcaaggagaatttatcgtggacaccaacacgggtgaagtgctggaggatgagaagcattttccgcagccctacccccacttccgaaaagaactgaaagcccgggcatccagtcaatctgtccaactcatcgagcagttgaagctgccggcatacacaaaccctgctgttgaggcaacgcccatcttcgtatcccgtatgccccgccgtaagtccaccggagcggcacacgaggcgaccatacacagttccaagatgattgacgaaggttatatcctcaaatcagtaccgctaacgtcactgacgctggacaaggacggcgaaatcaaagattattacgaaaaagcccgccagagcgatcccaagctctacaacgcgcttcttgaccggctacgggcatttgacggcatcggtggagctgccgaggctttcaaggacggttttatacttatgggcagagatggtcacccgccgttgaaaaaagtcaagatacaggagcacagcaccctaaacgtttcggttcacgatggcaaaggcgttgccaaaaacgagagtatgatacgcattgatgtatttcacatccctgagggtaaagacaaaggctactactttatccctgtctatgtcgccgacaccaagaaaccccaactgcccacccatgcggttgtagcacacaaaaagcaagaagactggaaagaaatgcgggaggaggattttatcttctcggtgtaccccagtgaactgcttaaaataagtttcaaaaaaaccacaaaattccatctccccaaaacaagcaaaaacagctctttatcgaaagagtacatgacacaggaagaacttgtgtacttcatttcagcacacatcggagtaggggctattaaagttaagacgcatgatggggcgtatgtatcagaacccggcatcaaaaccctgctgttgctggagaaatacaccgtagacgtgttgggcagcatctcccctgcacccaaggaaacacgccaaggctttggcaaaaaggagggttagctcatggcctttcgcaatctctttgttgtaaacaacgcctatgtgtgtaccaaacacgagcagttactcgtcaaaacagaccaggagcacagctttcccattgaggacattaatgctgtattgttagagagccagcaaatcaccatcacaacggcggcgatggcaaagctggcgcagtatggggtcgccctgttcgtgtgtgatgaaaagcatctgccttgcggtgttcttcactctatggcacagcattccagagaacgcaaatggatcgggctgcaaatttcacaagacaaacccaagcaaaagcgactgtggcagcagattgtcaaagccaaaatactcaaccagggccgatgtctgacgttgtgtgacattgagggagaggctaagctgaaggccattgcccgggaggtgttgtcgggagataccggcaacgccgaaggggtggccgccgggtattacttcaagcgtctgtttggcaaaacgttcaccagggatcaagagtgcttgcaaaatgcggccttgaattacggatacgccattgtacgtggagttattgcaagaacattggcggtatatggatatgttccggcactaggacttcatcaccgtagcgagttgaacgcctttaatttggctgatgatttaattgagcctttgcgtccgctggtggatttatatgtagcaaaaaatatatctgagggcgaaggtaacttgacctcagatataaagcatggtctgtttgggctgttgaacatggaaatggaatcagatggagaaaagcatatcgtttcatatgccgcggatcggatggtacagagcttaggacgttgcttcgagggcactgaaaaacagctggttctgcccgagttgattggacttgtaacccatacatatgattagatttatgagaatgatggtttttttcgatttgcctgttaaaacagctccagaacggagatttgcaacgggatttagaaagtttttagaaaaagacggctaccacatggtgcagtattccatctatgcccgggtttgcaaaggctacgatggtgtagaaaagcacaggcaacgtctacacgcccacgttccgcctgatgggtcggttcgtctgttggtgcttaccgaaaaacagtatcagtcgatggaaattctcatcggaccaaaagccctcagggaagaacctattactggggaacaactgagcattttataaaaaatggccttgtagctccccaggaagactatatcatgtcgtttttttaagcgaaaaaatctattaaacccttacggctcaatagattttttccactctattataccacaaaaagaaacgctagggaactgcaacccacatcggcgtttgtagcggcgacaagctattataccacaaaaagaaacgctagggaactgcaacgagccgcgatgtctatgttgtcccaaccgtattataccacaaaaagaaacgctagggaactgcaacatagacactgaacacaaaaaagtttcgctgattataccacaaaaagaaacgctagggaactgcaaccaatggcttgcgaaagccaacagcgggaagattataccacaaaaagaaacgctagggaactgcaaccaatggcttgcgaaagccaacagcgggaagattataccacaaaaagaaacgctagggaactgcaacgctaaggggccccggcgcgaaccgggcgggattataccacaaaaagaaacgctagggaactgcaaccctggtgtgtgttgtgagctgttttcacaaattataccacaaaaagaaacgctagggaactgcaactggcgcgtagtgctgaagatgccgccgaagattataccacaaaaagaaacgctagggaactgcaacactcattcttcgtttagggtgctttcgatttcttctattgctccctgaacttatccgttttttaacattcgcaacagcagtcttatcaaagcattctgaattctttttttgtcatttttttcacctccgtttctcaaaatgagtatttgtcaactacggcacagccgtggcttgcaaatgcttgttgacatcgtaccattcaaatccccaggaagtcaagtgaaccgcaggataagcgaagggggaaaagcgaaaataaggcagaggagcggctgtacagccgcccctggattagttatttttttttgttcttctttctctttctgccaaaagagcattgactgcatcaagattttccttggtgcacatgactttaattttttctatgcactcctcaaggtcttttgacgtttctgcggagaaaagtatagactgtaaaattgcatcggtttctctcatttttccacctcctttttataccacgaaaagaaatgccagggaactgcaactcttagccgctccttgttagttatttttccgtatccttttttgcccggttaatcattttttgaagtttttccaatgcttctttttcttgctttttttcaatcatcttgtataagtcctcatattcttccatttctgaccttctaaaactggcaaattgcccatcagtcattcccattttttcacctcgtctcaaaataacatttgccagacaacatcatgccacgaaaagaaacgctagggaactgcaactcttagccgctcattgttagttatttttctgtgtcttttgctgcccggtcgatcatttgtcggagcttcttgatgatttcttcaaactcctgcttttctgccttttcaagaaggtcttcaaactcctgcttttctgctctcctaaaactggcaaattgctcattggtcattcccattttctcacctcgtctcaaaataatatttgtcgaacagcattataccacaaagataaaagcctgtgatttcctcggcagacattttggtttgtggtgtaacaatcaagtcggacaaaacacctccggcttgattgcgattcattggcatgaggattcgggagattaaggtctttttaagcttgcttcaagcttgcttattgtttcctttagccttttgttgtctgggctttctctcaaagcttctttcaaatttgatagcagctggtcgataaaagcgtcaaattgcctgtcagtcattcccatgatttttacctccttttgttttcgtggattagtctgcgaatgaagctgctctggttagtttcgccaaccctgtccatacccagccttaatgccgctaaatctgcttgattgagcttgacggtaagccggatttcttttttgtcctttgggagctcaaggacagttcgatgattcattgcctcacatcctgttatagtgattatattatattgttataacaatgtcaacaccttttttaaattataccacaaaaagaaacgctagggaactgcagcttgcataggtgcacggcgatttagttttgtaaccattcgctgaagaaacggcccagtttggaacagtcgagaagattagcaaacaagatgcgggacacaggcacatttatggtattcgtctttttgaagacgtta

SEQ ID NO: 2583 - DNA, 23195 bp, synthetic construct
  misc_feature 1..23195: note = Synthetic
  source 1..23195: mol_type = other DNA
agtaggcgagcatgcggttgaggtcccgcgcccgccaggccgcgagctcgccggtgacgaagccgagtgcccccagcgccagcatgagctgcgtcgcgccggtgccgtcgaaggccagcaccagcagccgcaccacgacgatcaccgccagcttcgacaccagccccgccagcagcgcgctgatccgcgtcggcgccgtcgcatagacctccggcacccaggtgttcaccgggaacagctccgctttgacgccgaagccgatgagcaaaagcgcaaagggcgcgagcccgagcgggttctggagcgcatcgggcgccagcatggcgagctgggccaggctcagggtgccggtttgcaggtagacgatggcgatgcccaccagcgccagcaccgagcccagggccgacagcagcaggtagcgcacggtggcgatgtaggccgcacccgtggcgcgcagggtcacgagcccgaagctcgccaccgccaccagctcgtagaagacgtagatgttgaacaggtcgccggacagcgccagccccgtggccgccgccgccagcagcagcatcacagcgtcgcgccgcagcgggtcggcatcgtcctcgccgcgggaccagaacagcagggtcagcaccggcaccgcggtggcgaagagcagcgccaggcggtccacgtagaaggtgatgccgagcggcggtgcgaagccgccgatggccagcgcatagggtgcatccccataggccagccacagccggatcagcaggtaggcgctcagcgccagcgtcgccggccccagcagcagggccaggggcctggccacccgcccgaggggctgcatcaggaaggccgccagcagcggcagcaccaccggcagcacgctgtggccctggctgatggagaacaggccggtcatgaggtggctccggtctggtcggtggcagctgtgcgcaacgcgtccgcgaccgggatgggcggcgggaggggccgctcacccgccggcgcctcgcggctgccctccggcgccatgccggcgtcgcggcagatgtccagctccaggtgccggcgcagcgcgcgcacgtcgagcgtgccgtagatgcggtggatcttgagcagcaccgacaccgccagtgcctgcacgccgacgccgatgacgatggccgtcagcaccagcacctgcggcaccgggtccaccatgggcacgtcggccgcgtgggtgcccaggatcggcgccagcgcgccgtcgcgccagccgctcagcaccaacagcaggttggcaccggcctcggcgatgaccagcgccagcaccatccggaacaggtgattggacatgaccatgccgatggcgccgatcaccagcagtccgaaggcgccgacgtacatcaccaccacgaagctcaggctgtcaggccccatcgcgctcatgacccccggtcctccgcctgtggatgcgggtgctgcggccccgccggctgctcggccagctgggtcatcagccccgccagctctgcgcccaccttgagccccaccgccagcgacagcagcggcagggtgccggcggacagcagctcgcccatgacgcccttgcccagcaggggcgcgagaaactccccgccgtcccacagggaccagagcccgatggcgatgaagccggcgcccgccagcccctcgatgaaggcgatggccgtgtggctcgtgcccccggagccgtccgcacccgggcgcgccagcaccagcacgaagaaggccgccgccaggatgacgccgccctggaagccgccgcccggcgtcagatggccgtgcaggatgatgtagaagcccaccaccagcagcagcgggaagagcaggtccgcgccggtgcgcaggatgaagccgccgggcgggtccgacgtgccgtggccgcagtccttgcgcccgcgcaccagcaccagtccggtggcggtggcggcggcgaacaggatggacagctcgcccagggtgtcgatgccgcggtagcccagcagcaccgcggtgacgatgttggcggcacccacctcggcgggtgcctgctccaggatggcgccgccgacgcgcatgggcggctcgccgaagccgagctgggccgcaatgaccagcagcaggaaggcgaggccggcggtgaagaccagcgaggcaaggttacgcatccggcttacctccgcgacgctcaggcgaagtgtcggtcgcgtccagttgccagaggccgagccgccgcagccccagcgccagcaccacgccggagagcccggcgccgaccacggcctcggtcatggccacgtccggggcgtgcagcagcacgaagagcaccgccacgcccagcgacacgacgccggaggcggccaccgcgctgatcatgttgtccagtatcagcaccagcacggcggacaccagcaccagcgcgaccatcaccagcgcgaacagggtctgcaggtccagatcgacgtcggggatcatggcgtcactccgtgccggcggcgtcagtcagttgccgcgccggtggcgtccgcgggccgtcgtcctgctgccaggggcgcacgcccgcaaggaacagcgcccgggcgatggtggagctggcgacagggctcgtgaacaggatgaagcccgcgatgcagaccactgtggcccaccaggccgggtgcagcagcgccacgcccagcaggaaggccacggcgcccagggtcacggacttggtgcccgcctggatgcggttgtagacgtcgggcatgcgcaggatgccgagcgccccgagcagcaggaaagccgcgcccaggagcaggaacaggtccgcgatgagtctcatgggcgctctgcctcggtgtcggtggtgcgcccgggcgcgtcccaattggcctcgatggtgcgggcgatggcgacgacgaagacgaaggccagcacaccgaacaccagcgccacatccaggtacagcggcgtcgcgaagaacaccgcgaagccggcaatgcccgccgtggccgtcaccgacagggtgtccgcggcgacgatgcggtccgctgcccccggccccagcaccagccgcagcagcccgatgaccagggcgatgcccaccagcccgaaggcgatgatctcgagcgcattcagcgtcatttgaggaacccccggatgtgccgctcgaagcccgcggcgatggccgccgtcgcctgcggcaggtcggtgccgggcgggcagtcgatccagtgcaccagcaggcggtcctcgtgcacgtcgatggtgagggtgcccggggtcagcgtgatgctgttcgccagcagcatgcgcccgagggccgagcgcaggtcggtatgtacctccaccacggccgggcggatgggcagcgacggcgccagtacacggcgggccacgtcgaagttggccaccaccagtgcgacgaaaaagcgccccaggtacagcaccagatgcaccggcgccgcaatggagaagcgcatgccggtgaaaatgccgagccggggtgcggccaccagcgtcaccagcagggcgaccatcgcaccggcgagcagttcctgtggctggaggctgcccgcgagcagcacccagagcagcaggctcacggcgaaggtgagcgcgaagtgggggagaccggggcgggaagcgccgcccgtatctgcggcgctggcggtttcggctggctgcacgggatacctcatcgtgcgaagcgttgcggatgcaggtggaacctgtcgcaggccctagagcttaccccagcttcgtcggcgggagaagccgagcgaaagcctgggtcatccgcagagggtgtgaggctaacacggcgcagtccccgcgcaagcacgcccgcggcccgcaacctgacggcagtcacttgtcggcggaccaactgcatccagggcaaaaaccggccgatgccgacatcagcggggcctatgtccgtcgcggatgaccaactctggcgagtacggcgaaggctgcaaggggccgcccgtcgcttcgcaccgtcgcgcgccggggcagtgcgaccgcggcgcgcggctgcgcggtgcgtctcaacccgggccggcggacggctcgaagcgccccagcagcttcgcattgatggcgacgatgacggtggacagcgacatcagcgcggcacccaccgccgggctcagcacgacgccgatgccgtaggcggcgcccgcggccaaaggaatggcgacggcgttgtagccggtggcccagaacaggttctggatcatcttgccgtaggtggcgcgggagagctcgatcacatcggccacgttacgcgggtcggactccaccagcacgatgtcggcggactccacggccacgtcggtaccggcgccgatggcgatgcccaggtccgcctgcaccagcgccggggcgtcattgacgccgtcgcccaccatggccactgtgcgtccgccccgctggacctcctgaatgcgcgccgccttctcgtccggcagcacctcggcgaagtagtcgctcaagccgagctccccggcgacggctttggccacggcctcggtatcgccggtgagcatgatgcagtcgatgcccatgtgctggagccgttcgatggcctcgcgggattcgtcgcggatcatgtccgccagcgcaatggcgcccagcgggcgctcgtccgccagcacataaaccagggtgttgccattctcgcggaaggccgccaccgcgttgccgtccagcgggatctcctgctcgcgcagatagccggggctcaccacatgaatggtgcggccctcgacgcgggccttggcgccgcggccggcgaggttctcgagatcggcggcgtccgggatctcgatgcccttgtccttcgccgccgcgacgatgccctgcgcgatggggtgctcggaatgggactccagcccggcggcgaggcgcagcagctcgtcctcctgcagactgccgaagctggcgactcctgtgaccccgaagcgcccggcggtgagggtgccggtcttgtcgaagacgacggcgtcgagcttgcgcgcgcgctcgaacccggcccggtcgcggatcaacaggccgcggccggcggccaggctggtgctgacggccaccaccagcgggacggcgagccccagggcatgcgggcaggtgatgaccatcacggtgaccatgcgctccagcgcgaagtcgaaggcgcggccgacgccgagccaggcggccaaggtcagcgcgccggcggtgagtgcgatgtaggtgagccaggcggcggcacggtcggcgaggtcctgggtgcgcgagcgcgacgcctgtgcctggcgcacggtgtcgatcacctgtgacagataggtgtccgcgccggtcttctgcacctcgatggtgatgctgccctcgccgttgatggcgccgccgacggcctcgtcgccggcgcgcttctccaccggccgcgactcgcccgtcagcatggattcgttcaggctggtcttgccctcgaggatggtgccgtcgatgggcaccttctcgccggggcgcacccgcacatgctcgcccttgtgcagctcgctgacagggatctcctcggtcccgccgtcttcacgcacgcgcagcgcccggtccggcatcatctgcaccaggctctccaatgccccggacgcgcccatgacggacttcatctcgatccagtggccgagcagcatcacgtccaccagcgtggccagctcccagaagaagaccttgccttcgagcttgagcaccaccgccgccgagtagccgtaggcgacggtgatggccagcgcgatgagcgtcatcatgcccggcgcgccgccgcgcagctccgacaccagcccggcgaggaagggccagccgccgtataggaacaccgcggtggccagccccagcagcacatagtcgtcgccggggaaggcgagggtgtccgtgagcccgagcaaggactggatcaggggcgagagcagcagaatgggcagcgtcagcgcgaccgagatccaaaaccgccggcggtagtcggcgatcatcgccttgtgatgctgctgatggtcgtcgtgccgctcgtggcggccgtgatcttgctcgcgcatgggctctctcccgcggctctccccgagcctgcagcaggttgcataccgcagtgtgacagtcgcgggcgcctttgtacgctcgacgcaccgacggacgcagccgtgagcatccattgcggtctctgcggtggcaaacacccgaccgccgactgcgcaacgcggcccgccgccaccgcggcggctgcgtcaccgctcacccccgcaatggtggccatcaaccatggattggtgcataggcaccggcgcctgggggtcgcctgcgccgctgccggacctgggcagcgccaccgggccatgaacgaaatgcttcgatacgctggccctggctttgcttgctttcggcagcaagcgaaggccgcggcggacggtcctgctccgtgccgcgcccctgcatgggccctgcccatccgtcatcgtcacagctgccggacgggaggtgctgcgcccggccgggcgcgggccccgtgggaccggcggccatcgccttacactttagacgctggaggtcagcatgctgatagcgctcgccgagcccgaaggctaccgcctcgaggccaccgatggggagatcggccgctgccgggatttcctgctcgatgaagaccaatgggccgtccgctggatggtcgcggatacccgcagctggctgcccggccgcaaggtattggtgtcgccggcgcagctggatacgccggactggtcgagccgccggctgccggtgcgcctcacccgggcgcagatcgagcagggcccgccgctggatgcggatgcccccgtatcgcgccgttacgagcagggtctcaacgccttccacggactgcccgactattggctcggcagcgggctgtggggcgattatcccctgccctcgtccatgatcggcgcccgagaggccatgatcgagcccgcgcccctggtgccggaggcgccggacagtgccgagccggtgcccgcccgggatgacggcagcgagcgactgcgctcgctgcgggagttgatgggctatggggtcctcgcccgggagcgcggcgcagacgacgcgggcgaggtgcaggtcggccgggtcgatgacgtcatcgtcgacgatgcagcctgggccgtgcattacctcgtggtggacaggtcctggctgccgatgtcgacgcgggtcctgctgcccgtggaccgcgtggacagcatcgattgggccgagcgcactgtgcacacccacgccggtgccgagcaattgaaggacgcgccgagcctgcagggcgacgcgcccgtcacggcccgactggcggcggcggtggacgagcattatgggcgaccgcaccacgccggcggcgaagcggtgtccgggacctgagcggcgcgccgcgccgggcgggcgatggcgcccacagggccggtggtaccggagcgtgcatcgcggccgacgccctggcccggtcagcggcgccctggcagccgccgatcctgtcgcaggcggctggctcagggtcggcgctcaccgactccactgcgtggacgacgggccagccgcagccgttggggcagggcgcctgccgctggtcttcctgcacggcaacccgacctcgtccttcctgtatcggggcgtcatccgccggctgcgcccgcagcgtcgatgtatcgcgccggacctgcccggcttcggccgctcctcgacgccgccgcggccgctggcccctgaggcacatgccgaggtcatcgcggcactgttggacgccctccgcctggacgcctatgtgctggtcgcccacgactggggtggacccatcggtttagccgcggcgcggcggcgcccgcaggccctgcgtgggctggtgctggccaacacctttgcctggcccgtacctggcgtggccggctggcgtctgcggttgttctccctgctggcggggagcgcggccgccgccctcgcgagccgatgctgcgacgccttcctgacgctcggcttgcgcatcgccatccggcgccgacccctgccggccgccgtgctggacggctaccgggggccgttccgccagcgcaagcgtcgggccgccatgcatcacatggcgcgggcgctgctcggcagccgcgccttcctcgcggccgtggagcgggacctcgtgctgttccgcgatcagccgctgttgctgtgctggggcgagcacgacccgttcatcggcgccggcgagcggcggcgcttcgcggccgccttcagccagcatgagaccctgagcatcccacatgtcggccatttcgtacctgaggacgcccccgagaccatggcggacgccgtttcggcctggctgcagggcggcccctgctgacggcgaacgccggcggccggagccggaacggatcctgcttgcaggtcgaggggagagccgttcccggtccgcagcgcatccgcatccgcgtgcctgggcggcgaagacgcaaccgcttccaacttggagacaccgacatgaccaggcaccccatcgccgccatcgccttcgcgctgcccctcatcgccctgacggccgccgcgggtatggccgacgccggcaccagccggcccgagggcgcgcgcgcctacatcatctcccccgcgcatggcgagacggtggaccagaccttcgtggtccgcttcgggctcaagggcatgggcgttgcgcccgcgggctgcgacatggcgaacaccggccatcaccacctgctcatcgacaacgacgagctgccgccgccgggcgagcccatggggggcgacatccgccacttcggcaatggcgagacccaggccgagatcaccctgccgcccggggagcacacgctgctgctgatcctcggcgacaaggaccatgtcccgcactccccgccggtgatgtccgagcagatcagcgtgacggtggagtgagcacggctgagcaccggagatgatcaatggcgaccattctcgatattctcggcgacgaggccgaacccgtgctgagccatcgctgcgagggcggtgatggaagccgctcgggtggcgcagcgacgccggttcagtccggcagcgtctgccgtcgggtcagcaccggcgcgaagccatcgccccgctcggcgagccgatgcagcaccgcgcccggtcccagccgcagccgctcggtgtcgcccgccgcaagggcggtgtcgatctcgtcccaagccaccggcgccgagacccgcggctcgcggccgatacgcaggctgtatacgccggcggtggtcttgtggcggtcgttctggctccagtcgatgaagaccttgccgacgcgcccggccctggccatcctggtcgtgatccgccccggatcatcccgcgccagggtgtcggccacggcgcgggcgaaacgcttggtgcgtgcgtagctcacctcggtgttgagcggcaccatcacgtgcaggccttttcccccgctggtcttcgcccagcagtcgagcccggtctggcgcagcagcccgcgcagcaaccgggctacgcggcaggcgtcggcgaggtccgccggcggccccgggtccaggtcgaagacgagcacattgggcgccggggtcttgtgtcttgcgacaactaaaagacgtgacgcctttggcccgacaccttcggcgtcttgaccccttcggctcctgacggccgagaacgacggcgcgcggttacgcagcgtgccagagtaagaccggctgcaggtcgcccggtccccggcccgcgctgactcccctgtcctcacgccggcgcagtgcccgatggcttcgctggcatgcccgcgtcgcttaggcattcgtccgatctccgttcacggagtccgcagcgcgagaaaagcgaaaggctgccgaagcagcctttcggtatcgacggcgtccgcgcccccgagggagcgcatccgccttgttgccgatagtccccaccatcggaacacctaatacgatagtcagcgtagcacagcgtgtacaaggggggaagaccgatgcgctaccggttggcactggacctggggacagcttccgtcggactcgtggcgtacgagcttaacgagacgaacgcacccctaggtgttgcatatcacgtcgtccgtgtctttgatgaacccgtgctgccagcgaaaggcggcagcgtcggggagccgaagaaggcggcgcgacgccaggcacgccaacagcgccgacaactcgagcggcgggcgcgccggctgcgcggcttggcgcaggtactcggagaggcattggggctggacctccggtcggtgccgccggacccgggacagcatatccacgctctcagatcggcctccgcccatgaacgggtggaacttccgggcctgctcaacgtgctgctgaacttggccaagcgacgcgggtacgccggcggcttcagagctgtcgcagacgacaacgacgatagccaagtcaaggcgggcatcgaccggctgcgcactgaaatggcggaacggggctgcgacaccctgggcgattacctgtcctggcgggccgcaaatggacagacgttgaagctcaagacggtgggcctgtacgcggatcgggatatggtgcgcgaagaattcgaacgcatttggcgcatccaagcgacccaccacccgcgcatcgcagccggcggcgaagccctgcgcaagcgtgtcgcggaacggatctttcatcagcgaccgctccgatcaccggcgcctgccgtcgggaactgcccgttggagccgtcgcttcggcgcgcgcccatggcgcaaccagcggcgcaggcgttccgcatcgaaaagcagatcgcagacctacgctggaccaacgggcggtggtcccagcccctcagtccggcgcagcggggggtggtccgggacctgctcgcgcagcacccacgccagacattcacccagatctatcgcgcgctgcagaaacgaggctgcccacgccccgagatcggttggctcaatctcgatcgatccagccgcgaagagctgattgggaacaaaaccgacgccgccatggcgcgtctcggcctggcggaagattgggcggggctggaagcgggtcaacgcgtcaccgtcatcaatctgctggcggacatcggctccccggagacgctgtgcatccccggctggcacgagcagcttgtgaccggcggcaaacagcgacgcaagcgggtgctcccggcggcagtggtcgccttcatcgacaagctggcagcccagcccgcgttcggcagactcggggccatggggcttgacggaggtcgcagcgcatattgcgtcaagacgctctgccggctggccgatgccatgggtgaaaagggcatcgatgagcacgaagcggtcgcacggctttacgaggcgcccaaaacccagcagcaagcgacggccgcggagcttgggcggccgcggcccacgggtaataccgtggttgacgttgccctgcggcaggtgcgctacaccgtgaacgccgcgatacgccatctcggcacaccaccgacgcagatcatcgtcgagctaagccgcgacatggcgctggggattaaccgtcggcgcgagatagaatatcgcatcaacaagaaccaacgtgcccgccgtcaggccgccgaggcgatcgctgcccacgacggtcgggtgacccacagcgcaatccgccgctacctgctttggcgcgagcaggacgagcagtggtgcccctactgcgagcgccccatcaatctgagcgatgccctcgacggcaacgccacccactacgagcacatctaccccaagtcactcacccgcatcggcaagcagcgggatttcctcgtacttgcccatcgcgactgcaacgatttcaagggcaaccggacaccatgggaggcttggggtgaggatgatgcgcgctggcagatcatcaaacagcgcgcggcccgtttccgtgagaagcgcctcaacggtaaggccaagcaactcttggcgcaggagcccgttgatcgtgccctcaacgataaggtcatcaacgacttcagcgcccgccagtttcacgagtcgtcctggatcgccaaacaggctgcgaggtggctgcgcgaggtatgtggggacgtcgccgtcagccgcggcatgctaaccgcgcacctgcggcgcagctgggctctcgaaaccgtcatcccggaggcccggctcgcagaggggctgaggctgcgggacacggatggaaagctggtcagcgcagcagagtttcagcgatatcggcgctattggaacggcgacaggtccggcgaggcgactgagcgcgagctggacaagcgcatcgaccaccgccaccacctgatcgacgccttggtcatcggcctgtgcgaccgctccttgtaccagcgcatggcgcgcgactacaagcaggcccaagaacgcggtgagacccgcctcacattgcgggtcaagccgccgctgccgaacctgcgcgcggtggcggtcgagctggttcggcactgcaacctgagccgcaaggcggaccgctatgtctcaggccgattgttccaagatactgcctatggttgtacccctgatggccagcacctgaccaagcgcaaggccgtcgccgagctgggaggcggcgccaaagccaccctgtcgaaggtgcgaaaagacatcgacaagatcgtacatgagtcgactcgtgacttggtaaggcaggcgttcgagcgacgggtggccgcgggacgttcgccggccgaggccatctcggagcccattcaacacccggcttacgggaccgtgatcaagcgggtgttgctgctggatgagaagaccgagggaacgaaagcggtggaccactacgcgagaggcgatcatctgttcaaacaccttaagccatttgacaacgcgtacttggagctagtcgcaggttcgggttctaaattcgagaagcgactcatccgacgttacgaagcaaaaaaccacaccatgccggttggcgttgtaggttttgccaagggtgatactgttcgtcatcccgataacgggctgcattatgtcgtaggccaaataaagaccgaaagaggcggggtattgttgcttgcgaggctggtcgaaacagatcccgtcgataaggtaaaaggctcaccaggttttgcctacatgtcatcaggaccggcgctcgcgaagctggagatcgtcccggatgtcatcgcaccggattcttctgattgagtcacagagctggctgtctctagatctgggccggctccgtatccgccgtccggaaaaagcggacgccttcgcgttgccgtcagatatagcggtccttgtgcttcaccatccggctatcaccatcaccgggcaggcgcttgagaacctggccgccgccggggccatggtgctgcttacggaccggcggcatctgcccaccggcctgctgttgccctggaccggaaccagcgtgttgggctcacggttgcggcaacagatcgccttggacggcagcgaagcagccgcccgcctttggggggagcttgtagcggcgcgcatcggcacacaggccgctaacttacgggcgctcgaatgcaagggtgcactgcgcctcgagcgcatggccggtcgggtggagcccggtgacccgtccaacctggaggcccaagcggccaagcactactgggccaacctgctgcccgaggacaagcaccgcgtgaagcgtggcgcgtgcgatccgctgaacgtgcggctcaacttcggctatgcggtgctgcgctccatggtggcgcgggaactggccactgccggtttgaacccggcgctgggcatcgggcaccacagtatcgacaacccgttcaacctggccgacgacctcatggagccataccgcttcgtggtggagcgtacggtgctcggcatgacgttgggggagtccttcgcgccgtcggaccgcatggcactcgccgggattgtcgcggccgaggtgcagctcccagatcgggtacatcgcttacccaccgcgctcgccgagacagtcgccagtctttgccgagcgcttgccgacggcggcggcggtctgacgctaccggtgttcccatgccgatcaacagctggcgcgtcatgtggctgattgcggtctacgactgcccggtgaccacttccgagcagcgtgccgcctatacgcgcttccgcaagtgtctgttgcagctggattttgtccagcatcagttttccgtctacgcgaagcactgcccgactatggccatcgcgcagagcttgatacaacaacttgagccggcggtgccggagggcgcgcatgtcgcgttcttcttgatgacggacaagcagtacggcatgacgcgggagtttttcggcaggacgagcacgaaaaagcggccttcagcgccgcgccagatcgagctattctagccgcatccttccttggatcagatgcttacgtccatgcgagagtaacaggtgttccgatggtggggtatcggaacgcagatcggcgcgcgggatggcgtccagctgagagtaacaggtgttccgatggtggggtatcggaacctgcgggcgactgaggtggtggtggaggagagagtaacaggtgttccgatggtggggtatcggaaccgtgccctggacgaggccctcggccaggagagagtaacaggtgttccgatggtggggtatcggaacgtggctggtccaatcgtgcaccgggcgctgagagtaacaggtgttccgatggtggggtatcggaacatctggcatgagcgagagactggtttgcgaagagtaacaggtgttccgatggtggggtatcggaacccagcggcgcaatcagcggcgcgccgggcaagagtaacaggtgttccgatggtggggtatcggaaccgctttcagtttcgggtgagcgcgccttggagagtaacaggtgttccgatggtggggtatcggaacccgccgggccgatctgccccgccgtcgagcagagtaacaggtgttccgatggtggggtatcggaactggttcccgctcggggaccggcccgccgcgagagtaacaggtgttccgatggtggggtatcggaacccgtcgcatcgacgccgatgacgtgatggaagagtaacaggtgttccgatggtggggtatcggaacaggctcaccaccgtgccggcggcgtcggcgagagtaacaggtgttccgatggtggggtatcggaacagcacgaagtccacgccgatggagaacccgagagtaacaggtgttccgatggtggggtatcggaacgtcgctgcccaggcgctcgcccaggtggcgagagtaacaggtgttccgatggtggggtatcggaacctggctacacgctgcgcggcaccgctcagaagagtaacaggtgttccgatggtggggtatcggaaccgcagctcggcggtgtcgtcgggcatggtgagagtaacaggtgttccgatggtggggtatcggaaccacgcttattggacgttcggcgaagatatcagagtaacaggtgttccgatggtggggtatcggaacagacggtccaccactccaggcgggcgtcggagagtaacaggtgttccgatggtggggtatcggaacgccgccgcctcccgctcggcggcatcggcgagagtaacaggtgttccgatggtggggtatcggaacagtggctctcgtcgtgcccccgagcggggtagagtaacaggtgttccgatggtggggtatcggaacctcggtcggcgccggggtgtacggggtcatagagtaacaggtgttccgatggtggggtatcggaacgcgggcgcgggccgggcgctcgcgcacctgagagtaacaggtgttccgatggtggggtatcggaacccgagcgtgcccctggaggcgcggttggcgagagtaacaggtgttccgatggtggggtatcggaacaggaccgggcgctgttcgaccgtctggagcagagtaacaggtgttccgatggtggggtatcggaactgcggtccaactctttgtactgctcaatgaagagtaacaggtgttccgatggtggggtatcggaacctgggatgaggtgaccgcgcgcgtcttcgcagagtaacaggtgttccgatggtggggtatcggaactgcgtggtacgtggcggcccactgcccgagagagtaacaggtgtttcgatggtggggtatcggaacataggtcggcagctcctgctggagccgctcagagtaacaggtgttccgatggtggggtatcggaacggggcgaggtcacgagcacctacgtgctggagagtaacaggtgttccgatggtggggtatcggaacgatagtccacgcctggagcatctggttggcagagtaacaggtgttccgatggtggggtatcggaacagcgggctggatgacccgattgcgcgcgccagagtaacaggtgttccgatggtggggtatcggaacggcagacacttccgccaggtcgtctccgtcagagtaacaggtgttccgatggtggggtatcggaacgtccgtggtggcgatggctgccgtcgggtcgagagtaacaggtgttccgatggtggggtatcggaactgaggtctgcgccgctgccccactccgggcagagtaacaggtgttccgatggtggggtatcggaactgcgggtaccgatggtttgcagcaaggacaaagagtaacacatgttccgatggtggggtatcggaacggtagccgtagcgcacgccgtaggcgctctaagagcaccaggtgttccgatgctggggtatcggaaggtccgtcggcaccggggtgtatggggttggcaccacatgggtcaggcagcgcaggcggttgtcgtaatcgcgatagacgacgcttgattgatggtggccacggcggaccgggcactcgtcggggtgcggcctcgaaatgatctcgaaacccgttgcgatgcggcaagagaagcctcgcgcagagggactgtcagaagacgctcgcgcgaagacgcagaggcgccgagggggcagggggaaacgcattgctcaatgttcccagtgcgcttctcctcttctcctcttcttctcttcttgccatgtcgtctgcgcgacatggcaccttttgataggcattgtgcgaagaccgcaccccctcgccgggcgctcggtgccggaatggtggacctgtcattgtcttgaccgtggtgtcccgccgttgtcggcggcataggtcgcggaaaatgcgggcgcggggaggccggcctggtgtgaagctgcccggcgctgtcagactttttggtcaggcagggccgatcaaccggtctctgccgccggcgtcgcgcctgcgcgatgcgccggtcgcacgggatctgcgtccggcacgcctgtaccctgcctccccgccagccggctgtccgggcgcttgcgcgcatgcgctcgggtctcccaggctcccgggcgcccgcgtggccacatcgggtcttgtccgcgctggtgccgaaagcgcccgcggtgccgctacgacgtatcgaaatccctgccggtttgtggtgacatggcgggtggcccagttgcgcgcgccgtgagcacggcggcgtccacccgacatctcaagaggtaccgaggatgagtcagagcccgctcgatcagagcctggagcagatcatggaggcccggcatggggatcccttcgcggtgctcgggcggcatccggacgccgacggcatccgggtcagggtgatgctgccgggggccgagaccgtcaccatcgccgacggcgaccacgccatggaccgcatcgagggcaccgacatcttcgagtggcgcggcgcggcggacgcggtgccggcgcgttaccgcctgatctggcgcgactccgagcaccgggagcacatcgcccacgatccttactgcttcccgccgcagctgccggacttcgacatgcacctgttcggggagggccgtcattggcacgcctaccggctgctgggcgcccgcgtgcacgagaccgacggcatcgcgggcatcctgttctcggtgtgggcgccgaacgcggcccgcgtcagcgtggtcggcgacttcaatcgctgggacggacgccgccatccgatgcgggtgcacggcaacggcgtctgggagctcttcatcccggacctctcacccggcgtgctctacaagttcgagatccgcacccgcgacggcgacatcctgctcaagtccgacccctatggccgccgcttcgaggtgcgcccgagcaccgcctccatcgtggaggggccgagcgcgttccaatggcaggacgcggcctggctcgcggcccgcagccagcaggcctggctgcgcagcccgatgtccatctacgaggtgcaccccggctcctggcagcgcggacccgagggggaaatgctcaactaccgtgagctcggtgagcgtctggtggcgcatgtgcgcgatctcggcttcacccatatcgagctgatgcccatcaccgagcatcccttcgatctgtcctggggctatcagaccacgggctattacgcccccaccagccgcttcggcagcccggacgacctccgctggctcgtggaccactgtcatgccaacggcatcggcgtgatcctggactgggtgccggcccatttcccgaaggatgcccatggcctcgcccgcttcgacggcactgcgctgttcgagcatgcggacccgcgccttggcgagcacctggactggtccacgctgattttcaacttcggccgcagcgaggtgaagaacttcctcatctccagtgcgctgtattggcttgaggagtttcacatcgacgggctgcgggtggatgccgtggcttccatgctctatctggattactcccgcaccgactgggtcccgaaccgctacggcgggcgggagaacctggaggccatcgccttcctgcgcgagctgaacgagatcgtccacgatcaggtgccgggcatcctgatgatggcggaggagtccacctcctggtcccaggtgagccggccgacctatgtcggtggtctcggtttcgacctgaaatggaacatgggctggatgaacgacacgctggagtacttcaaggaggacccgatccaccgccagtaccatcagaacgagctgaccttcagcatgatctacgccttcacggagaacttcctgctgccgttctcccacgacgaggtcacccacggcaagcgctcgctgctgtatcgcatgcccggcgacgaatggcagcgcttcgccaaccttcggctgctgtacagctacatgttcacccatcccggcaagaagctgctgttcatgggcaatgaattcggtcagggggaggagtggaacagcaccggcgtgctcgattggtacgtgctggaatatccctttcaccagggcatccagcggttggtgcggaccctgaacgggctgcacagatccgaggcgccgctgcacgcgcaggactgcgagccgcacggcttcgagtggatcgactgccacgatgcgcacaactcggtgctcgtcttccagcggcgagcgcctgccacccccgccgacggcgacgccggagcgggggatcaacggcccgaagagcacctcgtcgtcgccctcaacttcacacccgtaccgcgcgagggctatcgtatcgggacgcccgcggccgggccctaccgggagattttcaactcggatgcgacggccttcggcggcagcggcctgggcaacggcagcgagcccatccccaccgagccggtcaattggatgaaccgcccggactccctggtgctgaccctgcccccgctcgccgggatcgtgctgaagccggcggcgccgcagggcgggccggcggctggcgcggatgcgggcgccgaggattgacgtgagaacgcgtaccgtgcctgccgtgccggaatagtcacggcaaccgacacctggtgcatgctcctgtgatgccgagtgccgcctgccccgagctggggccagtgcggggggccggtgcaggggccggtacaaaacccagtgcagggcgccctgtgggggcctgggcatgctgtccggcgggcaacgccgaatcctgccacgtctgccggaccctcggcgcacgcggcaccgcaacgagctcattgacgctgtaggctgtttggcatggcgaagaagccgacctcgaagaagaagaccacgcgcggaaagaagacctccgcccagaccacgccggccccgaccaagccggcccagaagacgtcgtcccagaacacgtcgtcccagaccacaacggacgaggccacacgggccaaagccaaaccggacgcggcgcaacctccggaagccacccgccggcagacggccgcctccgaagccccggccgcaaagccatccgaggccccggacgcggcaggcaccctcgggccggatgccgcgcaggcgcctgcggcagaaaccgctgccaagccccgactgcgaaggatccccgcgggctctgagaccgctgccctgcggccgatgccgcaggtccacgccttcgcgcgcgccgagcagcccgaagcggccggtgccgcacccgcgcagcccccagccggtcagcaggcggcaccacaggccaagcgggtgccgacgccggagccgacgccaccgccggctcggcatgacgagggcgcacccgccgcgccgcagccgatgccggaagcacctgccgacaccgcgcccgagcccgagccggaacccgagccggagccgcctccggaggcgtccccggcgccccagcaaccgccgccgcctgccgcgcagcagcgcccgagcctgtacatcgtccatgtgacaccggagatggcgcccgtggccaaggtcggcggccttgccgatgtggtcttcggcctgagccgcgagctggccatccgcggcaatcacgtcgagatcatcctgccgaaatacgacacgctgcgcttcgatcacatctacgagctgcacgaggtctatcgcgacctctgggtgccctggtacgagggcgccgtccattgcacggtttatttcggcttcgtgcatgcccgcaagtgcttcttcatcgagccgcactcccatgacaatttcttcggccgcggcagcatttacggattcgcggacgacgttctgcgctatgcgttcttctcgcgcgcggccatggagttcctctggaaggccggcaagcatccggacatcatccactgtcacgactggcagaccgccttggtgccggtcttcctgtacgagctctaccagcagctcggcatgacccacccgcgcgtctgcctcaccatccacaacttcaagcaccagggcgtcaccggcgtcgagctcctgcgtgccaccggcctgcatcgcccggagcgcttcttcgacctggtgcgcctgggcgacaaccggcacaaggatgcgttgaacctgctgaagggcggggtggtctattccaacttcgtcaccaccgtgtcgccgcgctacgccttcgagaccaaggacggcggccagggcttcggcctggagcccacgctgcatacgcaccacatgaagtacggcggcgtcgtcaacggtctcgactacgatgtctggaatccggaggtggaccatcacctgccggtgcgctacggcctggacaacatcgacgccaagtacgacaacaagcgcgccctgcgccatcggctgatgctggccgaaagcgaaaagcccatcgtcgccttcgtcggccggctggacccgcagaagggcctggagctggtccgccacgcgatcttctattcgctggagcgcggtgcgcagttcgtgctgctcggctcgagcccctatcaggacatcaacaacgacttctgggggctcaagcacatgctgaacgacagccccgactgtcacctggaaatcggcttcgatgaagacctggcccatctgatctacgccggcgccgacatgatgctggtgccgagccagttcgagccctgtgggctcacccagctgatcgcgctgcactatgggaccattccggtggtgcgcaccgtcggcgggctggcggacaccgtcttcgacaaggacttctcggatcgcccgctgcatcagcgcaacgggtaccgcttcgacaattacgacgccgcgggactggagtcggccctcggtcgcgccatcgactgctactaccaattcccggagcacttccgcgagctgatgaagaatgcaatgcgcgcggactactcctggaacctgcccggacaggactatctgaacatttacgacttcatccgcaatcgctgaccaacggggctccgtggcgccgctcgcggggcagctggagcgccttacagggctcgccgaccaggcagccctcggtagccggcagcgtcacgcgcgggcgaggttttgcgggcaccggtgcagggtcaaacgcaacaagtgggtggcgcatgagagacaagggtcgtcgttgccgatgacttggccgccggcccggcgcagccgcccggcgtccgcatccgggccgatgactgcaagcgctgcgtcggcagcagcagacggagcgtccgtttccgggatcctcggcgacggagtgcgtacgaccgcgcggcgccgagccgcgggctggggcccggggttcctcgggatattgcttggggttctctctaatatggctaagcatttgccccgttcgacgcccctggggaccgtctatgcccttgcctggcgacgcggcccagggcgcgcctagagtacagggtgaatgtcagccaccggcgtcgcgcgctgccggcgcgggtcggggctgcggtggcgccaattcccagacggccgatctcaggaggtgattgtcgatgcttggacctgttgaagcacggtcggtggacgtgagcagtatcgcggcggagcaaggcacctcggcgggtgatgcttgggggcgaaatgcgtcgccgtgcggtcctggggcggatgcggcccgggccgggtcagcgcccgatgcgcagccgccagcgtcgcccacgccggctgccatcggcggcaagcccaccatcctggtggccgatgacaatgcggacgtggtggcctgcctggcgatgctgctggagatgaagggctgggccgtgatcaaggcctacgacggcccgcaggcggtggccgctgccgagcgcgagcagccggacgtcgtgctgctggacatcggcatgccggggctcgacggtcatgcggcctgtcggcgcattcgcgc

SEQ ID NO: 2584 - DNA, 10047 bp, synthetic construct
  misc_feature 1..10047: note = Synthetic
  source 1..10047: mol_type = other DNA
gggccgctcctacgccgtaggagcggcccccaggccgcgacggatgtcactcgcgagatggccggaataatgaccaaggcccagccggccggcggtgcggctgagcaacgcgctcgctcatcacacacctggagtaccgacgatgcgagtcacaacctgtctgaagcgctcggtgctgatgtgtcttgccatgcttcctgtcattgccgcggcgcaggatacggcgtccgcggcagcagcggttctgcagcgctttgcgggtcgctgggaaacgcatacccgtatccgtatggagggttcgcctgctcacgaggttctcacccggggcgaggcgattggccggccaacgctggacggccgctatgtcgagttccgtactcactccattcccgtgggtcggtcagatcttcaagtcatgacctatgatgtcgaggccggtgtctaccggcaatggctgttcgactccgagggctatcgtcacgaggcgcaggggcattgggacccgcggggctcgatcctgcgctggcagggcaagacggcggacagcgtctttgtcattgaggatcgttggatctcccccgatcgactggagtggacactgcaacgcacggatgccgcgggacggccacggcagcgcatcgacgggaccctgatcaggcgcaaggagtgatcgccgcgcacttgcggtgtcagccaatccgcgcggcagggtgggggcggctgtacctgaaagtcgcgcagcgacgctgtgggagcggcttcagccgcgacgcgatcgcgcgaatggccgtggacctcgcaagctggcgtggcctggtcgcggctgaagccgctcccaccatgggcgatagccgtccgcgcgcctgcttgcgggcgtaccggcggcgaataccttcaccgtctgggaccttgggaacgaggagaaccgcgaggttgctggtccgcacagcggaccctacggcacggagccaccccgtagggtccgctgtgcggaccaatccccgtcggccgcaacgatgatcgaggcccggcgctcctgatgcatgggtctatccactcgttcatggggccacccgggcgggcagcccggtgaccgaccggcgggcgggaggctgcgcccccggggtcagggttgggccgggcactcggcgagggtggccgtcgcctcggccaggtacggggagcgcagtgcggtgaagatggcgacggcgcgctcggcgtggcagcggccctcggcgccgcggccctggtgggtgagtgcaatggcgaggtgttgcgagtgcgctgcgatcaattccttgcggccgagcggctcgtccagggctagggcctcccgggccagcgactcggccgccggccagtccccgcggcccagggccaactcggcgagtctcccggcaacgagggcgacgccctcgggatagggcagggcgcgggctatggccagggcctcgcggtagtggctctcggcctcgtccagtcgcccggcggacttgggcgcgatggccagagaattgaggcccttggcgacatcctggctgtcaggcgccagaccccgccagatgtccagtgcctcgcgtagcgcggcgatggcggccgggtggtccttggcgagccgatagcccatgccccgcaggcggatcgcgtatccccgctccctggcacccgtgcgggccgcctgccaatgggcatttgcccgcccggcgcagtcgagcaccccgtccgcattgccgcgctgcaggtggcaccagccggcgtcgtgggcccgccagccagcgttgtcccggtcccccgccgcctcggccctggactcggcggccaggctgagggccagccggtcgtcccagcgcccggagaagtccagaaactgtttcagcgcgacgcaggtcccttgcagacgccggttgtcgcccgcgagcagcagcgggagggcggccttgatctcggcccaggcggcgtccaggaccgggaagcggtcgtacttttggaagccgttctcaacggccagcgcatacgcccggtcggccaggcgcccgccggtctccccgacggcttcgggccggacccggcgcaggtagcgcgcggccagcgcgggcagcagccactggtccctgtcctcatcaacgatcagcagtgcgcggtcgcgcaggtcatcgagcgccgtctccacggcggtgcggctgagccctgttagtggcaggagacagcccggtggtgccggctcggtgaagtgggagagggcggcgaggacggcgatctcgtccgcggtgaaggtctccaccaagtccccgaagacgaaccccagcgggtcattacccgcctgcgcctcttgcaggcgcccgatggccgcatccagggtccggcagcgcccccggtccagccccagttggcccagggtccaggtcagcagcagcgggttgccgccggtttcggcatagagccggtcgcgctcgtccgccgtgaggcgcccggccggcagccagcgcaggccaagctcggcgatcagcgcatcggcccccgcgcggtcgagccggtccagccgtaaccactggcctgcccaggctccgccggtgcgccgccgactggtgaggatggcgcggcacccctcgggcaggcgctccatcaggtcgaagacccgccgccgctcggcctggttcagggtctccaggttgtcgaagacgagcagcgcccgctgcccggccagggcgtgacggaccagctcggcgcgcccggccggatcgctgcgcgggatgtcctcgcgccccagggcgcggcccagctcggcgagcatggcgtcgaagtcgtgcacctgctggtcggccaggcggcgctcgccgtccgggtgcagggcacggccttgggcggtgatccagagcttgagcgggtactgctcggccggggcgcggtggctggcctccagtgcgagcgcggtcttgccgatgccgcctgggccgtcgatggcgatcccccagccgcgatagtccggtgcgagacaggcggcgacccgggcgagttcggtcgcacggccgaagaaggggcaccgcgccgggagggtcgagtggggcggggcgggtcggctggccgacgggaccagatccgcggccggctcagcgtcccggtccgggtcggggggcacgggcgcgggcttcggcagatgcagggtttcaggcgccgtgccttggtcgtcttgcaggaccgcgtgttcttgatcggggacatagcgccagcggcccgtgcccttggtggcgatgcgcggccagagtcgtagctccgcgtccctgtccgtgaagcgaatctgacccgccgtgtagccgtgtgcccgttccagccttggcggctcgccatggtgttccatcccgaagaccgagcacccctggcacaggcgaacggcgttggggtcgccgccttggcgcagatagctgatcctggcctcgtgattgtgcccgaacaggtgggccgcgaagcgcccggccggggctatctctgactccccaagctcccgcgccgccggggtcagccagtccggtccctggtggctgagcagcaggcacaggtcatggtccgcgccccagcggtcgatgcccgcggggcagagcgcatggacctggtgcgggtcccagacgagcttcccctggtagtcgccggcgcccagttgcaggaaggcggtgttgaggcccatgagcccgatccggcgcccaccgatcgtgattgcccggcaccgcgatcagcaccgcctcacccgaaccaagctcagcaagccgcgcccagagcgggtccaggacctgcgcctgcatctcccggaactgcgccgaggtccccgattggacgaggtcgccggtgaagagcaccgcgtcccagattacattcgcccggggtccttgggaatgaggaaaacgggcctggcgaggcgcggttgggcttatcggaaggttgcgatatcggctttgcgcgatagcgtggtacgcgaggaatcagcgggttgccgcggggacctggattgcgctgcgctccatccaggcgacgcggtaagagcggcgacgccacgaaaggtctgcccagccgcggtgcgtgggaacggggttcgcctgggaggccggttcgcagacgccgcggctaacggccatgagggcttgttcgtgagcccggaacatgaaagcgccttgtgggagcggtctgcggccgcgacgcggtgccgcggcgcgaactccgacgccgggttcgcagcgcggccgtagggtcggctgtgcggactaatccctgcccggccgcagcgacgatcgaagccgactgctagccggagctttcccgcccctgtgtcccccgatgaatccatcggccccgttaccgaaggcgctgcacgcatccatgggccacaaaagcaaacgaccgccgaagcggtcgtctggtatcgacgactcttgcgtccccgaagggttgctcgagtcttgttgccgatagtccccaccatcggaacacctgatacgatagtaagattaacacagactacagcaaggggggaagcataatgggctatcggcttgcgttggacttggggacggcatcgatcgggctggtggcctatgtcttggacggggacggcacgccggtggaagtcgcctaccacgccgtccgcatcttcgacgagcccttgctgccacccaagaagagcggtgtcggggagccgaagaagacgcagcgacgcttggcgcgtcagcagcgtcgccaacatcagcggcgcgcgcggcgacttggcaagttggcccaccttgcaagccgactcggtctggacccggccaaggtcaaaccagatgctgggcagtctattcaccgtttgcgcgcccaggcagcgcatggtcgcgtcgaacttgccgacttgctcagggtcctgctcaaactcgccaagcggcgcggttacgggggtgggttccgtaaccgcgacgacgacgaggacgcgggcgttgttaagtccggcatcgataaactgcgcgcgcaaatgcacgatcagggttgcgacaccctcggcgactacctcaatacgcgcgtctcggaggggctgacgctcaggctcaaatcggcaggactctacgcggaccgacaacttgtgctcgccgagtttgagtgcatctgggacgaacagtccaggcatcatcccatcctcgccgtccgcgatgaaacactgaggaatgattttcgcgacgccatcttctaccaacgcccgttgcggtcccccgcacccatggtcggcaactgcccgctggaaccctccctgcggcgctcgcccaccgcccagccagccgcccaagccttccgcatcgaaaagcatctcgccgatctttgctggggcaacggccgacggcgcagcccactgaccaaggagcaaaagggggtggtccgcgaactcttgcgggaacacccatcggtgaacttcgatcggatctatcgggagttggaggcgcggggttgcccgcgtccgccgctgtattggctcaatctggacaccagcaatcgggatgaactgccgggcgacaagaccgctgccgccatgcgccgcctggggctgttcgccgaatggtcggccctgaccgcgggccaccaggtcaccgtcatcaacctcctggccgatgtcggttcgccggaactactccaagacccggcttggcaccaaacgctgatgtccggcaagggcgaccaaatgcgcgtgcgacagttcgccccggaggtgatcgcattcgtggatcgactcgccgcaaacccgcgcttcggacggatggctaagttgcatctggacaccggacgcagcgcctactgcatcaaggccctgcgctctctcaccgaggccatgcaggtcaacggctgcgacgagcactacgccattgctcaggtctatccccgcagtcgccagtccgaaccggcgctcggcgaccgtctggccatgccgcctcacaccggaaatatcgtcgtcgatgtggcgctgcggcagattcggcgcgcggtgaacaccgcgatcgaccatcttggggggccgccggcccagatcatcgtcgagttgagccgtgacatggcgctcggcgtcaaacgccgtgccgagatcaacgatcgcatcggcaagaacacccgggcgcgccggcaggctgccgcggccattgcggagcacggtggcaccgcggaccgcaacaccgtactgcggtatctcctgtggaccgagcaggaccagcactggtgtccttattgtgaccgaccgatcaacctgagcgatgcgctggacggcgccgccacccactatgagcacatctacccccgctccctgacgcgcatcggcaaacagcgtgatttcctcgttctggcccatcgggagtgtaacgacgcgaaaggcgaccggactccctggcaggcctggggacagggccaggacccggagcgctggcaactcatccaggaccatgcggagcggttcaagcagacacaccggtacggcaaggcccggcagttggcggcccaagagacggcagacagcttcatcgacgaacaggtcatccaggatttcagcgcccgccaattccacgagtcctcctggatcgccaaggaggcggctgcctggttccgtaccatctgtcgggacgtcatggtcggtcgcggcaccctcactgcacacctgcgccgcacctggcgactggagaccgtgatccccgaaatacgcatcgaagaagggctccaagtcctggacacggatgcctgcatcatcgatcccgaaaccttccggcgctaccgcgctcattgggaaggacattcggcaggcgagcgcactgatcgccgacctgacaagcgaatcgaccatcggcaccaccttatcgatgccctggccatcggactgtgtgaccgcagcctctaccaacgcatggcccgacactataaggcggttaccgaggccggtgagacccggatgcggctggtggtcgagccgccgctccgtccactgcgtgacttggccgtcgccttggtgcgcgactgcaatctgtcccgcaaaccggatcgtcatgcaggcggcagcctgttcctggacaccgcttacgggcgtagcgccgatggtcagcgactcctgatccgtaaggaggtcgccaagttgggcggtgggacgcgccccagtgcggacaaaatccgcgccgacattgcccggatcgagcacgcatccacccgtgagatcctgagccgtgcctttgaagaacgtctcgccgccggttgcacacccgctgaagcaatcggggacccgatcgaacacccggactatggcaatcagatacgccgagtggccctggtggccgacggcaattccggggcccattgcgtgcgccatggtgatcggcaaccgggtcttttcaagctcctccgccctgagggctatgccttcatggaagtaatctccaacccatccggtccgcccgtggttgcgctcgtcccgcatcaccttgtgccccgccgaaccagttccccgggcgcctgcaggttctacaagggtgacacggtccgtgacaccaaagacggtctgatcttcgtggtcggacagatcaagtcagaaggtggcggcgcgctgatcctggggcgttggatggaaactcggccggtggacaagctgaacggggcaaacggctatcgcaaagtctcaggaaaaggtttgctcagactggagttgctccaagatgtctgagcatcgggtcctgttgatcgaaagtccgagccgattgaccctcaacctgggtcggctgcgcatccagcgggagcggcgagcggatgccttggtgttgccggaggacatcgccgtcctggtcctgcaccacccggcgatcatgatcagcggccaggcactcgaacgcctggccgcgggcggggcgattgtgctcttgactgacgaacggcacctgccgagtggtgtcctgctgccgtggctgggcggtgtggtcgccgggtcacggctgcgccagcagatcgccctggacggcagcgaacgggcgcgccgtctgtgggccacgattgtcgctgcccgcatcggcacccaggtggccaacctgcgccatttccagcgcggccttgattacggaggaggtcgtccttgccaatggcagctatcgactaccggccgcgattgccgaaacggttgccagcctgtgtcgccacctgggcggtgacggccttcaactcaccctgccggtttacccatgccgatcaacggctggcgcgtgatgtggctgatcgcggtctacgactgtccggtcaccaccgtggagcaacgtcgcgcctacacccgattccgtcggtgcctgctcaagctgaacttcatccagcaccagttctcggtctacgcgagacacttcccgaccctggccgccgccgaggccatgatccggcgtctgcaacccgcggtcccggagggcgcccacgtcgcatttttcctgctcacggataaacagtacgggatgacgcgcgagtttttcggtgccgtaaagaccagaaaaaggccctcagaaccgctccagatcgagctgttctgaggggcttgcacattacgaaacaacatcttgcgattgtgcgagggtatcaggtgttccgacggtggggtatcggaactgtggcccacgttgcgcgagcccttcctcgaagggtatcaggtgttccgacggtggggtatcggaactactggtccggagggagcgataccagccgaaaggatatcaggtattccgacggtggggtagcggaacggtagcgcagacctatagtcatcttgatatctccaccttgcgcgataacggatccttggtaagggcggccgaccgggttgcggatgcgcaccgcgcctggtgacggggcctcgatgcggcccgggtgcgcgcggcgcaccctacaggctccgcgcccgtgccgctgccgctaatccgtcgaaacccgtctgtccgcacttgagccccgccagggcaaccgcttgggccagggcatcagcggcctggaatccacgcaccagcccgtcgatcatcccggcgttgagcgtatcccccgcgcccagggtgtcgacaacccactcgggcgggcgtgccggcaccagccgcgggacgccgccgcgctccagcagccaggcgcctcgtgcgccccagccgagcaccaggacccgggcgtcggtgcttgggagtagggcggtgagccaggccccggggtcggcggcggtgcccgggccgccgtccgccaaggcgaaggcgcgggcgatcaggagcaggtccggcccgcgcaacagggtctcgatcccggggcgggacttttccagttccagtgagatgggcagccctggcgcctcgcggcggcagtgctccagcatccggcgggtctcgtccgggttgcggccctcgaagtggacccagtcgaagcgcccgagcgggatgcgcgcgaaggcggcggcgctcagatccggcaggtcgcggtagtggacgatggtgcggctgccggtggcgcggctcagggtgatgtaggaactggggctggtgccgccggggcagtggacggcgtaggtgcagtcgatgccgtgggcgctgagatccgcgtggatgaggtcggcgcccgggtcggcggccagggtgccggcccaggtgcaggcgtggcccaggtcggcgagcagggtcagggtgttggcgcagttgccgccgcgtgcctgccgctgcgcggtggcgcggacctcggcgtcctcggccgggtaggcgtcgacggtattgatcaggtcgagagtggcgacgccgacacccaggatgcggcgccgggtctcattcccggggctgggggcctgctcaatcggaggtaattggttcaatctcatgcctcgtcgttgtcgttgtcgttgtcgttgtcgtaatcgaggttatcgtcgcgcctcggatgctctcgcacccccaaggccatcgcttctccgattacgattacgattacgacaacgacaacgacaacgacaacgacaacgacaacgacaacgacaacgacaacgacaacgacaacgacaacgacaacgacaac

SEQ ID NO: 2585 - DNA, 5631 bp, synthetic construct
  misc_feature 1..5631: note = Synthetic
  source 1..5631: mol_type = other DNA
ggctccagtccggccaactgcgcaggtcgcggaccagatcgaaggccacctccggcgcacagcggatgacggtggagcggcgcacggcgatgtcgcctgactgcagcgccagatagacgagcaccacgacgatgacgaggatcgggaacaggagcacgtagagcatggcactgcctcgggcgtggaaacctggcggcgcagtctagcgagaccagaccttcggtgtcttgctccgtgggcggtgcgcggcatcaatggcagagccgacctcggcgggcactgaggcagagcgagcatgaagagctcggcaccgccccgtgccgtcggggccgtgccgccaaggggcctggttcggccccgtggcggcacgaagcagccgcgccattgcaggcgggcacgcgctaccagcaggtcgtctcggcgcccggcagcgcgtcggcgaagccggtgctgtcggcgggcagcgtcgcgatgagtgttcctgtcctaatgtcgagggatcattcgacccgatacgtgtcctccgccatcgtcgcatcgctccagccgagcacaacgcgctcacgcgagggcgccgtcgcccgaacccgctcgccttggcgctctacacgttcccgtactgcctccagaggcggccccacgcctaggttgagccgcggccggtctcgctccaaacgtgcacggcccgcgcgcaccgcgcggttcctgccgcgtagccccgtcggccccggccaggcctggaacaacccgtcggcggttgcgggtgatgcggcgctgataccggtcgaatggccgacagcggcggccatcgcgcgggccgcgactagctgtgctttccacatgggtggctaccaggttttgtccttccgcttgctcgggccggcgcccggacggaagtcgtgcttccgtcgtgaacaagcgtcgcccgtgggaggccgaggaagcgttaccgccgtcgccctgcgcggagcgccggcggactgggatcacaaaaccatgaaaacgcgggaaaaaagcgtaacgcaggtccgcgtcggagtcgccgcaaggctgcgccgccacgtctcggcaacgtgcactgtatgaatcccggactccggaaaagacaaacggccgccgaagcgaccgtttggtatcgacagcatcagcactcccgaaagagtacatcagccttgttgccgatagtccccaccatcggaacacctgatacgcttcgcaaagtagcacaggcgtttaaaggagggaaagccccaatgcgctatcggttggcacttgatcttggaacggcatccgtcgggctcgtcgcttacgagctaaacgacgacgacgccccggtcggcatcgcatatcacgcggttcgtgtattcgacgagccggtgatgccgagcaagagcagcagcgtaggcgagccgaagaaggccgcgcgacggctggctcgccaacagcgacgccaacacggtcggcgagcgcgccgactgcgcggcctggcccaggtgctgcgcgatgccctgtcgctggacctcaccgccatcccgccggaccccggccagcgcatccacgcgctccgatccgccgccgcgcatggtcgcgtggagctgccccatctattcaacgtgctgatgcacctcgcgaagcgccgcggctactccggtggctttcgcgacaccgacgcagacgaggatgccggcgtcgtgcagtccggcatcagccagttgcgcgcggagatggccgagcacggctgcaccactctcggcgactaccttcactggcgcgcgggcaagggccagacgctgagactgaagaatgccgggctgtacgcggatcgcaagctcgtccgcgacgagtttgagcacatctggctcgaacaagcgaaatatcacgcggtcatcgccaaaggcggcgcaacgctgcgcgagcaagtcgccgagcgcatctttcaccaaagaccgctccgctccccggcgcccctggtcggcaactgcccgctcgaaccttccctgcgccgttccccgatggctcagccggcggcacaggcgttccggatcgaaaaacagatcgcggacctgcgctggaccaacggccgctggtcctcgccgctcagcgccgagcagaagtccatcgtccgcgaactactggagcagcacccgcagcagaccttcacgcagatctaccacgagtttcagcggcgcgactgcccgcgccccagcatcggctggctgaatctggaccgcagcagccgcgacaccgtcacgggcaaccgcacagtcgctgccatggcgcgcctcgggctagcagaggcttgggcagccctggatccaggccaccagatcaccgtcatcaacctgctagccgacatcggctccccggaagtgctgtcgcgtgcaggctggcacgagcaactgttgacgggtggcaaagaaccgcgccgccgcgtactgcacgaggccgtggtgcgcttcatcgacgcactcgcggctaaacctaaattcgggcgcctgaccgcaatggggttcgacagtggcagaagcgcgtactcgatcaaggcgctgcgccggcttacggcagtcatgtatgagcagggctgtgatgagcatgcggcgatcgcacagtgttaccccagccgccacgagcagcgccaggcgcccggccccgagctgccgcccccgcgacagaccggcaacaccgtggtggacgtggcgctacggcaagtccgctgcgccgtcaacgtcgcgatccgcgcgctaggcaccacccccgcccaggtcatcatcgagctcagccgcgacatggcactcggcatcacgcgccggcgcgagatcgaaggacgcatcgacaagaacaggcgcgcccggcaaaaggcagccgcagccattgccgcgcacggcggcgacgtgacgcaaagcgcgatccggcgttatctcctgtggcaggagcaggacgagcaatggtgcccctactgcgaccggcccatcaatctggccgacgcgctggacggctcggtgacccactatgagcacatttatccgaagtcactcacccgtatcggcaagcagcgcgattttctggtactcgcgcatcgtgagtgcaacgacgccaaggggagcagaacgccctggcaggcgtggggccaagggcaggacccggagcgctggcgcagcgttcagcaaagggccgctcgcttcaaggaaacgaagcgctacggcaaggccaaacaattgctggcggaagagaccgcggaccgcgccatcgacgatgacgtgatcaaggacttcagtgcgcggcagttccatgagtcctcctggattgccaaggaggcggcgtcatggctgcgcaccatctgcacggatgtgatggtaagccgcggcatgctgacggctcacttgcgccgcaattggggcctggagacagtcatcccggaggcacggctggcagaagggcttcgcctcaaagacacggacggcaacgaaatcgcctcggatgatttcgacctttatcgtcgatactggaacggcgacaagtccggcgcccgcaccgaccgcgagctggacaagcgcatcgatcaccggcatcacctgatcgatgcgctcgtcatcggcctgtgcgaccgccggctatatcagcgcatggcgagggacttcaagcaggccatggagcgcggcgaggcgcggctgagcctcgtcaccaagccgcctctgcgcgacctgcgcaccgtggcccggcacctggtagaccactgcaatctcacgcgcaagccggatcgcttcgtgagcggcaatttcttcaagggcaccgcctacgggcgcactgcggacggcacacatctgctccttcgaaaagcggtgtcggagctgggtggcggagcaaaggcaacgctcgacaaggtgcgaaaagacatcgccaacatcgcgcacgactcgacgcgagaccttgtacagcaaacctttgagcggcgcatcgcggcgggactatcgccggcgcgagccatcacggatcccatcgagcacccggcctacggcacggtgttgaaacgggtgctgttgatggaccagagggcacaggacgcgaagatggtgacgcacggcaaacgtaacccaaatctttcaaagcacctcaagccggatggctatgcttgccttgaattgttctcaggtgaggacggcagcccgaagacatcattgttgccgcatcacgttgcccacacgacgctggcgcggtgtgggtcgcgacggtacttcaagggcgacatggttcgcgaccccaaagacggcgcaatttttgttgtcggccagatcaaggcggaagacaatggatcactgatgcttgcgcgcgtcacggagacggcgaagatcgagcaattgaaggggacaaaaggattcaggaaagtatctggccgtcagatcgcgcgcctggaggtactgacggatgtctgctcatcgcgtactgctcattgagtcgcagagctacctgtctcttgacctgggtcggctccgcattcgccgccagggcagcccggacgccttcgcattgcccgcggatgtcgccgtgctggtgctgcaccaccccgccatcaccatcactggccaagccctggagcagcttgccgcccacaacgccatggtgctgctgacagacgcccagcacctgccgagcgcgctgctgctgccctggggtggcgcgagcgtgctcggcatgcgcctgcgccagcagatcgcgctcgaaggcagcgcgcacggcgcgcggctctgggcggaactggtcgccgcgcgcatcggcacccaggccgcaaacctgcgggaccttggccgcaagggcgccctgcgcttggagcgcatggcggcacaggtggagcccggcgacccggccaacctggaggcgcaggccgccaagcactactgggccaatctgctgccgccggacgcgcgccgcgtcaagcagggggctacggacccgctgaacgcgcggctcaactttggctatgccgtgttgcgctccatggtggcgcgcgagctggccgcggccgggctgaaccccgccctgggcctgggccattgcagcagcgacaaccccttcaacctcgccgacgacctgatggagccctatcgcttcatcgtggagcgccgggtgctgggcatgaccttggccgaggcatttgcgcccgcggaccgcatggccctggccagcatcgtgacggaagaggtggcgctcccggagcgcgtgcatcggctgccgaccgccatcgccgaatcggtggcgagcctgtgccgtacgctcgcgaacaaaggcggcaacctgaccttgccggtctacccatgccgatcaacagttggcgcgtgatgtggctgattgccgtgtacgactgcccggtgaccacggcggagcaacgcgccgcctacgggagattccgcgcatccctgctaaagctcgatttcgtccagcaccaatattccgtgtacgccaagcactgtccgaccatggccgccgccgacgcgctgatccagcgcctgcggcccgcggtgccggaggatgcccacgtcgcgttctttctgatgaccgacaagcagtacggcatgacgcgagagtttttcggtacggcgcgaacgcaaaagaagccccgagcgccgcagcaaatcg

SEQ ID NO: 2586 - DNA, 23225 bp, synthetic construct
  source 1..23225: mol_type = other DNA
  misc_feature 1..23225: note = Synthetic
cttggtttttccacagattcgcgaatcattgtatctgctacaatatttcctgcaaaatcacgagtaatttgtgaataatatccttgggcacgggtggcaatatattcatagcgcaatccgggtgtgatactgaaattatccgatacattaaaaatattttcgacaaaaaaagcattattcgtattaggaaatctaaaatcagaaacttcaagcttattcggtgacagaaaagtaaaattagcggaagaatctgctgaaccgtcaccttgctttcggactgttgtgccggaatatacacgaaagcccatcgctaaagaagaaggaacaccgacaaaatcatgttgcacaataatacgtgtttcattgccccaattagcatattcatcgaaaagtaattgtctgttttgtcctaaatcagcaaccgtaattcgttctaaattacctaaagcaccgcgttctgctatcaaaccaaaaaactgtgatttaattttgatatcatgatgtaatcgtgcatcaatacgcgccgaaaatacattccattgcacctcaaaccaatttcttgcacgcaatgattgttggggattacgggcaaaatccgcatcggataaaccaccgggttgttttgccaaataatccatacgtgtataatcaaaaccaagaacaatattatccgtgacactaatatccgacgctacatatatattttgtaaggaatattgcgaattaggtcgccacccatcccctttttttgattgataatagccatatattccaatagatttgtaacgagtattgatactgttgaatgtactcaacatcccgaatgaaccggcggattgcaaagattctatcgttaatgtggtgtcggcaagtgttggtttatgaatactgaaatttaacataccgccgaattgtgtaccgtattgcaaagaagaggcaccgcgtatgacttctattttttctaaggcttctgccggaggcgtataataactttcgggatatcccaaagcatccgcactaatatcataaccattttgtcgtgtattgaaattcgatgttctatttggacttaagccacgtgcaccaatattgagttgcacgccggaaccatcattttcccagacatttattccggcaactctactgtaaatttgtcgtgctgtattggaagcacgattaatcggtaattcttccagaagtatttgttccgattttttcgattcataaattgttacatccgatattgaaggcatgtgaaattcagttgcaccatcggaacggtcggcttcaacaacaatttcttttccttcatacgaatccggcacaagaactatagtaaaatttgtatcagaacgtgcggataatcgaacttttctctcaaaataaccctttgcggaaaatgtatagagaataggttgcgctcccctatgctgcaaaattacttttcccaatgaatccgtgcgtaatgatagtgctgattgtttagcaaaaatcgtcgcggaagaaatccccttttttgtgcgggagttaataacagtgcattgtacggtatatgtttttacatttacctctgcagcagatgcatgaagcaatgataaaataatacacaaaagaggaacaattaatcgttgtaatgatatatccattgtttttcgctaaagtcatcggaacattctaaaagattgatattcggatctatcaataatctgcttgggcgaccattaagagttgcatatacttcagcccgtaccgccgcaatcatcataccttttcgtctataataatcacccaagaaatgtgcaaattgtactatcatatcgggttgcatcgccatttgcttctcttgatgacgattcaaaaattcactgttaatcaccattccttcttttcccgattgtgcatctttaacaaaaaatgttgcagaaccggatttttccatcagcataactctccaaccgaaacgatagccctgttctgtccaaaaacgattaccttgatacagcagaaaacgccaaggcactataatttgtacaaaaagtattattgcaaaaatatagggaatgcttatatgtggcatatatggagaacctgatgaataatctgatggtcgataaaataaggaaagtacttttttatggaaatttgcatcaaaaaaaatgagaacactcaatgacataatcagaggaaaaacaccaatttgaaaaaaatacccagtcattgcatgaaaaaaaagtacggcacaaaaagcaagaatgcgagtccttttcatcatgagaaaaaatggtatagtgcaatcgaataacatcccaccccaactgaatatatacgcagtgactcgctctttgaaaataaaaccaatcaaagggaaagtatcttgtgcaggcaaccacaaagagagtggcatagctttcagcaaccactcagaattaatttttgcaattccagcatagacatagacaatagctatcatacatcgtataatatccacataataacgcggcacagtttcagctacaaaggaaggattgcgtttactgtctattgaacagacaatatgagccggtataaaacataaaatacccgccattacactgagaaaataataatgattcagataatatgttttatcaataagttcaatatacgtgaataccagaaagaacactattatacttactcgatagtaaaaaccgagtatgatgccaatcgtggaaagcaataaacataggaaaagtccatagacaaattccggtgaatatgcttgaatgaactcaagaccataataaggaaaatgatatgacggctgaatatattgttcttcaatccaaccaagaacaataaaacgaagagtactaaagagcattagcattccaaagattactctaaagaatgctaatgaatatgacgaagtcgtccatgatatatactgacttatgaagcccaatgatttaatcaccgtccccgcttgaatatgtaatactgatgcctaacagtgatgacatatcacttttaaaaaatctggttatcttctgcaattcggtaaatatctcattcacttttgcttgttcatttatcactgcatccgacaaagccttatccggtggatattgttgaagtgatttttccacatcgccaatatgttgaactattgaagcacttaattctttaccgccgacggtactttctatatattctttaaaccctatcccatcatgtccatggcgtgtttgcccattccacactctgacaattgtttgccaatgatatgtcagcatcctaaatcccaaaccactataatatgcttccaccgttgccggttcaggttttgtttgtcctaccctattacccaaaggaatacctaatttatagttttttattgattcaaagcttttcacaaattcattgtataattcggaaatggagctacctgcatccgtaccgtttcgtgcaataaaatctgatgtatatgatttccaactatttccgcagctaactaccctattatgaatatcttgggtaattgcttgtaaataattttttcttttttgaccttcactgcccatgaatttggcaataatctcttcattcgtaccactgaataaaagatattcaacgcccataaatccacgtgtatcacgggcaaagttattgagcgagttatcacccgctataatataatcctcaatgccttttcttacttgatcaccggaaaccttgaccggaaaagtagcaatatcttcgagtaaagtaccaaatgtgccaacagccggaccaaaattaaacaaagaacaatactgccactgtgtataactttgtatccatgaattttgagcattttgcaatgtcgcaattgtgggactattgataaaatcagtcactgaattggaaaggatttgcgttgttcccgctaatctttcatattccggtattatcaaagaatcggcataatatgacaaaagagctcttctgttaaaagaatcaggagttatattattcgtggattcattgccgcaactttgtaataccaatagtatgaccaatggaaagacaaatacatattttttcatagcattacgatattatcttttttgttcgctgatccaattttttttgaatgcttccatgtccgcatcactaaaaccataaattgctttaattttattacggatatcatcaaaatttttcaaatatgttgccggttctgtcacaaataaatatgatgtcacattttgtgggtctgttgccaacatcaatgttagaatttcatcaatttgtgcatcggtaataattttattgggaatagttttaaatccatgaataaatccgactccttcagaataagcatgaagtgcggcaccgatttcggctggggttggattagtctttttcagaccatctacagttgcataagaataattgacaaccgttgcaagaagtgctttttcccaattttcacgaattgcttttattgcattctgtaaatcggcggaatactttgtgcccgctgctaatgctgcttgagcgatgcggaaattcttttggatgctgcggtaaaaaccattaccatcattattatcgcgtcttgcagcatataatgcaccgtgaatatctggtttttgcgtatttgcagcggtgttggtattcgggaaactcggatcggcaccaaacagtacaagtgcttgatgcaatttttcttgggtgattgtgccagttaaatattgcatcaccgcataatgatacaaagccgctccgaacagacctttttctataagttgttcgggttcaatacctttttcatcgaaaagataagcccccaaaacgcccccttgaccattttgttccggtgttttgaacggatcatactccgtgccgctggcgtacacaatttcttgcatatatgtctcaagtatcgtgcgataatacgatgttgaggttgctgcaaagccattctcattaaataaaagattcaattgagcaagatcaagtttagtccctttcgttctgcccttctttatctcattagtcagatttacgagcgaagcacgccacaaaagaggttgctttgatgctgctgcaaagcccgctgtatcataagtctgtggaactgttaatgctggaagttgttccaccggagactcttcggaacagccaatcatgaacaaggcaagcgatgcgaaaacaacaatacgtttcatagtatttttcatagaaaactcaaaaattgacaaaaatcttatttagactaaatctaaattaaggaaaaattttcactttacaaaatgttatgaaaacttcatatacttgatgacaattttctcattttgtccatgctgtctaaaaaaaacgatatttggcaatataattgcctaattttgtgcatatttcttatgtttcataattacaattgcattatgttaagcccaaatagcgcgtacattgatgctttatatgcggactttattattgatccggattcagtaagcgatcagtggcgacaatattttctaactcaatacaaaccaacagttaatggagttgaaggtatgactgtgccaacagcaaatcttgtgcaaacggctgctgtcatgtcacaacctgcatcatcgccaccgacagtttccgaaccaaaaccggaattatcggctcaacaacaatccacccaaattatttcagagagtaaaccccaaaacacagtgaaacagacaaacatcaatcttggaccgaacgataaaccggagattctcagtggcattccggcgcgtatcgctgacaatatgaataatagtcttaatgtgccgacagcaacctcttttcgtgcaattcccgtgaaggtacttgaagagaatcgtcgcttgctcaataaatttttggcaactcgtcgcaaagcgaaagtaagttttactcatatacttgcttgggctttggtgcgttcattggtaaaatacccaagtttgaacgatacctttacctatattgacggtaagcccgcacgtgttcgtcgcaatggtatcaatattggtttggcagtggacaccactcgcaaagacggtacgcggatgttggttgttccctccatcaaagatgccggtaaattatcttttgccgaattctgtgctgcttatgatgatttgattgctcgctcacgcaaaaatgctcttaccgtagatgaactgactggcgcaaccatatcattgactaatcccggtacgattggaactatggcttccgtgccgcgtctgatggaaggtcaggggcttatcattgccacaggcggtatcgaataccctgcggaatttcaggcggtcatgcccgaagttctttcaacgctggctatcagtaaagtactcaatatcacctcaacttatgaccatcgtattatccaaggggcggaatccggtgaatttcttgcttatctcagccaattaattctcggacagcataatttctatgatcagatttttgcgcaattacaaatccctttcgagccaatgcgttgggctaccgacaaacgcttaaatcctttcggttcacaaaatgaacttgaagtcttagacaaagaagcactcgtggcaaaaataatccattcttaccgtgtgcgcggtcatttgcaagcgaatctcaatcctcttggcttacaaacttattattatcccgatttagatccttcgcaatatggttttactatatgggatcttgaccgtcaattcgataccggcggactcggcggcgttaaccgtgctacattgcgagatattatcgaatctttgcgcgatacctattgccgtcaaatcggtattgaattcatgcatattaatgaccccgataaacgtgaatgggtgcaagacagaatcgaaccttcgcattttgaagtaaaattcgataaagaagagaaaaaatataattatctcagtttattggaagccgaagcattcgaacaatatttgcatacaaaatttatagggcataaacgattttctctggaaggcagcgaaactacattatcgtttatggaaaaagtcttggaacaagcagctgaagcagaattacatgccgttgttatcggtatggcgcatcgcggacgcttaaatgtccttgcacatttattaaataaaccttatgaaaagatttttgatgaatttgaaggtaaattcgatcccgactcttatcatggcagtggtgatgtaaaatatcacatgggcgcacgcggcgattatcaagcacgctccggcaaaaatattgaagtattacttgctccgaatccaagtcacttggaagcagtcaatcccgttgtggaaggaatggcaagagctattgacgatattaaagccgataaaacattatcctctgctttgcctattctggttcatggtgatgctgcatttattggtcaaggcgttgttgccgaaacattaaatatggcacgtttaaccggctatacaacaggcggaacaattcatgtagtcatcaataatcaaattggttttactacctcacccgatgatgcacgctccaccacctatgcaacaggaataggaaaaatattgcaagtgcctattctccatgtcaatggtgatgatcccgaagctgtcagagcttgtgctttatttgcttttgaatatcgtcgtaaatttaatgatgatgtcattgtagatatttatggctatagaaaatacgggcataatgaaggtgatgagccgacattcacccaaccattattatataaaaaaattcgtcagcacacagcagttcgccaagtatatcgcaaacaacttctcgaagaaaaagcattcaccgatgccgaattaaccgagatggaagataatttcaaaaatattctcaataaagcatttaatgagcgtgttgttgaaaaatggcaggataatgacaaacgctacaatgatgacaccaaattatttgagtctgtcgcaacggcaattacaaaagaattagctgcggaaattaccaatgccattacccatgtgcccgaaaatttccacattaatcctaaattagccgatttattgaaaaaacgttcacagatgattgaaaataatgaaccgctcattgattatggtatgggcgaagctcttgccttcggttctttattagttgcggggcatcctattcgctttaccggacaagatgtcagcagaggcactttcagtcatcgccatgcagttttatttgatttccaaaccgaagaatcgctgattttgcttaatcatattcgcaataatcaagaaaaattacgcattcacaatagtcccctctcggaagctgccgtcatgggttttgaatacggatattccacattgcgtcttgacggtttaacactttgggaagcccaattcggtgattttgccaatggtgcgcaaataattattgatcaatttattgcaagtgcagaagaaaaatgggggcaattatccaatttgactcttttattgcctcatggctatgaaggacaaggacccgaacactccagcgcacgcttagaacgctttttgcaattatgcgccgaagacaatatgattgtctgcaatttcacaactcctgcgcaatatttccatgcactgcgtcgccaagtattggcaagttatcgcaaaccattaattgtcatgacacccaaagcgaatttacgtcgtcccgtgtcgcggctttctgattttaccgataatggcttccaagaaattattgacgatataacaatcgaaaataaagaatcagtgcgtcgtgttctcttatgttcaggcaaagtatatttcgatatggttgccgagcgtgaacgtattaatgcaaatgatgtggctattattcgtgtggaacaattatatcctttccatacagaaaaagcaaaatccatattagcacaatatgcacgtgcttcccatattgtatgggtgcaagaagaacccaaaaatcaaggggcatggacatttatcgcgccatatttgcaagaattattattagtcaatcaacaattaaaatatgtgggacgtgcagcggcagcggctcccgcaacgggacttgcaaaagtccatgaatatcaattgcaagaattaaaacattctgcttttgcaaatatgtaatcagctttctatccttacaaaagcggctcacttacggagtcgctttttttttatcttcacttccataaaaaaacaataatcacaattgaggtatgtatgaaacgctttttctttcttgggctgctcctttcttttctctcattaggtcttgcttccgacacaaaaatactctcctttaaacatcccgataaatcttcgaccattatttcattgcccggttctgattttacggaattcaaagaagaatggaaaggaaaacattattattatatatcccaatcatcgcaaagcgggattgtatgctctttatttttttattatttaagcgaagccgaacaaaaagcattactcacaatgcgagaaaaatttgccgtaccaaaaacaagccctgcatttcctttttcttattataccacatcatccaaagtaagtaaagatgaaaaaaatacatttgaatggggcacggtggatggtgattttatgttccgccatgcagatattgaagaaatcggcggcagtaaaatacatcagaaaaatatgtttgcctatgcaatgattggcgatgatatgtttgcaacggtgcatttgtccaaaatactttgcacaccccaagactctgtggctatgcgctccatgctccaagcaataacactaaaacgataaatcaaatacatcagaaagaaaaaaagcggctcatacactgagtcgctttttttatactgtaaattttatgtaatttgcagatgccgtttctgcgattgcctcctactttgtgctgcaatcccgatacaattgtcagaaatctatgatgatacacaaaaaaaaagcccgagcagagctgggcgtggaataaatcctaggatcttgtacaagacctttattgtaataaggtcaagtattgttcttttacattgggcgcaaaaatacagaatcggcatgtatcatacaaattttttttacattttcttcaaaggagccatactatggcaaaagttttaggacttgatgtcggcaccaactcccttggttgggctttacttgataccgctgcacaaaccattattgattgcggtgtacgcattttttcgggtgctttgacacccaaaaaagataagttaagtaatgcggatcgcagacaattccgactcacaagacggcaatttgaacgccgcagaagacgcaaagaaaaattgcgccatcgccttcaacaactttctatgatgcccgaagacatcaaacaattctatcgcatgaacccctatgcccttcgcgctatggctttggataaacaattgactttgcatgaattaggcagagttatttatcatcttaatcaacgccgcggctatcgttccaatcgtaaatcaacaaatgaagaagaagaaaagggcactattttcaaaggtgcgacggataagcccggcattaacaccgttgaagaagccctcagctccggaaagttccgcactttgggtgaatatctcgcttcgctcgatacgacaacgcaacgcattcgcaatcgctttactttgcgttcccatcatgaagatgaattcaatcgtatatggaaaaaacaagcggagttctatcccgatattctcaatcaagcacaatatgagtacattgccaaaaaatgtgtctttttccaaagacctctcaaatcacaaaagaagaatttggggaaatgtactcttgaaccgaaaaagtataaagcgccgaaaagccaacccttatcccaaatgttccggcttttgcaaaatctcaataatcttcgcattatcacacccgacagagtcaccgatgaaagtcgtatgctcacaaccaaagaacgtgaagtcatttttgcctatctttcttcccatgatatcttagacacggaaaaaaaattccctgccgctttaaaaaccgaacttggctatggaaaaagagacagcattgcattcaatatcaaaaaattgcatggattgaaaaccgagattgcattacgcaatgcccttggcgatacacattttctctccctctccgacgaggaaaaacatcagatgtggtatattctctatggtgccgaacatgaagaatgggtaaaaaattatgcaaaatcgcattggcaatgcaatgatgagcaagccaaacagcttgcggccatgcgtttggaatccggctatatgtccttgagttccaaagctatgagaaaaatgatgccttttcttgaaaatggcgatcgctatgatgaagctgcttttgcggcagggtatcatcactcggatttgcgccaagacaaaggtgtggctgatcgcattccgcctatcaacactattcgcaatcctattgtgatggtatcgcttacccaagtacgtacagtagttaattgcctcattgatgaatatggaaaaccggatgaaattcatgtagaaatggctcgtgatttaaaaaattcgctttccaaacgtttggaaattgaaaaacaacaaaaagacagagcaaaacaacgtgaaaaaatcaaagaaatattgcgtcaatatattgccaatccatcaaacaatgatattctccgctatgaattatggcaagaagtcaatgaacattgcccttatacgggagattatatttccccttcgcggctatgcagtgatcattccgatattgatgtagagcatattttaccctattcacgcacactcgataactctgtgatgaatttgactatatgtgtgcgtgaagaaaatgcccgcaaaggcgatagaacaccatgggaaatgtatggcggcgatgaagaaatgtttgaggaactatgccgacgcatcaatacagaaaaaatgtctgatgaaaagcaaaaacgttttcgcatgaatgataagcaatttgaagaatttatgacctccggcgaaggcggcgattttctcgatagacaattgcatgacactgcatacattgccagagaaacaaaagccatcatggaaactatatgcacaaatgtcattataaccaaaggaactgcaaccgccgatttacgccatttgtggggactcaataatattctcggaaaaaagaataccattgacaatatagctataaaaaatcgtgatgatcatcgccatcatgccattgatgccattgtcattgctctgacttcacgacgcacattgcaattactttcttcatggaatgcctccgaaaaattcaatcgccgcacaaaagctcgcttccaacttccccgaccatgggacgatatttttctgcaatcacaaaaagccattgccaatattatcgtgagccataaagtcaataaaagagtacgcggtgctttgcatgaagaaactgtctatggcagattaaaaatgccattcacgggtatgcccgcttataataaagaaaaacaacaaccctattatgtggtgcgaaaacctttatcaggtatgacggacaccaatcccgtgtataaaattgtggatcccattgtcaaagaaacggtatatcaacgcctcatagaaaaaggcattaacgaacatgatttacgcagtgcggaaaagaatgagaaagcaaaaaaaataaaaattcctaaagatgcctttgctgagccattatatatgcccgcagcagaagggaaaaaagctccgcgcattctttccgtgcgtattgctgtgccggcaacaaagatgttccccttacattcgcatggcgacagtgccgcttttgttgagccgggcaataatcatcatgttactatttttgaaagagaaggaagaagaaaaactgaacgtaaggaatatgtcatatcactattcgaagcagtgcgcagagttattcaaaaacaatcccctattcagcgatccatggacggatgggattttatctgttccttacaaaaaaatgaattatttattcgtgattatcatcctgatgaaataaatcttgaagataaatcacagtatcatacttttgcggaatctgtctatcgcgtacaaaaatttacagaaggtgagattaatctgcgattacatcgtttagcagtactaaaagcagttattgataataaggaagttgatattggaagatggatttgtgcagccagtacattgagtggttttaaagtacgtatttctcctatcggaaaattggagatcgccgatgattaagcgcagcatctatattggcaatccgatgtatatttcagccaaagatgagcaattggtattgcgcaaacccgatgataaggactttgcccatactatgtccatcgaggatctgggctatgtggaattagatcatccgcacatcactgtcaccatgactgcactccaaaaattggcggcagaaaattgtgcggtggctctttgcgatcaatcccatttgcccatggctttggtcttgccgctcagcggacatagtgtccataccgagcgcatgaaaccacaattggaagcaacacttccgctcacaaaacgattatggcaacaaaccatcatagccaaaattcgcaatcaagcggcggtcttgaaacaattcgataaaagctacgagccattattgcaaaaagccgagaaagtacaatccggcgatgccactaatcgtgaagctgtggctgcttcgtattattggaaaacattattcggcaaagattttctacgtgagcgtgagggcgattatcccaataatcttctcaattatggctatgccattcttcgtgcaattattgcccgtgccattgtcggtacgggcttattgcccgccatagggattcatcatcataatcgctataatagttattgccttgccgatgatctgatggaaccctatcgtccttttgtggatgctttggtatatcaatacttcctcgacaatccggcattgcttatgctcgatcgccatgccaaacaatcgctattgcatattccggctttggatgtcggctggggtgaggaaacacgaccgctcatgaatgctgccaccttaacagctgcttgtttgtggaaatgttacaatggcgaaagaaaaatgctgcaatatcctgtctttctttcataagtcattattatgacatgagttctgcccttaccataatgaaaaagcaatctgcagcggtcaccaaaagacgacgccttcgctcttctttgcaacgtacacatctcagcgagtatagaattatgtggatattagtcttttttgatttgccgacagaaaccaaagtcgaaagaaaagcccattccgatttcagaaaaaaacttctcaaagatggctttacccgtatgcaattttctatttacaaaaggcattgtgcttccatagaaaatgcagaagttcattgcaaaagagtggaaaaattcatacccgtcaaaggtttagtctccattatgatgattaccgacaaacaatttggtatgataaagacattttatggcaaaaagtcggtgatgaagaaaagcgatccgcaacaattagagatgttttgatacaaaaaagggatatgatatgctcatatccctttgctttgggtattgtttttttgtcagctctgcgatgcagaatgttgaaaactatggctttagagtaaagataatgtaaaagaacaatacttgatgccaaattacaacttcccacccgttgctgtgctgtcgggtaataatgtaaaagaacaatacttgatgccaaattacaacacgattttgcagtatggcctcttggaattaatgtaaaagaacaatacttgatgccaaattacaactgatgatattgttcgctatgcgtgcaactaaatgtaaaagaacaatacttgatgccaaattacaacgatagtaggtttcaagttgttcaagcattaatgtaaaagaacaatacttgatgccaaattacaaccagaaacgtgagaaactaaacgtatatttaatgtaaaagaacaatacttgatgccaaattacaacttcttccagacagaagtgtaatgcctattaaatgtaaaagaacaatacttgatgccaaattacaacttacgtccaaagcataaaaattgatacttaatgtaaaagaacaatacttgatgccaaattacaacgtgtcgtcaataaattagcattttcggaaaatgtaaaagaacaatacttgatgccaaattacaacacatctttacgctaagtcactcagcttcgaatgtaaaagaacaatacttgatgccaaattacaactaacattgtgtaaatccttaaaatttgataatgtaaaagaacaatacttgatgccaaattacaaccagtgcgtaacaagtatcatcgcacgccaacaatgtaaaagaacaatacttgatgccaaattacaacgtcaatgatggcaattcattaattattgcaatgtaaaagaacaatacttgatgccaaattacaacctttgtagtgtacaataatgaagtgcttttaatgtaaaagaacaatacttgatgccaaattacaacttgtggttgctccgcagcagagccacacaaatgtaaaagaacaatacttgatgccaaattacaacatctttcgtctgcaagttcgttgtacttttaatgtaaaagaacaatacttgatgccaaattacaacttgcatcattttgtttttgttgatttgcaaatgtaaaagaacaatacttgatgccaaattacaacgaagtgcggagtatatcattatactcttcgaatgtaaaagaacaatacttgatgccaaattacaactacctgtgtcacggctcttagcggtatatcaatgtaaaagaacaatacttgatgccaaattacaacacgctatgactccaacacaaaaagccgcataatgtaaaagaacaatacttgatgccaaattacaactgttgtgagtttctccgtcggcttgaccaaaatgtaaaagaacaatacttgatgccaaattacaacaagtcgaacaatacccgtgttgtactctataatgtaaaagaacaatacttgatgccaaattacaacataaatgaaagaaatggtaaatctgataaaatgtaaaagaacaatacttgatgccaaattacaacattgaactctatttctgctgcaagaatgagaatgtaaaagaacaatacttgatgccaaattacaacaaagcgaagcgagagctaaagttccattgaatgtaaaagaacaatacttgatgccaaattacaacataaatcaatcatttcacggaacatcgtggaatgtaaaagaacaatacttgatgccaaattacaacatagtttcattgtagttgtaccgttaagtaaatgtaaaagaacaatacttgatgccaaattacaacgccgctggcaaatcatcaacatcgtaggcaatgtaaaagaacaatacttgatgccaaattacaacaacgccatccatttattgttgtctctttaaatgtaaaagaacaatacttgatgccaaattacaacctgtatcaagacgtggcaagttgtgtaaaaatgtaaaagaacaatacttgatgccaaattacaactattattcacttattaacccatgccgagataatgtaaaagaacaatacttgatgccaaattacaacataaatcaatcatttcacggaacatcgtggaatgtaaaagaacaatacttgatgccaaattacaacactcggcgttgatgtcagtgctttttttttaatgtaaaagaacaatacttgatgccaaattacaacagtaattggctctactttcttgttgaacgcaatgtaaaagaacaatacttgatgccaaattacaacagcagcaagctctgccattactgacttctaatgtaaaagaacaatacttgatgccaaattacaactcactacttgccacatcgcgaatgttgattaatgtaaaagaacaatacttgatgccaaattacaacatgaaactgaccgcgttttccccgaccctaatgtaaaagaacaatacttgatgccaaattacaacaagtgggatgctggtatagccatcaatgtaatgtaaaagaacaatacttgatgccaaattacaactaacggaatcgcattgtggatttgtacataatgtaaaagaacaatacttgatgccaaattacaactcactgactaaacttgctcagaaggtgggaatgtaaaagaacaatacttgatgccaaattacaaccggcacaacatcggaaagcaatcatattgaatgtaaaagaacaatacttgatgccaaattacaaccgtctcgctttgcatggtattctttttgtttaatgtaaaagaacaatacttgatgccaaattacaacagcgataacgatggcgaactatggcaaaaaaatgtaaaagaacaatacttgatgccaaattacaacgttttgattttcgctttcatttcgttctcaatgtaaaagaacaatacttgatgccaaattacaacctactaaatccgcatcataaacaatcgtcaatgtaaaagaacaatacttgatgccaaattacaactgctcagacttaccgtgataagcccttctaatgtaaaagaacaatacttgatgccaaattacaacccggaacttattcacctgcaacaacttttaatgtaaaagaacaatacttgatgccaaattacaactgcaagtctttcgcgatgctgaggaagaaaaatgtaaaagaacaatacttgatgccaaattacaactccgtcaatatcactatggttttgctatacaatgtaaaagaacaatacttgatgccaaattacaactaatcgtgtacctcagaaattcccttacactagtccgtgggttatctttactaaagacttctgtaaataccacgcaaagaactattgcatgtattgcaaaatacttcataacttttttcaacatacaaggtataactttaattaatctaatcattagactattattacaaaaacactaaaattatattgaacttgtttaaacaaaatccgggaagttgaatatttgtgtatttgtataaacaacaacaagttagacttacagaacgactcccctacatgaatttgacaaaaatacaaaaaagcaagttagtagcaatctgtgtagaggttcttaaagaaaaaactcacttttcgctcacaacattctctatactcaattatactttgcattatccacaaactaaaaacatgtttatgggttgaatttattctatgattcgatgcaaattctcattgagttcgctcatggtggcgaagatgtggtcgggttgggtaatggtaaggtcttggctattgcctatatagatggtgcggacgccggcagcttgtgcggcgatgatgtcgctttggctgtcgcctatcatccatgattgttgtgggttgatgttccattgttggatggattctgtgatcatgcccgggttgggtttgcggcggtggtcattatcttgggcaagcgatgtgcagaatcgtatgtcgtcgaagtctgcgcctgttgctaagcggatgtgttgttgcatgtgggtatggatgcggcgcaggtcatggatggtcatgagtcctttgccgatgccttgttggttggtgatgactatgggtatatagtttttatggattgtataggcaaagacggtgaagaagtcgggtatgaaaacaaattcttccgttgtggtgatatagccccctatttttctgcgatttacgatgccgtcacggtcgaagaagatggctttattttttgtagtatcgtgcatcgtgattgtgatggtctgtttctatgaagagttcgtctatgatgctgtcgaatgatttgtatatgctttcccatgagtgatagcgttcgacaatttctcttgcgtttcgtgcgagtctgtcgcgttcatgagggttgcgcagcaagaacagcacatgcgcaatgatttcttcgtcggtagtgccgatgagtacgtcgcgtccatgttctactggtatgccttgtatgcctgttggtgttgtgacgacggggcaagcgcatgccattgcttggagtattttgttttgtatgccggagccgccttgatgtgggtggagaaatattgccgccgattgcatatagtcttgcattcggggtacattgggatatacttttatgtggtcattttgcaatttattgactaaggagcttggcgatgttccgacgatggagaatgtgacggatggaatttctttttgaataatgggcataagctcatttgcaattttttttaccatcatttcattagcccatacatctaattttccggagaaaagcagtccgcttctttgttcttgattgtaatttggggcgaaagtgtcaagttccactccattagtgagcaaacgatattgtgcggcggggttttgttttctcatgccttcgatgtcgtcatgggtgacaagtgtagttatgtcgaagtatcgtgtgacatcgggttcatattcacgtagttttttgacttcccaccaacgaatgagtttttgtttgacgctgtcggatgcttcataggagcgtgattggtacattgttcggcaatcttcggctatgagtattttggggaaagatttgtatttgatgtattctgctgttctcatgaagaatgagattccgagatcgaattgtctttcacggcatagttgatctaccacgtttgcaaattcgggttgattgtagaatgcaatttctaatggttttccattgatcatgcttgcgacgcatctcattccagctttgacgggattgagtacgatggtgtggagttctatgccgaggtcacggattgccgcgagttgctcgggtgatggtaatcttctgtgattgaatgtgacgagtgttacattgttgcggtgggcaagatgcttgagcaagtgatatgatttgattctgtcaccgccatagagaggaaaagggaatctgggggtgaggaataatatatcaagaggttttctgtgatgatacacaccgtttgtatgagattttccgtttaagaccgtttgcattaagtgagttttcgcaaagtgaaacgaatattagccgccgagaaataacattcgtgaattttttagttgctcggcaaccctatacaccgcagaattcacgtaaagttccatttcgtggtgcaaaattacacaaaacggttagaaggcatgaatccgaattgttttggatgatacattttcttaacattggctaattttgaccattgggatttgcccattttttgtaaaattcttttgttattggtatgagcatgattgcccaaagtatgaagttgagtgtgtgatgttctttgggtggtgtatggaggtagagcgcgtatgatgccatttgtattgttgtgataagagctatggattggaagcgtgtgatgatattgagtgctaagattggaacgaagtaccatgtgtggactttggggcttagtatggtaaaacagagcaatatagctaaggcgataaggaagaattgtgcgttgagtgtttgagtgtgttgttgtttggagtgtttgtaccagaaggcagcaagggcaatgagagctgcaagacgtatgaaggtgagtaatgtgggcgctttatgccaccattgatggatattgagcagggcgagtagttcacggatgattatgagtgggggcgagttgaagtaagttcggttgtagaattggaggacattggcaaattgttgtaatgattcgggtttatagaggaatggcgcagatatggcgatgagtgaggttattgctgtgagtatgataatgattttgttgcgccatgtgagtgtccggagagcgatgagtggcaatatgagtacgatggggtaaattttgattgctgccatagcgcctattattgttcctattactaatgcgagcattggtgtttgcgtctggaatagtcgtgaggcgatgattgccatgagtatgataagtggcagaatcaatccttcattgtgtgcttgtcccataatttcaatgacgggtaaagggctaagagcgaagagcaatactcctttgttgatggagtgtgatagtattgttctggctttggcgatgagcgcgaaggttattatttccatgatgaagagtatggacttccatcccatgagagcggcgaaccatccatcagaccatagttcccctatccatacgccgagagcaatccatagttcggctaagggtggatatatggcgggaaattgtttatatgccatgaggttatagctggcattacgcagatgatgatacagtggcgaatcggcatttgcttcgaaggggttcatgccatgaacggtgacatgtccataccatagatagccgaaaacatcatcggaaagccaagggagcatgggaaatagaatcattcgcggcacaaagaagagtaaggcaagcaaaagcaatgagggcattgttgttttgagtgtattccacagcaatgctgcgatgatagaatggactgagagcgctgccagaaaatagctgatggactctggattgcggaccggtggtatgatgatgtatgctgcatagataatcagatagagcaatacaaggaaaaacgtcagaaaaggcgtagatttgtgttggagaaatgttgtcagatatttattcatagtaaagtaatcaatcatgaacacaagattagccgaagctcgaagcattgaagagcgtataatccgcgaccgtcgtaatttacatgcgaatccggaattgtcatttcaggagtttgcaacgcattcgtatatttcttcacgtttgaatgagcttggcattgagcacaaaactatcggtgaaacgggtattgttgctacgattggtcatggaaaacattgcgttggtttgcgtgcggatattgatgctttgccgataatggaggaaacagatctggattatgcttcacagaatgcgggtgtgatgcatgcctgcggtcatgatgctcatacagcgatgttattgggcgctgctgctttattgaagcaaaaagagcaagaattgcagggaactgttaagttaatatttcaacccggggaagagaaagtgccgggcggagccagcattttgatacgtgagggtgtgttggagaatccgcatgtggaggcgatgtttggtcagcatgtatttccggaggcaaatgttgggacaattcagatgtgtgagggttttgttatggcttcggcggatgaattgtattggacaatacgagggagcggatgtcatgcggcgcagccccatttgggtaaagacccgatttatgttgcttctgccattatcacacatttacaaactatattaaccaaaacaaagaatccattgtcgcccgggcaagtgactgttacttccatccatggcggttctgcaacgaatattgttccggaaacggttgaaatgaaagggacattgcgttcattcgatgctgagtggcgcgagctgacaattaatcacatagagcaacattcacggatgattgcggaaatgcatggttgtactgccgaagtgacggtattgcgtggctaccctgccgtgattaataatgcagaaacaacttcttttgcatggtctttggcgcaaaggactattggcagcgataatgtgcatgtatttgagccgaagatgtggggagaagattttggtttttatgcgcagctcattccttgtactttttggcttttgggagtgcgccctccagcagtggagagtatgccgggtttgcatcatccacgctttgcgccggatgaaaatgcttttgccattgggacggcaatgcttgcaggtgcggcgattgattacttgaaggaacgtgcatatatagcatagaatgtgcttaatgtgacgcatgtaaaaaaaaactgaattaaacaagaacaaatgaccttgaacatataagatattatcgctaatttagacaaagatttcaatatttaaggagtcgcccaatcacatataagtgttaagtatcactcaaagaaagcaacttcctcacgttacaaaaacgtgattttatataattatcgggtgaaggagaattgcgctatgaaagtgtatgatgcgcaccatattagaaatatctgcctcatgggtcatgcgggcagcggcaaaacaacattagccgaagcaatgctttttgaatcgaaagaaataacgaggcgtggcagtgtagaagaaaagtcca

SEQ ID NO: 2587 - DNA, 24539 bp, synthetic construct
  variation 16616: note = n is a, c, g, or t
  misc_feature 1..24539: note = Synthetic
  source 1..24539: mol_type = other DNA
ccaaagcatttgcctgatcccattgtgttcctaatggagttctcaccttaccgctatttccaaatccaccatccaaagttccatttgtattgtatcttacaacagcaaattcgccattggctaacgtatcaaacgaaacaccacccaaaacaatttttccggtggatggaactattgctactccataggcaatatcaaatcctaaatccaatgccgtttgcacaatgccgtttgcaccaaactgattgtctaatgcacctgttgatgttagtctggccatggcaaaatgtgaataggtttgattctcaaggttaccggcaacaattattttaccatcattttgtatggcaattgaacgggctatactgttacctgtgccaatagaaaaagtaatcttccctcctgttccaaactgattatcaattgtgccatcagcaagatagcgggcaactgcaaagcgattaaaagttccattgttactttcgcctgcaacaacaatttttccatctgactgcacagctattgctcttgcaacacaggcaaaactgttaaatgatgtagttactttgccatttactccaaacgtagaatcaataatgccgggatactgcatctgagccattgattgtaatgtaaaaaaagaaaggcctgtaatcaggcaagtgtgtagaaattttctcattctgaatgtttttacttatgatgcaaatatatcatttagcctgaatgacaattattaattgtctaatatttctagaaaaatattgactaaagtattctcaaaaaatctgctaaacttttacaaaacttatttagcgaatttaaatgtcaataaaatataaaaaacaaccctgcataatttaattaaaactgtaactttgagcaataaaattttgcacgtaaaatactatgtcacaagttgaactgaagatgcctaaaatgggcgaaagcgttgctgaagcaacaattaccaaatggttaaaaaaagaaggagatcgcgttgaacaggatgagccaattcttgaaattgctacagataaagttgactctgaagtgccttccacagcagcaggaatattagtaaaacaattatataatgaaggtgatgtagttgccgttggaaaatctattgctatcattggtgattctgcatcatctgcagcaccaactccttcagtaccgaaggcagaagaagttaagattgccgttgcacctgtagttgcaacacaatctactaccgctgctactacagtaagtacatccccaaaattctattcacctttagtaagaaatatcgcacaacaggaaaatgtttcttcagcagagttagatgcaattaccggaaccggtgcagaaggtcgtgtaacaaagaaagatattcttcaatttattgagaacagaaagtccggtaatggtcagatagcacaaaatacatcagcacctgctgtacaacctgcagcaacaccacaacctaaagcacctgctgctatacctgtgactgatggtgatgttgagattattgaaatggatagaatgcggaagttgattgcagaccacatggtcatgtcaaaacacaccagtccgcatgttacatcatttgtagaagccgatgttaccaatatggtattgtggcgtaataaagttaaaaatgattttgagaaaagagagaaagaaaaaatcactttcactccattgtttatagaagcaattgtacgtgcaataaaagattatccaatgattaactgttcacttgacggcactaaaatacttctcaagaaaaacatcaacataggtatggcaactgcattacccagtggcaaccttattgtgcctgtgataaaaaatgctgacagaatgaaccttgttggtcttacaaaatcagtaaatgatttgagtggcagagcacgtaaaaacaaactttcacctgatgaaattgcaggtggaacttttaccttgaccaatgtaggtacgtttggaaatgttatgggtacacccattatcaatcaaccacaagtggccattatggctgcaggagccattcgtaaaaaacctgctgtaattgaaacagaatttggtgacactatcggtatccgtcacatgatgtttctctcattgtcttacgaccaccgtattgttgatggaagccttggtggcagttttcttcgaaaagtagccgactatcttgagcagtttgatgttaacagaaatttattataaattattatgagatttttatttgtcattatcccattactttggctgaatgctgcatttgcacagcaatctaaaaagccggtaaaaaaagttgttttagggaaagatcaggtttctgaaatgaaaaaagcaggtgcagaatattttaaaagtgataactataagtcagcattgccaatctacaagcaacttcaggaaaatgatcctaacaatactgagtttaattacagacttggcttatgttatttaaacactaatgtaaacaaaaaattagcagccggttttctgattaaggctgctgcaggaaaagatgttcccaaagatgtttattattataccggtcgtgctcttcttattcttgaagaaattgatgatgcagtagatgcctatgagaaatttaaaatagcgcatggcggaaaagttaatccaaaattgaatcttgaaaataatgtggaatggtgctatcactttcgtgatatgaagaaaaaccctatagaaatacgttttactaatttgggtaaatcggttaattcaccaaacaatgattacaggcctgtttgtgatatgtttggcaactatgtttacttcagttccaatagaaaaggcaatataggagcaatagttgatggatatggtgaaataatttcagatggttattttacaaaaaaagatacgggttatagtaaagctaaaactcttggtaccagcatcaatacaatgtattatgaagagcctttgcaattaaatgccaacggtgataaattattgatttctaaagaagggggcagtatttcttctccattatatacgtcagaactcaatggaaaatcattcgagaaagcagttgcaataaataaatttccggcttcaaaagttgatggtgcctgcatgacagatgatggaaaaacaatttatttttctgcagaccttaaaggtggaaaaggcggaaaagacatttggatgacaactttaaacagcaaaaacgaatggtcagatccggtgaatcttggtgatgcagtaaatacaaaatacgatgaaataaatccttggttgttttttgataatcagactttattttttgcatctgaaggtcacaacagcattggtggatttgatatttttttcagtactaaacctcatgaatctatggattggagtactgctaaaaatgtaggctatccattaaatactacagacgatgataaatatttttctttaacagccgattgtaaaacagggtttgtaagtcagactacagaacatggttcaggggagttagatattataaagtttgtttgcgccaaccctatcattaaacaagaaaaagttgtttgtgattttacttttttaaaagctgatggcacttttgcgcgtgatgcaaattgtatgatcatcagaaacgataccggtgaatcatcaggagtgaaaacaataaacggctcaaacggtaaactttatatttatctcagcccaggtaattataaggttaaagttaaaggtgtaaaatccggtcgtgctgatgaagattttatcatcacaggtaacgaacctaaaatgcaattggtaaagacttttaaactgacacctcccgttaaagaaggaaaataaaatgaatctgaaactacacagaccacttgccttttttgatcttgaaactacaggagtagttatcggcatggacagaattgttgaattgggtattttaaaaattctccccgatgggaccaaaaccaacaaaacctggcgtatcaatcctgagatgcacattcccgaagtagtctcaaaaattcatggtatctatgataaagatgttgcagactgccctactttcaaagaaatagcaaacgatgtaaatcattatctcaacaatgttgatctggccggatataactcaaaccggtttgatgtacccttattagttgatgaatttttaagagccggtattgaatttgacatacgtggacgcaagttaattgatgtgcagcacatctttcacaaaatggaacagcgcaccttgagtgctgcatataaattctactgcaatcaggagttaattgatgcacattctgcagaagccgatgtcagagcaacctatgaagttctggaagcacaactggagcgttatagcgatcagctacaacctgatgctgcattccttcactcattttgcaacaacagtaaaaatgtcgatttggccgggcgtatagtttatgatgataaaaagcgcgaagtattcaattttggtaagtataaaggccgcttggtagcagatgtttttaaaacagatccgagctattatgactggatgcttaaaggtgatttctcaagagataccaaacaagttgtaacggcattgcgtttacgcgaaagagaaaactaaatatatgtttgacctgtttgattaattctgctgattaaaaaattgcaggtaacataaaaatctgtacttttatactgatgggttccgaaaataattcaaataaaaataatcttcctgctgtttctgcttcaggcaaagacagcaaagtagttattgaccttgaagccgagaaaaaagaaatcagtaaacgctatcggcatttattgcgggcatgcaaatccgatctcgataaaaaagataaaaagataatcaggcttgcatttgatactgcattggaagcgcataaagaaatgcgaagaaaatccggtgaaccttatatttatcatccaattgccgttgcacagattgttgcagaagaaatcggtcttcgttctgccatccccgtagtttgcgcattgttgcatgacactgttgaagacacctatcttacattagaagacatcagagatttgtttggccctgttgcagaacaaattattgatggactgacaaaaattgcaggagtttttgatcactcaagttcattacaggccgaaaatttcagaaagatgcttcttacattaagcgttgatgtaagagtaattctcatcaaacttgccgacaggcttcataacatgcgcacgcttggaagcatggcacgtgacaagcaattgaaaatagcttctgaaactgcttacctctacgcacctctggcacatcgtcttgggctttataatgtaaaaacagaacttgatgatctggctttgaaatatacagaacctgatatctataaaaccattgctgaaaaactaagagacactaaaaaagaacgtgataaatttatctcggaatttattcatccgataaaagatgagttgaataagcaaggttttaaatttgagattaaaggaaggccaaaatccattcactccatcagggagaaaatgaaaaaacaaggtgtaacttttgaagaaatatatgatctctttgcaataagaataattattgattcacctcaaagtcaggaaaaagccgattgctggaaagtatattctattgttacggatagttaccgtccaaaccctgacagactgcgtgattggatatcaacaccaaaatcgaatggctacgaggcactacacacaacagtgatgagtgatcagggtaaatgggttgaagtacagattcgttcacaaaggatgaatgaaactgctgaaaaaggttttgctgcacattggaaatataaagaatcttcacaggagtctgctttggatgaatggcttacccgcataagggaaatgcttgaaaaccctgatagcaatgcactcgattttgttgatgacttcaaactcaatctctttgcagatgaaatttttgtttttactcctaaaggagatttaaaaacactgcctgtcaaaagcactgcattagattttgcttatgaaatccacacagatattggcaacagatgtataggagctaaagtaaaccacaagttagctcccatttcgcatacactgaatagtggtgatcaggtagaaattttaacctccgacaaacaacgaccaaaagaagactggctgagttttgtgattactgcaaaagcaaaaggcagaattaaatcagcattaaaggatgaaaaaagaattcttggtgaacaaggaaaagaaatttttgaccgaaaaataaaacaccttaaaattcctgtagcagaaatcaacatgaacgacattctgctatattacaaacttccgaatgttttagagttatattatcgcatagcaatggatgcaattgatctaaaacagttgcgtgaagccgtaaactataaagaccagcgtgtacgcagtcagcggacagcagagcctactttagaggagttggtaaaacaggcacgtggttcaaccgatatgcttgtcattggtgaaaacctgaataaaattgattataaactttcgccatgctgcaaccctattcccggtgatgacgtttttggtttcatcaccatcaatgacggaataaaaatacatcgtgtcaactgccccaatgccatgcagctgatgagcaactttgcttacagaattgtaaaagctaaatggacaggtcaggagcagctttctgtcttagccggtattaaaataacaggaatggatgatgtaggggttgtaaataatattaccaaggttatctcaagcgaattgaaagtgaatatgcgatctatctctatcgaaagtaatgaaggtttgtttgaaggaaccatcatgctttttgttcacgacaccgaacatctgaccaaactgatgaaaaaactttccgcacttagcggtattctgaatgtaactcgaattacttaaattatgtatgtaccttttgaccaattaccggacgactctcgcatctggatttttcagtcggatagattattatcagaagaggatattgaagctatcaatccaattctgaattattttattagtgactggacagcacatcaacaaactttaagagcctcattcacttttttacataatcattttctgatcattggtgttgatgaaaatatggcagttgccagcggctgttctctcgataaggtttttcatgtcgttcgtgcatgtggtcaaaaaatcaatactgactttttaaatcgtcttcgcattgctgtaatgactgatcatacgataacacttcacactataaaacaaatattggaaattgcagaaaacagaaacagcaatgagccattgatgatattcagtaacatcattgaaacaaaaagagaaatgaaaaacaactggcttataccgattgaaaaatcatggcttgcacccaaactaaaatcagctagtaaaatctaaattattaaaatcatcttatgaactttttaattaaactcataatctctacgctggcagtcatgatggtgtcatacatactgcccggtgtgcatgttcaaagttttggtattgcacttatggtagcctgtgttttggcatttttaaatgcattgataaaaccaatacttgtactttttacactgccaataacactcatcacattaggtttatttttattggtcatcaatgccatcataattatcatcacagaccgattgattgatggatttgaagttagcagttttggcattgccttgctgttttctttgatattaagcatcgttacttcggtaatggagtcacttgccggacaaaatcaaagacaataaaaaaaccggcaactttttaaactgccggtctttgtgctgtcgaacaaacaatcagtttcctaaaaatttagagattttttcaaaatacgcatttttatcggttgtaaaattctctgcatttgatggcgagttttttacaacataggtttcgctgatgcctttaatttgttttacatctgttgggttaatcagattatcctgcgatgaaacaatcaccataagtgctttaattcctttaggcttttccattgcatacattggctcatgattcttgtcaaatccaaaaggcataaccacctctttacctgtcttatcttttatttttttcttcattacttcaagaccaatccaagggccatcggcaatcaccttctgtgtttctgttctgtttgcaccaacaccaattgaaaggcctgcaccaatggctttaccatacaaattaaattttgtaatggcacgtgacttacgcaaataatcacaaacagcattaaggtcaacaataaactgcggatagataaataaatcagggtctattttaaaatcactgctgctgccataaccacgatagtcatacatggcaacattatatccagcacttaaaaatgaattggctatttcaatattatcagccatattgccatcaccactaccactcataataatccagttggtagattttttgggcaattcaaatagccacgcattgagaacagcaccatcaggagttttaattttttcttctttataagtcatgccgtacttatccggaagcactttatattcctttgaaggatttagtgccaaagcaccggaagcaaataccgccaaagcggcaactaatgaaattgatttaagcatcgtaatttgattgttaaatttaagcttcaaaaataagtacactgtccattaataagtaattaattttttaacaattcttgcttattgatgctgaaaaattcaataattattcagtattaaatcactttaaaatattattttacctcttattttaaagctaatgattcttaacaaagctatctaaccgttgcaaaacaagtatgaataacttaacgatagcgatccggataatctgtaataatgccattaacaccgctatatttcaactttaaaaatactttgtcgttgttcaccgtccatggaataattttaatattgtgctgtttacaatattctaaagtctttgctgttgcaagcacataccaggggctgtaaattgctgtcgcaaaaccaagttcattaaaaaaagcctctacatccctgttggtttcattcaaagctgccaacgtatattcagggtaatcatgatgtaagatacgtaacacttcaggatcgaatgactgcaatacgaatctttctttctcactatattgctgcacaatcctcatcaccaaatcaacaaactgttttgtctccggctgaaatgtgcctatccaactcttcttgctttttagctcaatagaataataaggcaacacgcctcttgtattacaacaaaatgtatccacagtactaattgcctctgaaagcaatggcttacctacaaccaatttatgttgtccgggaaactttgcataaaacttgctgccacagtcataacttttcacctgttgatatggcattttataaatactgtaagatgctcttttaaaatttggcagcggagtgctgtcaggcatcagacaggtttcgttgtttatccacggctcgtgcgaaactactacttgtgaatctgctgtaacaacaacatccaattctatgtgaagcacatttaattcaattgcttttaaaaatgcaggaatggtattttccggcatcaggccacggcaaccgcgatggccatatattgtgaatgaagagtcttgagccattgttattgaagataaaaaaaaacaaaatgcaaaaatccaaaatctcattgcaaaacaaataaatgtgttaggtaaccctttggcttaatttatagacaaaaatacaaattcaactttgctagttaagatattaatctgtactttagaaacgaaattttattatgtaagattaaaagataaactactatcgacaaattccattaattataaaattaaaaagccccaccgaagcagggctgagaaatcttcggcttatagccttattgtgatttgcgctacaaatatatggataaaacaaattgaaaaatttatatgaataaaattattggactcgatttaggaacaaactctattggatgggcgttgcgtaatcctgatttaacagaaaatcaaattgaaaaatttggtgtaattacttttccaacaggagtcgggaaagacgataaagggaaattaactaaatcttatgctgcagaacgaacaaaaaagcgttccactcgcagattgtaccaagctcgaaaatacagactttgggcaacgcttgagaacttaattaatgaaggttattgcccattaactattgatgatttgaacaaatggcggcactacagcaaagacgaagctcgtaaaaacaataatgcaggtcggacttatcctgtttggaacactgcatttgatgcatggataaaattagattttgataatgacggaaaaccagattatacaagtccgtatcaattgcggaaagaattagccgaaaagaaatcggattttacacaggaaaaaaatcgcttcaagttaggcagagccttgtaccatattgctcaacgcagaggttttaaaagtagcagaaaaggtgctgatgatgtgaaagagaaagaaacaaatgataacgaagtaatggatttacaatattctgaaaagaaaaaaaacaaagttattactgaattatttgaaaaatacagcaacgcaaaaactattggttggctttttgctttattggaaaatgataaaatcagagttcgtgaagctattactcaatatgcgatacgtgaaaattacaaagacgaaataaaacacattttccaattacaaggattgaaatttggagatgcactttatactaaattagttgaaacaggcaagaacaaaaatgacggcagtattttttacaaacgccctttgcgttcacaaaaaggattagttggtaaatgtactttagaacctaataaataccgtgcaccaataagccatccaagttttgaaactttcagagcatggtcttttttaaacaatataaaatacaaagaaaacaatgagtggaaacaattacctcttgaactaaaacaagagatttattctgaattgtttttcagaaaatcaaaagggtattttccattttcagaaattgttacatttttaaagaagaaaggaaaaaattgggaattgaattataaacccaaaacaactgtaactgcttgtcctgtatcagcacgattgaaagacatttttggttataaatggaatgaaacaattaccaaaaaagatgtagaggggaaaataattcacattacacataaagaccacaacggaaacgagttgggaagaataccattagaacaacctttttatcaagatgcttggcacgtattgttcaactacgaagaccaagaatatgtttatgagtttgccaaagataaactgaaaccaagcgaagaaagaaagagtgaaaaagaaaaatcagaagttgaaaaattcgtcattgcgtggaacgcttgccccgttggttacggaatgttaagcttaaatgctatcaacaaaataaatgtgtttttacaaaaagggttgatctataccgaagcagttttattagcaaacatcccagaaatattaggcaaagagctgtggcaacaaaacgagcaattactacttgctagtattaatggtgtgattgtagaaaacagaaatcaaaaatcaattctaagtattgtaaacaatcttatttctaaacataaaaatttaggtgaaaataaattcggacataaagacaacagctacaaattagttgatagtgatttaaaagacattcaaattgcaatagaagaacagtttggagcaacaaaatgggagagtctccctgatgaagaacagcaaaatattcttggtacggtaaaagattgttaccaggcttatttctctaagcaaggcattgtaagagataacggaagcgaggagcgaattgttgctattcaatccaacgggaaaaattatcacaaaacagatacaggttattatcgtttgcctaagttgattgatacccttaaagtatttttgcaagataattttgagaatcttgacgaaaaacagctttcaaaaatttatcatccttccgaaatcaatatttaccctccagcaaaagaagacaaagacggaattataaaattaggtagccccaaaacaggttcgtttaaaaacccaatggcgatgcgtacgcttcacgagttacgcaagttgatgaattatatgattgaaaccaatcagatagataacgaaacacgagttgtggtagaggtagcaagagacttaaacgatgccaataaacgatgggcgattgaagcgtggcaacgtcaaagagaagccgaaaatcaagaatttgcggaagcaattaaccaacttttaaatgatgataaaactataaaagcaaatgccactaacaacgatgatattgataagctaagattgttctacgagcaaaatacagaacaaacgcttcccgaagtcgtagtaatggaagaagatgaaaacggaaaaaagaaaaagaaaaaacctgcggacaaagacgaagcaataagatggagcggacacggtaaaaaactaattgacaaataccgtttgtggaaagagcaaggatatcagtgtttatacacaggcaagttcattaagctaaccgatttatttaacgaaaacgtaattgactttgaacatactgtccccagaagtatttcatttgataattcattagcaaatctcacagtgtgttttgctgattataacagaacgataaagaaaaatcaaatcccttcacagcttccaaattattcagaagattctggtggctatactgctatattaccacgtttagatgcatggaaagaaaaagtagaacgcattaaacaacaaattgatttttggaatttaaaatctaaaagaggtagtaaatctgtaatgattgcaaaaggcagtaatatatcaaccaaagacgatgctatccgtcaacgccatttatggcaaatggaattggattattggaaaaacaaagtagatagatttaccataaccgaaattacaagcggttttaaaaacagccaaaaagtagatacacagttgatttcaaaatacgcatttcattatctgaaaacctattttgataaagttgatgtgcaaaaaggaagtattacagccgagttcaggaaaatatatcaactgcaagttgcagatgaaaagaaagatagaagcaaacactctcaccatgccaaagatgcagcagtattaaccctaatacctgttgctgctaaacgtgatgaaattttagaaagatactataaagcaaaagagctaaatccaaaagcctcgtttacggaagacccttacaaaggctttaaacgagaatttgtttggagaatagacgataacgttctaatcaacaacatcaccaataaccaagaacttacgcctgcgaaacgaaaagtccgtaagcgtggcaaagaagttattgtaaatggtaaaaacagatgggcaacaggagattgcatacgtggtcaattgcatcaagaaactttttatggagcaattaaacctgcaaggcgtggcgaaaaaggtaatattgaaaaagacgagaatggtaagttcgttcaagaagacaatataaaatatgttctgcgagttccatttaatgctgattttacaggcgtagataaaattgtagatgaaggactaaaaagacaaatacaagaacacatcaaaagagccggaaatttcaaaaaggcttttgaagaaggaatttatttacttgaccaaaacggcaagccacacggaaataaaatccgtcatattcgagtttatgcaagtgtttcagaacccttagcaataaaaaaacaaaccaatctttctgataaagaatacaaacagcattattgggcggggaatggagagaatattgtttgtgcttattacaaaaacgaccatttagataaaaaaggaaatatcaaaaaagacagagaactggaaattatcaacttatttgaaatatcagaatttaaaaaacacaatttatttgatgcaaatggccaacttgaattgtacagaaaagataaagacaacaaaacaataattgatgataatggaaataaacaaacgccttacgcaattttaaaagcaggaatgaaagttgttttctatgacgaaaggattgaagagttgaaacaacagaataatgaaaaagattgtgattacaataaacgtatcagctatagaacttataggattgtgaagtttaccggtgggcgattgacttttcaacatcaccttgaagcaaggaatgataaagagttagaaaatgcatatcctgaaaatatcgtttttaagaccgatgaaaagaacaaagatgttgcttatggaggcaggggaacaagtggatttacagaaaaagtaagcgatgctttaaaattcaatggacataacaattacgagccttttcctaaattgctttattctgttaattggttagattttgtagttgagggctacgattttaaaattgaaatggacggaagtataaaatggcttaaatagtacattcatgaacaagaaaattactattgaatttgcacggatgtatttaaagctatccaaagcagaaaaaaaagatttattttgttcattaagtgatgcagaacaaacagagctatgttttattgtgtcgaatctttacgataaaatatgcaaaaccttagattttaaggataattcaaagccgaatctggtaattgtatttggttcggataataccggatccatgtttgactttacagattttgttatatgatcaagcgcaccctctattttggcaatcctgcctatctgagtcttaaagacaaacaactgatagtgcgattgcctgaagttgagaaaaacagtcaacttgaccctctatttaaacaacaggagcaagccaccattcctgttgaagatattggtgtggtagtgctcgaccatcagcaaataaccatttcgcacggactgttagacgcattaatgcaaaacaatgttgctgtaattacgtgcaacaatacccggcatcctgcagggctgctactacccttgcaaggcaacaccctgcaacatgaaaggtaccaaagccagcttgcagccagtgagccattgcgcaaacaactatggcaacaaaccatcattcaaaaaataaaaaatcaagctgccttgttatcgcaacagcaaattgatgcaggccgcctctaccctgtttacaacaatgtgaaaagtggcgatagcgaaaatgccgaaggcgttgccgcagctttttactggtccaatatttttactaaaattcccgcttcgattgaatctgcacccggtaatttgttcaggcgacaacgtgatggtttaccacccaacaattatctgaattatggatatgcaattctaagagcaacgatggcaagaagtattgttgctgccggacttttgcctaccaaaggcatacaccaccataaccgctacaatgcctactgccttgctgatgacctgatggagccctacagaccaatagtagatcaattggtcatccatattatccttaaacatggcatcactgacgatctttctaaagttattaaggcagatttattgactataccggtgattgatgtaaaaatggatggtgaaaacagccctttaatgatagccacacagcgtaccgctgcatccttggtaaaatgctttgccggtgaacaaagaaaattaacctacccggagttgtcatgaattttgaacgcctcaatgcctatcgtgttatgtggacacttgtaatgtacgacctgcctactgaaactaaaaaacaacgcaaactggctgcccaattccgaaaagatttattgcaggatgggtttcagatgtttcagttcagcatgtatttgcgacacagcagcagcagcgaaaatgccgaagtgcataaaaagagagtaaaaaaatcattaccctcagagggcaaggtaggcattttacaaattaccgataagcagtttgggcagatggaaatattttatggcaaaaaagcacaagacaaaccaccaacctcacaacaactagaattgttctgagaaagttaactgttgagcaatcaatagccataaaaaatcccgccctgatagcgggattttaagttctttagtttgatttttttatcctgattttgtactattattctaacaatctgctttttacgttagagatattgaaagaactaagacaaagataaaatttgaaagcaaatcacaacaatactttctgttttgctcatattgctcaaattgaaagaactaagacaaagataaaatttgaaagcaaatcacaaccatttcatttttactccttttgcttctccattgaaagaactaagacaaagataaaatttgaaagcaaatcacaacaatgttctataatatattcacattgtgtagattgaaagaactaagacaaagataaaatttgaaagcaaatcacaactgttcgttgttcatcatttgtactatttttattgaaagaactaagacaaagataaaatttgaaagcaaatcacaactcaatatgcttgaacattcttgcgattgtcattgaaagaactaagacaaantccgggcgggcaaatcacaactcagcgtaataaaaaatgttaatcgctttattgaaagaactccaccattctaaaataacgaggtaacctccgccactttgtttgaaagttttcccgaagataaaatcctgtatttaaaaaataaatagttaatccatcttgttttctatttctgactccacctgatcttccatccattgcaattgctggcgttgctctttagttaaactatcagccatctgcttggatttttgcagacgtttgttgttttgcattctttcttctaattttctttctacctccttgaggtgttgataggtgggtgatgttgcagtatcccatgccggttttggtggaagtgactgctcatattccatctgcttttgttttttataatcatcataatagctgatgataaatgcaatggttgataaaatgagcactgcttttaaaaataatttcctcatcaattttataaattaagattaaaattatttcttattctttctttatctctgattaatacttaattaagtatgtatgacaaaaatacaactgaaattttaattaatttttacagagttaatctaggttaatttttaatgcaaagtattggtctatcattgcaccgtaaattaaaaaaaataaaagatgaaaaaactatttctaagtgcaattgcagtaactatggcttttagcttaaatgcacaaacaaaatggactgcagacaagagtcattctaaaatcggctttaccgttacacacatgctcattgctgaagttgaaggtcattttaaagatttcacagcttcaatgacagctacaaaagacaattttgaagatagcaaagttgagtttaaagctcctgtttcttctataaacaccaatgacgataaacgcgatgaacatcttcgtggctcagatttcttcgacatggccaatcatcctgaaatttcttttacaagcgtaacctttaaacctgcaggagataaaaaatttaaagttgtgggcaaccttaccatgcgtggagttaccagaagtgtaacacttgaagctacacacatgggtactgttgaagatccatggggaaatactaaagcaggatttaagttaaccggaaaagtaaaccgcaaagatttcggtattgcctggaataaaacattaacatctggtggtgcagtggtgagtgacgaagtggctatgaattgtatgatagaactgattaaacaaaaataagtgtgaattaatattttgtgaggcagtcttttttaaggctgcctttttttattcactcaaaacgaaaattaatcagaaatttaatctgataccagaaaacacacctatgctactcagcttttcgcgaatggctgcccccttccggctgatgtcacttaaatgataattatatttaggacctatgagtacatcaatattttggaaaatactataggtagcaattacttcggccgaaacacctaaaccgatgttttgtttataaggtgatgaagtagatgaaatatctatcagagactgcatgctttcatgaattattttccctttatagcctgaataaatattcatataaatacctgcgctgctttgaatgttccataaacctttgttataacgccatccaatcattaaaggtacattaacaaaactaaagtgatttgaaataataacttcgcctgttgcattaacagagccaacaatggtgtcagctaccaaatcgtttgtgagcggattgatataataaccattgatagaatcaatccgcattcctaccggaagatttcccatacccggtataaatgtatagctgagtcgttcattcatttcaaacatgtctattcccgtcttaaaaaagaatttgctgtttaaccatactcctgctctgattccctgactatgagaataaatgtttgtctctgtgttacgcctcagtttcaggtaggcagggctaccacttcctaaatcgcgggtatgttgggcaaactccggtgcataataaacatctgcaaatacgtgaacacctttcttggtttttctgatttctgaattcggtttgtctgcaataagtgcctgactaattacagcttccggtaatgatgcttgtatcggattaagtaaatcccattcactaatttcaacctgattactgaaatctgttgtagctgcaattacattggttgttactaaagtttttgggacagtgttactatttgttgtgagcgtgctataattaatttgacctgaattgttttttattgaattgtttacagcatgattgtctgatggaggaacagcattgtttagcatctttttgtcttctgtattcttttcttcagaggctatgttactaagtatcttcggcttgtttttattattgccttctaaagaagattcttcgatttgattagaagtaaaataataccatcctgcacctgcaggaattaaaagcaatagtatcaaccaaaacaattttttattaaaaaggtcttgcttggcaacaggtaaatctgcttctaccctactccacagtccggcacttaccgactcttcttcggtttgcaacttttgcctgatcagatcatcaaatttttcatcctgcatgactgtatgctattttatttttttttaatttttgctgtaaggccaacctcgctttcaataactgagtacgtgatgttgcctcagaaatgttaagactatctgcaatttctttatgcgaaaaaccttctatcacatacatgttaaatactaacctgtagccatccggcaatgcatttatgtgtgctttcagttctttgacagacatttctgcaattacatcaccatagtcataaacaggtaaattgctatgaactaatgccacttcttcgttataactgtaacgtgtaatttttgtaagtgctgtattaaccattatttttcttatccaaccttcaaacgatccttcaaaaccaaacttcgatatatacttaaacacttttataaatccttcctgcaaaacatcttctgcgtcctcatggttattgacatagcgcatgcaaacgactttcattttgccggcaaacttttcgaacaaagctttctggcattttctttcaccgcgaatacaaccttcaattagttcacggtctgtcataagtatattgaatgcattccatttgtaaagactcgctacatcagacaaatgttgcctgacttttgtgctttggtaaaattaattaataaatagtataataatacctatgtttacgaaaaagataatgggagaaaaaaccaactaaaaaaaattagctatgctgtttattaagacagcatgtgcttaccgtactttattgccaagcataggaacaaagcgaaatgagttgaagtctgagacttccatggtttgatccggttttttaacaacggttttcataacttgcacatcttcaccaacgggaacaaccataacgcctcctgtcttcaattgctcaaacaatagctgtggaatatcgggtgcaccacaggtaataattatcttgtcaaatggtgcaaatgccggcagccctttaaatccatcgccaaaatgtattttaggcatgtagcctaatttttcaagtaatgtttttgccttatcagaaagcggtttatgcctttcaatagaaaacactttagcacctaactcgcagagtattgccgtttgatagccggagcctgttcctatctccaacactttatcacctttttgaatgcccagtaacatagtttgaaaagcaactgtatagggttgtgaaatagtttgaccggagccgattggaaaggctttgtcaatataggctgattccataaatgcattatccataaatgcatgacgtggaatttttgtcatggcagcgataatggctgcatcatttattccttttgactttaattctgtaattagctggcgtcttaatccctgatgcttaaaagtgtctgtaatattcattgcaaacaaatttaccactcccataacaaggaattactctgatgcaataaaatttttaacaaaaaaatgctgatgatttttttaatgaatgcctttatctgccagataacgctcagcatctaaagcagacatacaacctgttcctgctgcagtaacagcctgtctgtaaattttatcctgtgcatctccgcaggcaaaaaccccttcaatatttgtttttgttgaccccggtttggttatgatatagccggtcttatccatatcaagccatcctttaaaaatagctgtattaggttgatgcccaattgccacaaaaaagccggttacatcaagcacacgttcttcaccgcttacattattaacaactttaacagcagacacgcttttctcacctactacctccttggtttctgtattaaataagacttcaatattgggtgtgttcattactctgtgttgcattgcttttgatgcacgcatttcatctcttcgcacaatcatataaacttttgtacacaacttggccaaataagtagcctcttcagcagctgtatcacctgcccctacaattgccacatgttgattgcggaaaaaatatccgtcacaaactgcacatgcagaaacaccaaaaccattaagtcgttgttcgctttctaatccaagccactttgctgatgcacctgttgcaatgataactgtatcggctgtaatttctttttcttcgtcaataattactttatgtacaggtcctttaaaatcaactgatgatgcatagccccatctgatgtcagtgccgaaccgttcagcctgctgacgaaattcttccatcatttgcggacccatagttccttgcggatatcccggaaaattttctacttcagtggttgttgtcaactggcctccgggttgtaatccctgatacattacaggttttaaatctgctcttgctgcatagattgctgctgtatatccagcaggacccgatcctataatcaggcattttacgtgttcactcttttcactcattgcatattttaattaaacgcctcaaccaatttaaggctttggtttgcattgtctatttctgtttctaattgtgttatctgtgttctgaatttatctacctctgctgccaatgaaacattttctttctctaatttctcattcttctctcgcaacttatctgctcctacagcattatttgaaatgtcttctgtattcaggctaattgctttgttgtttttttcagtttttgactgattgttgctgatatttttttccaagcctttaattttcgacctcaggctttttatctgatcatcataaaacattttgtaatgaaaatgcacatagtttacaaccaatgctcttgcacggtcaaactcttccttatacatggtgttgccaaaatgtatatcataacccggactgaattgaaatgctacggcagtaccttttgactcttgtgtaaatacagcacgctggtcaatacgaagacttgaaatctctgaaaacatttttttatccacagaatgaacatttttacttctgcggctaacacgataatcgaagttctttcgcataaattcactataagtagaaatacaatagctcatatcctgatctaaatgcgctacccatgaatcaacactctttgactcttcgtttaaagcaggcttattttcaatagaaagctgttgtccgtttatgttggagtaaataagtatgctgaataataatgctgaaaatattttcattttactttctgattattgtttgcgttctatcggggccaactgatactacatctaatggaataccggtgtatttttcaattgcctgaatataattgtgcaattcagatggtaaactttcaaaactacttgtcttgctgatatcacgatgccaacctttaaaagaaatgtattcaggttccggaatttcattcactacgttaaagggcattcgcatagaaggctgtccgttcactttataagaattacaaacctgcaagttttcaaagccactaagcacatcagatttcatcatcatcagacttgtaacaccatttatcattgcagtatatttcaaagcaggcaaatcgagccatccacaacgtcttggacgcccggtggtgctgccaaattcattaccttttttacgaagttcttctcctgttgcatcatttagctcagatggaaacgggccactgcctacacgtgtgcaatatgccttgaacacaccaaatactttacctattgccgaaggaggaacaccaagaccaatacatgctcctgctgttatagtattgctggaagtaacaaatggataggaaccaaaatctatatcgagcagagaaccttgtgcaccttctgccaaaatccgttttccggaattaatcagattgtttatttcatattcactgtccaccaatgtcatttctcgaagtgttgaaatactttcgagccacatttcaaggtcatctttgctgactgtaggatggttgtagaatgaaagcagttcagcatgtttgtttaacaatacatgcaatgcatctttgaaatcatgccgttcaatgtcgccaacacgcagtccgttgcgtccggttttatccatgtaggtaggaccaattccctttagtgttgaaccaattttagtcttgcctttcatggtttctgatgccgcatcaagcaaacgatgagtcggtaatatgagatgtgctctgcgagatacccaaagatttttctttatatctattccgagctttagaagtgaatcattttcctttttaaaaatcagcggatctataaccacaccattaccaatgatgtttagtttattctcacgaaaaattcctgatgggatagtatgcaacacatgtttaataccatcaaactccagggtatgtcctgcatttggaccgccctgaaaacgtgcaatcacgtcatagtcgggagctaaaacatctatcagttttcctttgccctcatcgccccactgaagtccaagtaatacgtctattttcataataattctattattcagatggcagcaatggctgcttcctgattatcggttatggtaaaaacttctgtcaatcttgtaattgtaaagacagattttagctgactgttgatattgcaaataatggtgtcgccacctgccttgcgtgatttggtaagaatgtttaatagtacggtaagtccgctgctgttcataaaacgcaaatcagttaaatcgagcacaaacgatttcatatctctgataatacaggtactaatctcgtccatcagctcattagcctgacccttctccataagattacccgaaagtttaataatgcagaaattccctttttctgaagtggtaaagctaaaattcattgtttttttattttaaaatgttcgcatgcccctgtttgtttgagtttattacactgtccgtaaaaattcaaggcatgttgtgatattttgaaatctaaatatttttctactgttgactgaatctgataaagtctcggatcgcaaaattcaaatactttttcgcaatcaccacaaatcaggtgatcatgttgtttataggcaaacgacttttcgtaaataaatttggtctcgccaaactgatgtttggttattaaaccacatttcaataaatgttcaatagtattataaactgtagcacggcttactcttaacttgcgtttttgaataagttcaaaaagcatgtccacattaaaatgaccatttgtgcgataggcttcttcaagtactgcataacgttccggtgttttgcgtagcccattgcttaccatatattccgtaaaaatttctttctctgtctttaaaaattccgcttctgccacgttaaacaaatcctattttagttgccacaaaagtaataaatcaaactgttatggaatttccaatgagagtcaggattttatg

SEQ ID NO: 2588 - DNA, 24413 bp, synthetic construct
  source 1..24413: mol_type = other DNA
  misc_feature 1..24413: note = Synthetic
gaggcgaaaatcctgataaagcattagaagaaaacttcccactgatttatggtttagtggcattgatattaatagttttattgtttattcagtttaaaaaagaatgtaacaatattggtacaaataatattcctgacggttccccagaaacaatacaaaataataatccttttgaataatgaataattggtttttaatttatagtacaagagatagcgtacaagcaactattttaaaaggcatgttggaagaaaacgagatacctgtacaaattttaaataagttggatagcagttatttggcttttggatatatagaattgtacgttccaattcatttaaaagaaacagccctattgcttatacaaaaagggctgcttaattagttgattagttgatatccctatttttcttacacatctaattttgcatacttggcatttgcttcaataaattcacgtcttggtgcaacatcgtctcccataagcatactaaaaactctatcagcttctgcagcactttcaatggttactctttttaaaactcttctactggggtccattgtagtttcccataattggtcggcattcatttcacctaaacctttataacgttgtatggtaacactatcttcttttcctgctcctagtttttctaccaattgttttctttgttcttcgttataagcatactctgcttcttttcctttctttaccaagtataaaggtggttgggctaaataaacatagccttgctcaaccatttctttcatgtatcggaaaatgaaagttagaattaaagttgcaatatgacttccatcaacatcagcatctgtcataataattaatttatgataacgcagcttggtaaggtttaatgcttttgggtcttcaggagtgccaacagttacccctaaagctgtgtacatatttcttatttcttcgttttcataaattttatgttccattgctttttctacattcaaaattttaccacgcaatggaagtatagcttgataacttctgtctcttccttgctttgcagttcctcctgcactatctccttctactaaatataactcacattttgctgcatctctttcactacaatctgctaattttccaggtaagccaccaccactcattacatttttgcgttgtactaattctcttgcttttttagcagcaactcttgcttgagctgctaaaattactttgctgataacgtttttagcttcttttggattttcttctaaataggcttgtaatgcttttgatactgaggtttgtactataccacttacgtcgctattgcctaatttggtttttgtttgtccttcaaattgtggctcaggaacttttacagaaataatagcacttaagccttctctaaaatcatctccctctacttctacttttgctttttcaaataatccttctttatctccatagcttttaaatacacgagttaatgctgttctaaatccacttacatgtgtacctccttcaatagtgttgatgttatttacatagctaaaaatatgttctttaaaatcatcgttgtacgtcatagcaacttctactgctacattgcttggagcatcatacccttcaaaatataatgttttagcaattaaagggcttctgttgctggctttatccaacatttctacaaactcaacaataccgccttcgctataaaatgtttttgaaaaagttgagccatcttcttgaacatctcttaaatcatttaaagtaatggaaacttttctgtttaaataagccaactctcttaatcttcctataaggatatctttattatactctgttacttgaaaaatagtagcatcgggccaaaaatgaacttttgttcctgttttatcgctaataccaatttctcttacagcatattgaggaacaccaattttatattcttgctcaaatatttttccttctcgttgcactgttacatgcatggtagagcttaatgcatttacacaacttactcctacaccatgtaaaccacctgaaaccttataagtatttttatcgaattttcctccagcatgtaacacggtcattacaacctccaatgcacttcttttttctttagcatgcatagctgttggaatacctcttccatcatcttctacacttatactattatcttcatgaatagtaactttaatgtttttacaatagccagcaagtgcttcatctatactgttatctactacttcatacactaagtgatgcaacccttttacacttatatcgccaatatacatggctggtctttttcttactgcttctaatccttctaaaacctgaatactgtcggctccataatttttttgttcttcgctcataatgcttattctgcttgaattttattgattttttaaacgcctgcgaatatacagataaaagctggtttttttgctttctttttcaactattttatgcactattttaagggctgatataaacaaaatggcttattttactgaaaacaaatagttttgctttcaaatgatgagcgaatatatacaaataggaaaagttgtagctacttttaatgtgcaaggagaagtaattgtaaaacattctttaggtaaaaaaacaaatttcaaaggcactgaagttttatttgtagaactcattaaaggaaaatttattcctcattttttagtacatgctaaagcaaaaaatgaagaagaatgttatgtacaatttgaaggaataaacagcaaagaagctgctcataaacttattggaaaacctatatggcttacagaagaagcgtttagaaaacaagcaggaaaaaaatctgccattgctttgttagattatactgttattgaaaataatacaatactgggcaaggttaatgaagttattgaacaacctcatcaagttttattgagcataacttataataacaatgaagcctacattcctttgcatgaagaaactttaataaaaatcaatcattcaaaaaaagaaattcatgtacaactgcccaatggattattggatatttatgcctaacaaataaatactactactccttacattttaaaccttcataaatattatcttcgccgcttgaataagcaacgaatatgacaataagttacaactggctaagtgagtatttacctgtatctgttgaaccagaaaaattatctaaaattttaacttctgtaggattggaagttgaaagcatggaaaaataccaaagcattaaaggaggtttggaaggtttaataattggtgaagtattaacctgtgaacaacaccctaatgcagataaattaaaaattactacagtaaacattaatgctcagcaacctttgcaaattgtttgtggtgcaagcaatgtagctcaaggacaaaaagtagttgtagcaactgttggtacaacaatttatcctttaaatggcgatgctattactatgaaagttgcaaaaattcgtggtattgacagctatggaatgatttgtgctgaagatgaaattggcttatctgccaatcacgatggaattattgttttacccaatgatgtaacagttggaacaactgctgcaacatattttaatccctacaacgatattatttttgaaataggacttaccccaaatcgtatggatgccatgagtcattatggtgttgcaaaagatgtgtgtgcttatttaattcaccacaacaaagaagattttaaaatcaaaaatatttttaccaataactttaaagcagataataataatttacccatacaagttactgtagaaaatacaaaagcttgccctcgttatgctggtgtaagcattaccaatgttgaaataaaagaaagtcctgcttggttaaaaaataaattaactgctattggtgtaaaatccatcaacaatgtagtggatattaccaatttcattttacacgaaacagggcaacctttacatgcttttgatgcagataaaattacaagcaagcatgttgtggtaaaaaatttacccaacaataccagttttattgctttagatgaaaaagaaagaaaactctctgaaaatgatttaatgatttgtgatggaaacaatacacctatgtgcataggtggtgtttttggaggattgaatagtggtataaaaccaactactaaaaatatttttttagaaagtgcttgcttcgatgcaactgccattagaagaacttctatgctgcacaatttaagaacagatgctgcaaccagatttgaaaaaggagttgatataagccatactgtagctgtattacaacgtgctgcaactttaataaaagaaatagctggagggaatatttcgagtgatattatagatgtatatccagaaaaaaaagccaagcaagaagtttctttaaaaaatcattatttaaaaaaattgagtggtaaaaattatcatccagatgcagtaagaagaattttaacctcacttggttttgaaattgtaaaagaaagcattgatgaaataagggttgctgtgccttttaataaaccagatattgaattgcctgctgatattgttgaagaaattataagaatagatggattggataacattgaaattccttcctctattactatatctccccaaacagataatatggaaataaaagaaggattaaaagaaaaaatggctcattaccttatagggcaaggctttcacgaaattcttaccaactctattaccaatagcaaatactattctgatgcagttttaaacaatactgtaaaaatgctcaataatttaagtgccgatttagatgtattaaaaccacacatgcttgaaacgggtttggaagtaattgcttacaacatcaacagaaaaaacagtaatttaaaattgtttgaatttggcaaaacttatttcaccaatgaaacaggaaattataaagaagaagaacatttagccctttatattacaggcttagagcatgaagatgtttggaataaaaaggaaaacaaaatagatttttatacagctaaaggtattgctcatgcagttttaaatgttgcaggaattgagcatattgtttttaaaccttctgaagaaaatgcacttgctttagaaatatatagtggcaaaataaaacttggatttttgtatgaagtagcaaaaagtcaaacccaaaattttgatatcaaacaacccgtattttttattgattttaattatgctgcacttttaaaacaagttacagaacaaaatattatttatcaggaaatcagcaagtttcctgcaatgcaaagagatcttgcaatgcttgtaaatactaatgttacataccatcaaatagaacaaacgatacaaaaattaaaactgaataaactaaaaaacattcgattatttgatgtatttgaaagcgataaattaggaaaagataaaaaatcaatggctgtaaatttcacttttagcgatgaggaaaaaaccttaacagataaagaaattgacagtatgattcataaacttattcaacagcttgaaaaagacttggcagcagaaattagaaaataatttttagaagtttttttttgaatcctaaatcttcatcaaataattacatttgtaatcaatgaataatagcatagaaatacaattaactgttttacaaaacaaattgcaacaactgttgcaacgctatgctgcattacaaaaagaaaatgaacagttaaaaaaagaaataaaaaaactacatcaaataaatataaatggagtaaaaaattctgttgatgtagaaaaaaagattgataaatatttagaagaaattgacaagtgtttgcttttattaaacacccctttataataaaaaaatgtctgaattaattcctgtaaatattgtaattgcagatagagcttaccgacttaaaatagaatctgctgatgaagaattggtaagaaaaacagccaaactcatcaatgaaaaaattgtagagttcaaagaaaattttgcaggaaaagatatgcaagattatgttagtatggctcttttatggtttactacagagcaaaacaaaacagggcaagcaatggttgctttgcaagaagctgaaaataaattaaaagcatttgaacatcatttaaacaaagccttaaacgaaacaaaataattttttcattccctaattttcttctttaaactctttcctattttcggtaatttgctgtattaataaaactacatttgtggctcattctttattctttatacaaattttgctttaatacattttatgtctttacaattatacaatcctttcgaaaatatgttcttcaacaacaaaacctgtttcttaacaggcgaagaattatttaacgaaaacgaaaatattaccgtatttccggaatgggttttacaacattatgagctcagcaataccaaatttaccatgatggataatgtaacctttttcctgtacaaagacataaaattgccttgcacaaatttggttaaaactgcttttgaaaaattagacgaagaaataaaaacagcctttaataaaggctacgatgctgtaaaaaaattagatacacacaaactttttttatggacaggcagaatggtttatggtattttgtatcacgatttaatcattgaaaaggaatctaaagaaaagaaaaatatagcgtttacaatatctccagcccttaaaaataaatttagcctttttcatttaatgcttcaatccttagttgcaccaattgaatttggaagtttaaaaccttggagtataactgttgtaaaattaaaatattcaaaagaaatttttaattacagagacgataccattaacctcgttttttcgcttggcaccaatgagtttggcattattgcaatgttgcaagacaatgaaattattaaacaacatgaaactccattgctcgaaaaaattggagaaactattttgcatcctattcagttcgaagagttaaaagcaagatttatgtacaacaattatttattacagtacaaaccccaatatcaaattgaagaaaaagaaaataaacttgttataactgcacacccttttagtactacaaatgaaaataacttatttgcaaaatgggatgataaaatgttttcagaagtgcttgtagaatattggaaaacttggggtttgaaaaaaacagaaattgtaacctaccccaatgctcctattagttttttagaaaatgaaaatacctacgagtttattaacccagaatcgatagaacttcctttttaataaaaataaaaaagcccagtattactgagctttgcattaaaaaggctacggattaattagggtacaaattattatttacctcctcctgcttgatattttaaaatatcggtaaagccccaatcgccattattcaattcataacgaattaaataatacattgttgaacttttaggatttgattctatataattataatttttaagttgagaactattggtattaatatcagtagaataaataacacataatgtattgggtgttgtgccactcaataattctattttactaatatttttttcgtataaagtagaaaaatctaatttaatagatgaagcacctacagcatttgcagtaaaagaagttacagccaaataagcatctctataaaataatggagtgccagtttctgcttgagtttgaggcataaaattatcttgtttggaacaagatgtaaacaaaataattgcaaataaaaaacctaatacctttttcatttcctgaaattataattgataatttaatttttactttcaggtaattcaaagaataaaaatggacttcgttaagtttttacgagtagaatattggataattcaaagttatattttataaatcaaagcaaatgccaaacaggaaaaagatttttaaattaattacaactaactaattatcatgcacttatatttttttaaaagaatgcaaatacctgcaaaaaaaagcgaatttatcccaattttggacttgcattgcaaaattaggaattgttctataaatgaattttatagcataaaaagtaaaaagtaaacgaaacgtggtcttaaaaatatattgttaagcatttatttattgcacttactgaaatttctaattccaatttatttatcttcgctacctatcgtttttaaatataaaaatgtattaaaaaatgattttgtacttattaaaattaaaaaaacaaacaaaaaatggagccaataatattaattattataacaggtgttgtatgcttaataggaggaatactggtaggaaaactaatttttacccctaatttcaaaaaaagaattgatgaagcagatttacaagcccaatctttattaaaagaagctgaacttaaagcagaaaatttaaaaaaagaaaaacaacttgaagctaaagaaaaatttgtacagcttaaatcacaacacgataaagaagtatttgaacgtaacaaaaaaataaacgatgctgaaaacagaataaagcagaaagaagtttctatcaatcaaaaagaaacagctcttgataaacaaattaaggaaaacgaagccatcaaagacaatcttaatcgtcaaattgatgttgtaaatttaaaacgtaatgaacttgaaaaacatcaggaagaacatataaaacgattagaaaaaattgcaggtttaagtgccgaagaagccaaaacacaattaattgatagcttaaaagccgaagcacaaacacaagcattaactatacaacaagaaattatagaagatgctaaacaaaaagccaacaaagaagctcgtaaaattgtaattcaaactatacaacgtacagcagcagaacaaactattgaaaatgtagttacagtttttccgctcgatacagatgaaataaaagggcaaattataggaagagaaggaagaaatataagagctattgaagctgctacaggagtagatttaattgtagatgatacaccagaagcagtagtactttcttcttttgatcctttgcgtagagaaattgcacgtttaagtttacaacgcttggttgcagatggtcgtattcatccaggtcgtatagaagaagtggtagaaaaaacacgcagacaattagatgaacaagtaatggaaattggcgaaagaaccattatagaattaggtattcatggtttacataaagaattggtaaaaatggttggtagaatgcgttttcgtagctcttatggacaaaaccttttaatgcacagcagagaaactgcaaacctttgcggaataatggcagcagaattgggcttaaatcctaagcttgcaaaacgtgcaggtttattacacgatattggtaaagtgccagacgaagaaacagaattaagccatgctttatacggagcaaaactcgcagaaaaatatggcgaaaatcctgctgttgtaaatgcaattggagcccatcacgatgaaatggaaatgcaatatgtaatttctcctataatacaagcctgtgatgccattagtggagcaagaccaggagcaagaagagaaattatgcaacaatacattcaacgtattaaagatttggaaaacttagcattaaattatcaaggagtagaaaaagcttatgcaatacaagcaggtagagaattgagagtaatagtagaagcagaaaaagtaacagacagcgaaagcgataaactaagttttgaaatagcacaaaaaatacaaacagaaatgacctacccaggacaaataaaagtaactgtaattcgtgaaaaacgagcagtaaacttagccaggtaaaacaaaatattttaaagcaaaatgtcgcaccaaaacagtgcgacattttttttattaataccactcaaatatggaattaaaaatttatattagtgctttgaaagtatggggaaataaaaagccccaccgaagcagggctaagaaatcttcggcttatagccttattgtgatttgctagtcaaatatagcattaaaaattgaaaacaaattaatatgagcaaaatttttggacttgatttaggaaccaactcaattggttgggcattgagaaatcctgacttgaaagaaaaccaaattgaaaaattcggtgtattgacctttaaaaaaggtgtaggtagtgaaaagggtgtagagtattcatttgcggcaaaacgcactaaaaaacgttctacacgcagattataccaagcaagaaaatatagactatgggttactcttgaaaacttaattcaagaaggctattgccctttgacgattgaagatttaaacaaatggcggcattacgataaagccgaagcccataaaaacaataatgcgggtcggacttatcctgtttggaacacagcatttgatgcttggataaaattagattttgacggcaacggaaaacccgattacacaagcccctatcaattgcgaaaggaattagcagaaacgaaattggattttagtcaagaaattaatcggttcaaattaggcagagccttatatcatattgcacaacgcagaggttttaaaagtagtcgcaaaggtgcagatgatgtgaaagaaaaagaaaccaacgaaaatgatgaaacattgaatttgcaatattctgaaaagaagaaaaacaaagtcattgccgaattatttgaaaaatacacagaagccaaaactattggttggcttttcgcttcattagaaaatgataatattagaattcgtgaaagtattgctcaatacgccattcgagaaaactacaaagatgaaatcaaatatatttttcaagaaactcaaaagttaggccttgaacattctctatacaaaaaattagttgaaacaggcaagaacaaaaatgacggaagcattttctacaaacgtcctttgcgttcgcaaaaaggtctgattggaaaatgtaccttagagcctaataaataccgtgtaccaatcagccaccctagttttgaagcattcagagcttggtcgtttttgaataatatcaaattcaaagaaaacaatgagtggaaacgattaccgcttgaactgaaacaggaaatttattccgaattgttttttagaaaatcaaaagggtattttccattttcggaaattgctatgttcataaaaaagaaaggtaaaaattgggaactcaattacaaacccaaaacaaccattacggcttgtcccgtttctgcacgattaaaagagattttcggtgataagtggagtgaaataatcacaaaaaaagattcaaacggagaagtcgtttacattacgcataaagaccacaacggaaatgagttggggaaaataccattagaacaacctttttatcaagatgcttggcacgttttgttcagctacgaagaccaagagtatgtttatgagtttgctaaagataaactgaaactaagtgaagaaagaaaaagtgaaaaagaaaaatcagaagttgaaaaattcgtcattgcatggaatgctttgcctgtgggttacggaatgttgagtttaaatgctatcaacaaaatcaatgtatttttggagaaaggattaatatacaccgaagcagttttattggcaaacattcctgaaataattggtaaagatttgtggcaacaaaatgaacagttattgcttggaagtataagtgaagttattaccgaaaacagaaatcaaaaaacaatactcaacatcgtaaacagtcttatttccaaacataaaaatgtagaagtaaccgaaaggaacggatataggaataataactacttattagctgacagcgattttcaagatattcaagccgctattgaagagcaatttggagcgaacaaatggaatggttttcccgatgaagaaaaacagcatattctcgatacggtaaaagactgttatcaggcttatttttctaagcaaggaattgtgcgagatattggacgtcaagaacgtatcttagcggttcaatcaaacggaaaaaattactataaaacagacaccggctattatcgcttgcctaagctgattgatacgctgaaagaatttttgcaagacaagtttaaaagccttgatgaaaaacaactttcaaaaatttatcacccttcggaaatcaatatttatccacctgcaaaagaagataaagatggagttttaaaattaggaagccccaaaacaggctcgtttaaaaacccgatggcgatgcgtacgcttcacgagttacgcaagctgatgaattatatgattgaaaccaagcagatagacaatgaaacaagaattgttgttgagatagcaagagatgataaaggaaaattagactatgccaataaacgttgggcgattgaaacgtggcaacgtcagcgtgaagccgaaaatcaggagtttgcagaagcaattaaacagcttttaaatgatgataaaaccataaaagctaacgctactaacaaagatgatattgataaactaagattgttctacgaacaaaatacagaacaaacgcttcctgaggttgtagaaatggaagaagatgaaaagggaaagaagaaaaagaaaaaatctaacgaaaaagatgaagcggtaaggtggagcgggcacggaaagaaattgattgacaaataccgtttgtggaaagagcagggctatcagtgtttatatacaggtaagtttatcaagctaacagatttattcaacgaaaatgtaattgattttgagcataccgttccgagaagcaaatcatttgataattcattggcaaatctcaccgtgtgttatgccgactataaccgaagcgtaaagaaaaatcaaatcccaacagcattaagtaattatgaaacagaacacaattttggtggaagtatcggaaggtgttctgccattcttccacgtttagatgcttggaaagaaaaagtagaacgcattaaacagcaaattgatttttggaaaacaaagtcaaaaaaagctgccgataaaagttggaaagacgatgcaatccgtcaacgtcatttatggcaaatggagttggactattggcaaaacaagttagaccgttttaccattacagaaatcacaagcggttttaaaaacagccaaaaagtagatacgcagctgatttcaaaatatgcgtttcattatttgaaaacgtattttgataaagtagatgtgcagaaaggaagcattacggcagagttcagaaaaatataccaactacaagttgcagatgaaaagaaagatagaagcaagcactcacaccacgccaaagatgcagcagtattaacacttattcctgttgccgccaaacgtgatgaaattttagagaaatattacgaagccaaagagaaaaatcccaaagccacatttacagaagagccatacaaaggtttcaaacgggaatttgttttcggaattgacgacagcgttttaatcaataatatcacaaacaaccaagaactaacgccagcaaaacgaaaagtccgcaagcgtggcaaagaagtaattattgatgggaaaaatagatgggcaacaggtgatacaataagaggacaactgcaccaagaaactttttatggggcgataaaacccgcaaaacgtggtgaaaaaggcaatattgaaaaagacgagaacggtaagtgtattcaggaagacaatataaaatacgtgttgcgagttccatttaatgctgattttacaggcatagataaaattgttgatgaaggattgaagaagcaaatacaagaacacgttaaaagagtaggaaatttcaaaaaggcttttgaagaaggaatttatctcttggacaaaaatggaaaaccacacggaaataaaatccgtcatatccgtgtttgggcaagtgtttctgaaccattagctattaaaaagcaaaccaatctttccgataaagaatataagcaacattattgggctgcgaatggtgaaaattttgcttacggtctttatgaaaatgaacacaaacaaagagggtttaagttaataagtctatttaaagtttcggaacttaaaaggacttctaatggtttaacagaaatgtttgaacaggaaattgaaactcaaaaaccaaaagccaaagtacagcttaaatatgttttaacttccggtttgaaagttctttttaacaaagataatttggatgaacttcaagatttggcaaatgatataaaacaaatttctaaccgcctgtatgtgattgacggctttgaaaaagatggacgaattaggttttctcataatttagatagtagatcagcaaatgacttaaaagaattagaaaatgtttatggaaaagcatattggcaagggttttcacaagtaattttcaacaaccctttgcctaaactaaaactatccaaagactctttaaattttgcagttgaaggttatgattttaaaattgaaatagacgggactataaaatggctgaaatgacaatctatttgaaaataaattagcataacgatgctccaattcaacaccttctaccatatctacaaccacgccaatggcgatgacaacctgtttcgtgaagaaaagaactatcctttctttcttgaaaaatatcatcaacatatagacccggttgccgaaactgttgcttggtgtttgatgcccaaccattttcatctgctggtaaaaattagaagcgaaaaggagatcgtagataatttttcttcttcgaaaacctcaacttttctaaagtttaaaactttagaaaagttagcggaggcggaagaagaaaaattaaaattcctgagtaaacagttttctaattttttcagcagttatacgcaggctttcaacaaggtatatagcaggcgtggctctttatttattaaaaactttaaacgaaaagaaatagcgaatgaacagtatttgcgtaacatcattctttatatccacctaaaccctgttaaacatggctttacaaaaaatataaatcattggttatggaattctttttcttcattttataatcaacacaaagagctagccaataatttatttatagatattttaaactaccaaaagaatcatcttcaaaaacaaaataaatttatagaatacgaaacgttagaaaatgaactaacttcataaacattataaaccatgattaaacgaaccctttgcatagaaacgccttgtcatttaaaatgctctaacgagcagttggtggtaagctatgcacacataaagggcttggaagacagggcagataaaacagtacctattgaagatattggcatgttgattttagaacatcagcaaataacattatcgcattatttattggataaattaattgccaataacaccgcagttattacttgcaacgaaacacatcaccccagtggtttatttatgtcgttagaaagcaatacactacaaagcgaaagatttaaagcacaaatagaagcaacagaaccattgaaaaaacaactatggcagcaaactgtaaaagcaaaaattcaaaatcaatctgcagtttttaaaaaatggaatattaaaaacacctacttaatcaatgctgcacaaaatgtaaaaagtggcgataccgacaacgatgaagccaaagctgccgcctattattggagtcatttatttcctgatgcctggcaattttttagaagaagagatggaccaccacccaataatcttttaaattatggctatgccattttaagagccacagttgcaagagccattgctggtgcaggattattggcaaccttaggaatttttcatagaaacaggtacaatgcttattgcttggctgatgatataatggagccttatcgtccttttgtagatatcattgtaaggagtataatagataaaacatcttctgtagaaacattaaccaaagaattgaaagcacaacttttattattaccaactgttgatgtggtattagataacgataaaagtccattaatgattgccacacaacgcacagcagcctctttagccaaatgttatataggagaaagtagaaaaatattgtaccctaatattccttagtaaaaagaagtagaattatgttgaatgtagtgaaacacttgtgcagccttagttcaacccctttcagcaattcttcctcttcatacaaaaaaagaaaaaatattttatgaatagcgaacgtttaaatgcttatcgtattatgtgggtacttgtattttttgatttgccaactgaaacaaaaaaagaaagaaaaatttatgccgattttagaaaaaaacttttacaagatggatttaccatgtttcagttttccatttatttacgtcattgtgccagtagcgaaaacgcagatgttcatacaaaaagaactaaaaaaaatttacctgagaagggacatattggtattttaacaataactgataaacaatttggaatgatggaaatttatcatggcaaaaaattagctccaaaagaaaacatacctcaacaattagaaatgttttaaaaaaatagcattaataaaaatgcctgttagcatgaagtactacaggcatttaagtcatttttttctttctaatttcttttaaaaccattgctcttattgcgtttcagctaaagctgttgttatcaaaattagaaagaacaaagtttgaaagcaaatcacaaccaggctgatacaactactaaaaacatgaaagttgttatcaaaattagaaagaacaaagtttgaaagcaaatcacaactccaatataaaccaatgtcgtttgggtcgcgttgttatcaaaattagaaagaacaaagtttgaaagcaaatcacaacatataagttatagtggtgttaaattgcatggttgttatcaaaattagaaagaacaaagtttgaaagcaaatcacaacccaggtagtccaattcttgacataaatggagttgttatcaaaattagaaagaacaaagtttgaaagcaaatcacaacaactgttatacaatcttatagggcattcgagttgttatcaaaattagaaagaacaaagtttgaaagcaaatcacaactgtccatacaaagccatttccccaaattttgttgttatcaaaattagaaagaacaaagtttgaaagcaaatcacaaccgccaagctcggcataaaattctttaatatgttgttatcaaaattagaaagaacaaagtttgaaagcaaatcacaaccctatagaactctgtattacatctctcttctgttgttatcaaaattagaaagaacaaagtttgaaagcaaatcacaacagcgaaaagataccacccagagcaataagagttgttatcaaaattagaaagaacaaagtttgaaagcaaatcacaaccaaagaactcctacacacagacttataattgttgttatcaaaattagaaagaacaaagtttgaaagcaaatcacaactatattttaattttttatagcaataacgccgttgttatcaaaattagaaagaacaaagtttgaaagcaaatcacaactgtagtaaaaaggcataattaaatattttagttgttatcaaaattagaaagaacaaagtttgaaagcaaatcacaacgctaagtctgtatctactcctccaattttagttgttatcaaaattagaaagaacaaagtttgaaagcaaatcacaaccatgagtttgttgacctgttttcggtttcagttgttatcaaaattagaaagaacaaagtttgaaagcaaatcacaacacttccaagacgattaccgcctaaatttacgttgttatcaaaattagaaagaacaaagtttgaaagcaaatcacaacaagctaattcttatagtttgaatggaattagttgttatcaaaattagaaagaacaaagtttgaaagcaaatcacaacctgttttagctccgtttctgcaagtatatggttgttatcaaaattagaaagaacaaagtttgaaagcaaatcacaacttttataaactgttttgattgttattaaaagttgttatcaaaattagaaagaacaaagtttgaaagcaaatcacaactgtacttatttcttaggacaggatactgtagttgttatcaaaattagaaagaacaaagtttgaaagcaaatcacaacttaacctcgcttcctctcactattctattggttgttatcaaaattagaaagaacaaagtttgaaagcaaatcacaactctgtaataattttaaaaccaattagaaagttgttatcaaaattagaaagaacaaagtttgaaagcaaatcacaacttttaagcaaataatatgaacgaaaaaactgttgttatcaaaattagaaagaacaaagtttgaaagcaaatcacaacaacagatattcgtttaaaatttaccacaaagttgttatcaaaattagaaagaacaaagtttgaaagcaaatcacaacttcttgtggagttatgatagattttacttggttgttatcaaaattagaaagaacaaagtttgaaagcaaatcacaacttcgttaggtcgcttgtgtcgtgatgccttgttgttatcaaaattagaaagaacaaagtttgaaagcaaatcacaaccaatagaaaagatatctattaaagaaaaaagttgttatcaaaattagaaagaacaaagtttgaaagcaaatcacaactcgggaaattgggctaaaatcgttaatcaagttgttatcaaaattagaaagaacaaagtttgaaagcaaatcacaacccattgattacggattttttgacatttacagttgttatcaaaattagaaagaacaaagtttgaaagcaaatcacaacttagttgtgggtaagtatctaaattgtgtagttgttatcaaaattagaaagaacaaagtttgaaagcaaatcacaacttagtggctggcgttcttaaattatcaaagttgttatcaaaattagaaagaacaaagtttgaaagcaaatcacaactaagcggttacgagttagacaatgcaataggttgttatcaaaattagaaagaacaaagtttgaaagcaaatcacaactagcagcacgaatagaagctggtgtaaccgttgttatcaaaattagaaagaacaaagtttgaaagcaaatcacaactagcagcagttttattgttaggtgtaatatgttgttatcaaaattagaaagaacaaagtttgaaagcaaatcacaacctgaaatcatctcaatttaactaataaaccaataaattacatacctcccaaccattcaggattagcgaatttaaaatctgtattttgtttgagcatttgcgatagaggcattccgtcaagatggagcagtatatcttttttgcttacgttttgtacaatgcctacctgccatggttttaaatattgtactttgtttttaccaaaaatatttccgtaagcaatacatgtacgcaacctgctgtctataatggcagttgcttttttatcggtacttaataaataccttatgaaatccatatttaccgtttcgtaagagttaccattttctgtaatggttaattcaggaccatcaacaaaaacaaaatcataaggatagtcaggtacttgggtaaatgctgtgccttttatgaaagagtacatataagtagtggcagggctatgatgtatttcagcatattcttttaattctttggggaaaatatttttggcttcattgtaccaacgttctatgctttccatagatattactaaccctttacccccccccagcaggtgattttgctgcaaagcatgagctaaaatccatgtgctttttcctgtaccacactccaaaatatactgtggcttatgtgtaataatatatgaatgtaagacaatataatcatacaattccgtacctgtggaattggatgctacattcactttatctaataaaggttgcaaattgttttctttaatatacttattgcaaaaggcatttgctttgttgagttgctgttgtcttttgtagcgggttaattttcctttgattttttttagttgatgaagcataatttggttattattgtaattaataaatataaaggttaaacataagaatttagcttggatattaaaaatgtatataattcatccgatatttcaattattgttatttacatatttcaatcgcagtactcaaaatccataatataattggctttctcaaataacgataaataagaattggcaacagggggtgctatatttgctattcgtcccaactgaataccgccattgtttgtttttattttagttgttatcaaaattagaaagaacaaagtttgaaagcaaatcacaaccgaattatttattttgttgtaagtgtactgcactcgcttctaaggcttcataaaattcttctccatattttcttatcaatgcttcttttaaaaatatatatacaggcatttttaattttttgcccaatgcacatgctgctttacacaaatcttctctgggttcgtaattaatgtattctaaatctttatcttctttactttttgaaatttttattggaaataaatggcagcttaatggttttttccattttgtttttccatcgttataggcttgttcaaaaccacaatgtataattccttttgcatctttttttgcatatacacaaatgcctccatttatggtaggtgttacccagccaaatgatctgtcatacacaaataatccttgctctttaatttcttttatcccttcttttgttaaatacggctttactatttcgtacgttttttctatttcttttttttcccaattttctaatggagctccagcatcaccatcttcgcaacagcctcctttgcatttatcaaggtcgcacacaaattgttcttctaaaacctcatcgcttattagtttgttgtctattactatcatagcaaattttattaacctacaaattcaaatttttctccatcaaataatcctttatcgctcagttttaaataaggaattaccaacagagccataaaactcaaagtcataaaaggtgcagctaatgtactgcctaaagtatttttagtcattacatctacagcagtataagcatcagctactttatagccatcttcattgctcattaatcctgcaacaggtaaggctacgctcatttctttaccatcgttgcttacagcacttacgcctcctttgtttttaataactgcattaatggcttttgcaagagtttcatcgttgcagccaactgcaacaatgttatgactatcgtgtgcaactgatgaggctaatgccccttgctttaatccaaaatttttaataaaacattttgctatgggtgcattggaataacgatttactacaaccatttttaaaatatcattctctacatcgcttacccattcattgttttgttgtttgccttgcaataaaagtttgttggtaattaattgtccttctaatgcttctataacataaattttattttctactgtggggtaatttcctacttttagttgtagttgttctgtagttattgtactacaattaaattgattgatgggtgttactggtacagattgtataaatgtttttccgttttctgctaccaactctccattgatataggtttgaagaattttaaatttttgtaaatcttgggctactacaaaatctgcatcatcgccaggttgcaataatcctactttcattttgtaatgaataacagggtttaaacaagctgcttttaatactttaaaaatattaatgccttttgctactgctctttcacaaagctgattgatatgacctattgctaaattatcaggatgtttatcatcgctgcaaaacattattttatcttcataatcatttaataaatctattaaggcttcgaaattttttgctgcacttccttctctaattaaaattttcattccgtattttaatttatccaaggcttcttcttttgtaaaacattcatggtctgtagatataactactgcaccatttcttaacccagatgcttctatgtattgttttgctttttctccttttaatcctggtgcatgtccatcaattggttttcctgatgcaagagcaacttctaattttttcattacctcttcgtctttaaacaacacccctggaaagttcatcatttcgcttaaatacacaatttcatctttctttaataaagcttgtacatcgttgctgtttaaggtggctcctgcagtttcaaaagttgtggcaggcacacaacttggtgcaccaaaattgaatttaaaatttacttgcttaccattttcaatcataaattctacgccttgcataccacatacattggcaatttcatgagggtcgcttatggtggcaactgttccatgtactactgcaagtcttgcaaattcgctgggtaccaacatactgctttctacatgtacatgactatctataaaacctggaagaatatagttttcggcttgtaaatttggcaaaggaacaatggattgtattttaccattttctacttttacttctcctgtaaaaatttgctgatgcaccacatctacaatatttcctttgattgaaaaactattttgttgcataaaaaatacttttagctattcattaatgtgatatttcaaaggtatagtttcctctataaaaaaagttatgcaaaattacttctacataactttcatttattcttaatagatgttttactacactaaattaatatcaaaatgtactaattgcacaaactcgtgtaagcgttctgcaatatcttctttagataattcttttaatctttctgtgccaaatttttctacacaataacttgccattgcactaccaacaataatggctgttttcatgttttcaaaacttatgtctttactttttgctaaatgaccaataaagccgccagcaaaagtatcacctgctcctgtagggtcaaatacatcatctaaaggtaaagctggtgcaacaaaaacattattttcattaaacaataatgcaccatgttcaccctttttaattaccaaatattttggacccatgttcattatttttttggcagcacgtactaaagaataatcgccacttaattgtcttgcttcgctatcgttaataattaatacatctacttttgctaacacttttttcaaatcgtccatagcaatttccatccaaaaattcatagtgtctaatgcaattaatttgggcttattttttaattgctctataacactaagttgtacagcaggagctaaatttcctaacattaaaaactcgcaatcctgataactttctggtacaactggtttaaaatcgcccaatacatttagctctgtaaccaaagtatctcttgtgttcatatccatgtgataacgaccactccagaaaaatgttttttcgtctttttttatttgcactccttctaaatctactttacgagcagttaaactatctaactcttcttgaggaaaatcgcctcctacaacacttatttgttttactggagtaaaattgctggcacaccaagcaatataagtgcctgcaccaccaattattttatcacttttaccaaatggggtttcaatagcatcaaaagccatagaacctacaactactaaagacatataatttgttttaaaattttatggcagcgaaactaaagatttgtattcaaattaaaacgaataaaaaagaagagttgttttttaggaataaatctatttagtatccaaaaagatgatttaaaaaataacacagcctaaacttctatttacagcattggaatgccttaatattcctctcaataattttatataattcagtttattgttcactcattttcaaaagttttgatttggtatgttttgattttgaaagtatttattttattgaatttatttttgaaaacgtgtttcatgaagaatatatttgaggatatttttgcaaaaagaagaataaattaggtagcacttctgtacaaataattatggcattgctaactaaacatatttacaattatctcaacaagtttttcttttacatttatacattttgaaaccatcaattagaactaattttaccacatgcaagaaaagaagctatttttattagatgcttatgctttaatttttagagcttattatgctttaataagaaacccacgctatacaagcaacggaaaaaataccaatgcacaatttggatttaccaatactttggttgaactcataaataaacaaaaaccaacacacatagctgtttgctttgatgtaggaggctctgtagcaagagaaacagattatgcagattataaagccaatcgtcaggaaacgcctgaagatttattggctgctgtacccgatataaaaaaaattatagagggttttaatattcctgttattggtattgaaggctacgaagcagatgatgttattggtactctggcttgggaa

SEQ ID NO: 2589 - DNA, 24413 bp, synthetic construct
  misc_feature 1..24413: note = Synthetic
  source 1..24413: mol_type = other DNA
cttcttttccgtcgggagagaacagcggctgatattcttcggcttcggtagcgatcagcggttcttcccggattacggttgctgcatagaagtagggctcttcggatcgtacaacggtcgccttgtagatatcccagcttcccttacgttcggtggcatacaccagggtcttaccgtctgggctccattgtaccatgcgctcctgttcgggcgtgttggtgatgcgtttggtttgcccaccttccacgctggttacaaagacctcgccgcgcgatacgaaggcgatttcctttccgttgggagaaagttcaaactcggaaacgttgccgttgatcggaatgtttttttcggtacccgctcttccgtcgttcatgatgcgaatcggaactttctgcggtgtgcctccttccctgagggtatagatttctccgtcctgcgtaaagcacagggtatttgagttgcttacactgaggtgacgaacagggtgatccttgaaggaggtcagtttctgctcggccatacgattcagcaccggagccttgtaaatattttggttgccgtctttttcgctgaggtagtacacgaactgatcgtcggcgctgaatacgggctcacggtcttccccttcaaatccgctgagcttgcggtagctgttggtttttacgtccatcagccagatatcgcgcgtaaccgacgacacatgatgttttctccagggatcttcataaccctttctgtcctggaacacgatctgtgttcccttgctgttgtagtgggcattttctacaccggcagaagtgatcatcacgggtttgccgccgtttacggaaaccgagtaaaggttctgaaacagacgggggctgtaaaagcgtacgttgttttcgggtatgatacgcgcactgccgaagattaccgtcttgttgtcggcagagaaatcgtagggaaaatcattggaagaatgataggtaagccgtttgggttcgccaccggtggccggcatcacgaatacgtcgaaattgccgtaacggtcgctggcaaaagcaatttgtttaccatccttactccataccggcatataatcgtgggcctcgtggatggtgaggggaatcgcatcacccccctgtgcgggaacgcggtagatatcgccacggtagctgaaaacgatggtgttcccatcgggggaaatggctgggtaccgcagccaaagcggggttatctgtgccagggcggtccctgaaaagagcagtgctgccactgcccaggcaaattttctcataatctttattttaaaagcgcaatagaattaaaaataaacaggaatttgcagtgccgaagtaaacatttcatgaaggtacaaaacgcgttatgaacggtaatgggtaacttcagccaaacaaacaagaaaatgaaaagattaataaccatatgggttttcctcgcagcggcattttctacccagtcgcagcatcttaatgtaatgactttcaatatccggatgaatacgccgaacgatagtctgaacgcctggccctatcgtaaggatttggcggcctcgcagattctttttcaccgtgttcacagtgtggggcttcaggaggccctgcccgagcagatgaaggatctggcggaaagactgaaaggctataagcatgtgggagtggggagaaccgatggcaaaaacaagggcgaacacagtgccatcttctacgataccagccgtctggaagttcggaattccggcacgttctggctctccgaaacaccggaaaaagccggcagcaagggctgggatgcttcactccccagaatcgtaacctgggccgaatttttcgataaggcatccggaaaaaccttctggcatttcaatacccatttcgatcataaaggagaagttgcccgccgcgaaagttcaaaactgctgatggctaaagtgaaagaaatggcgggggatacaccggccatcattacgggcgatttcaatgcaacgccgaacgaagagcccatccgccttctgcttactgccgacgattccctcaggtttaccgacagcaaggaggtttccctgcgcccgcattatgggccgatcggcaccttcaacggatttaccaataaggaaaccacgaatgaaccgatcgatttcatattcatccgcaacaacgtgaaagtgcttcagcatgcatcgctttcacaaacctggggtggccgttattcgtccgaccacttcccggtttatgctgaaattgagttgtaattatcgcttttcaatcttgtcgtaaaatccgccgaaattgttcatgcgaacagcgtcttccttatagaattcaccggggaagcccagatcgatggcgctggccttgtccagtctgtccatctgttcggcgctcagtaccacgtccggcgcagccaggttttcgcggagttgggagagctttgttgcgcccacgatgggaatggaggagaagtcctgctgcatggtccatttcaaagccacatgcgagggctgacagccgatttcgtcggcaatggccattacttctctggtgatgcgctgactgttttcgttaaggcgtttactttcgggtttgatccggcccaactcgcccttcaggtattttccggtgagtgctccgcccgcgaggggagcccagggcgtaacggtgagtccgaaatgtttggccatgggaatcagctcgcgttcgggtgtacgctgaatcaggctgtattccacctgcagggcgacgaatttactccagcccatgagttcggccatggtttgtgattgggctaccacccaggccggcgtatcgctgatggcgatataattgattttaccctgtttcaccaggtcatccaggccacggagtacttcgtcggcgggtgtcagccaatcccagatatgcagatagaacaaatcgataaagtcggtgttcaggcgtttcaggctggcttccacgctgcgcatcatattcttgcggttattcccgctggcattggggttggtgaggttatcgtaaagagagtatttggtagcaatcacccagtagtcgcggtcgcgtccctgaatgaattcgccgatgattttttcgctgtcgcctttctggtagatgttggccgtatccatgaagttccctccggccttaccgaattcttccatgatttcgaagctgagttgcttatcggcaccccagccgtttacggtgccgaatcccatggtgcccaggcagagttcagagacttttaaccctgaacgccccaataatttatacttcataacagtatttaagaatgattatttacgttcgatttcttcggagaggcggttcattttatgaaccagttcgccgcagttggcttcgctgatggcttcggcctgtttgttatggaattcctgctggcaggctttgagcctgggcagcatgtctaccgccttttgggtcggaaaaacggctgttgttttgccttcgctggtgcgggtgaccaactccttctcttccagcttttcgatcagtcgggtgatggtagaaggggtgagctgaagttgggtgcagatgcaggttggttgaattcccggttggtcgattacgagcaggagcaggtaggcgtggctcggcgagaggtctaccggtttccagcaggtgcaggccagcttctcgatttttctcgccagcgcgctggcggagaagtacatacagtcgcaatatttgctctccgaaggcttcattactgcaaatatacgattttgctatttgtacatgcaaatagtacctttgacgaatgatgatgaacccgaatcttaacagttcggcgggatctgcagccgagaaggaatttgagaacagcatccggcccacggacctggagcagttttccggccagccgcaactgattgaaaatatccgcattttcatccgcgctgcgaagatgcggggagaagcgctggatcatatccttttccacggtcctcccggccttggtaaaacgacgctgagccgcatcgtggccaacgaactcggtgtggccatcaaggaaacctccggtcctgtgatcgaaaaacccggcgatctggccgggttgctgaccaaccttaacaagggggatgtcctttttatagacgaaatccatcggttatccaccgttgtggaggagtacctctatgccgctatggaggatttccggattgatatcatgatcgattccggtccgagtgcccggagtgtgcagttgagcctgcatccgttcactttgattggcgctaccacccgaagcggacttcttaccgcgccgttgctttcccgcttcgggatcaagtcgcggctggaatattacaatgccgacacccttcaaaaaattattacccgttcagccggtattcttcaaacgaaaatcacttccgatgcggccggcgagattgcccgcaggagccgcggtacaccccggattgccaacggactgctccgcagggtgcgcgattttgcccaggtgctcggcaacggcgtgatcgatctgggcattgcccaacacgcactgaaggcgctgaacgtggatgaacacggtctggacgaaatggacaaccggattctttcggccatcatcgataagttcaagggagggcctgtgggtatcaccaccatcgctacggcggtgggcgaggaacccggaacccttgaagaagtgtatgaacccttcctgattcaggagggattcatcaaacgaacaccccgcggacgggaagctacggccaaagcctacgagcatttggggcgtatgccgggagccgcacagggcaacgttttgttctgatcaacagactaccggtaaataaaaaggcgcaacgggaatattctcattgcgcctttccaatttataggccgacgatcaggatggaaccaccagacggaaaccgtttccgtgaatgtttacgatttcgatggtgctgtcgtctttcaaatatttacgcagtttggcgatgtacacgtccatactcctgccgttgaaataggtgtcgctgccccagatttttttgagcgcctgttcgcgcggaagcaggtcgttcttgtgttctgcgagcattttcagcagttcgttctccttgggagaaagcgtgtgtgtttgaccgttatgactcagttcccgcagtttgggattaaaatggtaactgcccagatcgaattcctggttttcattttctttggccccttcctcattgcgtttgaggatggcttttattttgaggaggagaacttcggagtcgaagggtttcgtgatataatcgtcggcgcccagtttatagccgttgatgatatcttctttcatggtttttgcggaaaggaagaacagcggaatgtccggatccacgtcgcggatttcttcggcgagggtgaaaccgtccatattcggcatcattacatccagcaggcagaggtcgaatttctcccgtcggaaagcggcaagcccgaggattccgtccctttccagcacaacttcatagtcgttcagctccaggtaatttttcagaaccatgcccaggtttgtatcgtcttccaccagtagtattttgcccttatttccttccataattatgcattttaagtagtacaaataaagttaaatgatttttcagatatagtcgaaacggaataatgttttgttaaagaagcaaaattcctatcttcaaaataaaaatgtccagctcagaacaatttctccaggcgatacagcagggctatacgtttaaaggtgagtcggtacctctgggaaccgccatgctgaacggtgaagtggtgcccggagcgatgatccatctgcctctgaaaaccctcaaccgccacggtctgattgccggggctaccggaaccggaaaaaccaagaccctccaactgattgccgaagccctcagcgatgccagcgttcccgtgctcatgatggatatcaagggcgacctcagcggcattgccgcggccggcgacgataacgccaaaatccaggaaagggccgaaaaaatcggtatcccctttacaccccaggccttccccgttgagttcctgaccctcagcggcgaaaagggcgttcgtttacgcgctaccgttagcgaattcggtcccgtgctgctcagcaagattctcggattgaacgatacccagggcggtctggtggccatgatcttcaaatactgcgacgataatcagctgccgctgctcgatctcaaggatttcatcaaggtgctccagtacgtttccgacgaagggaaggcggaactggagaagcaatatggaaaaatatccaccacctccaccggcaccattctccgaaaggtggtcgaactccagcaacagggtgcagatctcttttttggtgaaagaagttttgaagtggaagatctgatgcgcatcagcgacgatggccgcggcatcatcagcgtactccgtgtgaccgatcttcaggatcgacccaagctcttctccacctttatgcttcagctgctggcggagctttacgccacctgtccggaagagggtgatctcgacaaacccaagctggtgatgtttatcgatgaggcccacctcatcttccaggaagccagcagtgcattgatgcaacagattgaaaccatcatcaaactcatacgctccaagggaatcggcgtattcttctgtacacagaaccccatggacgttcccgcacccgtactttcgcaattggggttgaaagtgcagcatgccctgcgtgcctttacggccgcggatcgcaaggtgatcaagcagaccgccgaaaactatcccgaaacgaagttctacaaaaccgacgaactgcttacccagatgggtatcggcgaagccatgataacggtgttgaacgaaaagggtatccccacaccattggcccatgccacgctccgggctccgcgaagccgtatggatgtgttgtcggatcaggaaatcgatgccgtcgtttccaaatcgaagatcgctgcgaagtacaaccgcgagatcgacagccatagcgcttatgagattctgaccgaaaaactcaaagaagcggccgaacgtacggctcaggaagaggaaaagaagcccgccagaaagacggccaaaaaagaagaaagcattttcgacaatccaacggtgaagcaggtaggccgtacggcggccagcatcatcacacggtctttgttgggcgcgcttggactgggcggaagaaccacccggaagaaaagcagctggttttaaacaggatcagcacggtttaaataagaatacaggattttattctcggccacggagtttagcttcgtggcttttttgcaacggagcagagcccactggggcggcgctcccgtttcgtatcagtgccccgtcaatgttactggctcagcactggcgccgagtcccgcacactggcgcggagctcccgcacactggcgcggggctcccgctccgtgccttcgcctatagaaaaaagttattttccctccaaccacctccattcaacaaaaaatcttccacctaaacaaacccgtccatccttaatccaataatcgtgtcatgccggtggctgaaatcgacagcaacgattccttttccattctttgcagcgcttccgccaccacatcttcaccaaactccttatcgataagaggaattaattctttaaaatgcatcggttttatcgataagagctcacggatacgcgattcgacggagcggagggctttcggatccggttttgctttcgctttccgtttgcggatacagttatcgcagataccacataccgtgatggtagcatcgccgaagtttttgccgataatcaccgcccggcactccgtgtcggccagtgtataccggatcattcccgcgatacgccggcggtagacctccttacgttccaggtgacggtccattcggatggcgaactgttccaccggtacccgggctgtgaggaaacagatctgcggcgtgtctttcatcggttcataacggatcaccccggccttgtgcagacgttccagaagctgcttcacttccgcctcctccatgcgcgtggcgaaagccagttttttttcgcggatcggaacgatatgatcgaagatcccctcgtagccccgcaggagggcgagaatcagctccgaccattcgggtttggtattctggatttcgcggaggtattcacggctgcagacgaaccctgcctttgccggctgccaggctttttcgctgatggccatccagccgtcctgttcgatggccttgagggaatgcatggcctgatgtgcctgcagtccgaagcgttccacaaattcctggaaatcgaaattatggtagatcccctcgtaattgccgaccggcagctgaaggtaattcacgagtgcgcgataggtttcccggatgtcttcctgcgttgggtagcggatatccggttgccgttccagatcgtccaggtcctgtttctggtagagcagtacggcgtaggccttctgcgtgtcgcggcccgcgcggcccgcttcctgataataatgttccagagcgtccggtacatcgtagtggatgacgatgcgcacgtccggtttatcgatccccatgccgaaggcgttggtacaaaccatcaccctcgttttgttgcggatccaggcctcctgtttattgctcctttcctcggcgctgaggcccgcgtgataaaagtcggcgctgattccctgttgcgaaagcagggtagcgatgtctttggtccgtttccggtttctgcagtacacgattccgcagcccggtaccttgttcaggatttccgttacggcggtgattttgacatccacctcccggacactgtaagacaggttggggcgcgcgaaggaagtctggaataccgccccgtttttgaagttcagcttttcgcagatatcgttctgcacttccggcgttgccgaggcggtgagggccagcacaggtacacccggaagttgttcccggatctcggcgatcttgaggtagggtggacggaaatcgtaaccccactgcgagatacagtgcgcctcatccaccgcgatcagggagatgggcatggccgggaggtattgccggaagagacgtgtggtaaggcgctccggcgacacgtaaagaaaacggcagttgctggacacggccagctccagggtcttttttacttccgcaaacgacattccactgacgatggcgaaggccgtaattcccttcttccgcaggttctcgacctggtccttcatcagcgcaatgagggggctgatcacgatacagagtccgtccatcgccattgccggcacctggaagcagatcgacttcccgccgccggtggggagcagggcaagggcatccttacccgccagcacatgccggatgatttcctcctgtttgggccggaaactggaatacccccagtactcttttaatatgtgatggatgtcgcgcatgtctggatgccaaagttaacgcgaaagcgagaaagccagggagaaaggtgaggaatgggccttttgcttggaagagaatttttgtatattagccaagctcctaacgatttaagctgttgccattagaccttgttagtgcttgttcccaccttaattcgccaggagtgagaggcgagagaatcgagaataaaaaagccccaccagaggcagggctaagaaaatcttcggcttatagccttattgtgatttgcagaataaagatagcaattttttcataataagaattgtacgcaaatcacaacatacactctaaaaaaacgcgtgctaatgccaagtaaaaagagacagtcaagtcggacgaccagatattggaggtggactccaataacaacatccgttaccacgtctgggcagcgatgcttaactgtcgatcaaaggtaattcttaaagtttatagatccgatataattaagaaaattaatatgtttttttttattaattttatataattatgaaaaccaaaaggttgtgattctgaagtcaaaagtctaaataagaagaatgattcagaatagagtgtatgtgtccaggtttgatcataattttttattacccgtaacgaacgaggtttattgtctatcacaacaaaaatcagtttatatgaacaaggtgcttggtcttgatttgggaaccaactcgataggttgggctattcggacggttgacgagccggataatcaaattacgcattttggagttttgacctttaataaaggggttggggtcggaaaaacaggtgagttttcctatgcggccgaaagaacaaaaaagcgttctgcccgacgtttataccaggctaggaaatatcggctatggaaaaccctggaacatctgattaatgaggggtattgcccccttagcatagctgaactaaataaatggcgatactataataaggaagaagctctattaaacaagaacggaggccgagtgtatccactgcataacaaattgtttgatgcgtggattaaactagacttcaacggagatggtgtacccgattacacaagtccatatcaactaaggagtgaacttgcagatcgaaagattgatttggatgtcgagcagaatcgcttcaaacttggtagagctttataccacattgctcaacgaagaggattcaaaagcagtcggaaggttgccggcgaaaacatgccatctgaagatgccgaagaggtagttgatttaaaaaaatcagagaaaaagaagaatcaggaaattattaaacttcttgaagaaaatcctgaagctaaaacaataggacagctgttcgcgttactcgaacggaaaaatgaaagaatccgagaaaagattgctcaacatgcgattagagaaaattataaagacgagataaaatttattttctctgttcaagaacttggctctgcgcatcccttatatgttaaattagttgaatctggaaaaaataagaacgatggcagtattttttataagcggccacttcgatcccagaaggggttggtaggtagatgtactcttgaaccacataaatatagagctccaataagtcatcctgcattcgaaacttttcgggcatgggcttttttaaataatatcaagtacaaggttataaatgatgaaggtaaggactggaagcggttacctttggatctcaagcagtttctgcttaaggaaaagtttttaagaaagtcaagaccctatttctcatttgcagagattgaagaagtcgttaaagcacgggggtttaattggaagttgaattataaatcgacaacgactattgcgggatgtcctgtatctgttcatttgaaggggatttttggggaagactttctgaatgttaagattcaaaaaccaaaagctccgaatacagagaaggactattatgatattgaagatatctggcacgtcttgtttagttttgaagaccaggagtttgtctctgagtttggcgaagaaaagttgaggttggaccaggaaaaaacgcgaaggtttgtcaatgcctggaatgctatcccggaggggtacagtatgttgagcttaaaggcaatcagaaagatcaatcgctttttggaaaaggggctgatttataccgaagctgtattgttggcaaatcttccggaaataatcggcgaagataaatgggcagaaaaggaagaatattttctcgaaaagattgggtttattatcagtgagaatagaacacagaaaagtattctcgcagtagtgaacaatctgatttcaaagcacaagaatttaactgcaatcgaaaaatttgggtataaggacaatacctatcgtttggataacagcgatattagggatatagcgaataccatcagcgacacgttcggtaaagagaagtgggagcatttgtcatcgactgaacgtgatcgcatatttgagtctgttaaggattgctaccaagcatattttatcaacagtggtttaagaagggtagatataaatggagaacgtcattttgaagtacacacgaatgggtgcatatactacaaaacggactcaggatattacagaatgccgaaattgattgatactcttgcagatttcctgagggacaattttgggctcaacgaaaaagttcgggatttaatttatcacccgtcagaaatagaaatttaccctccggctaagcccgataaagacggcgttcttaaattaggaagtccgaagaccggatcctataaaaacccgatggcgatgcgcacgcttcatcaactcagaaagctgatcaatcacttagttgagaaaggcacaattgatagcgatactcgagtggttgttgaagtcgcccgggaactgaatgatgcaaataaaagatgggcaattgaggcatggcagaggcaaagggagaatgaaaataaagaatttgccgaggcaattgcgcgcctgctgaaagaggaggaagggatacaggcgaatccagacagtccggctgatatagacaaactgagacttttttcagagcaggtggatgaagaaacacttcctcccgtggagcaggaagtggagcaggaagatgaaaaaccttcgaagaagaagaaggaaaaaaagcgcgccgacgctgtgttttggaccgggatggggaaaaatctactggatcggtatcggctctggaaggaacaaggttgtttatgtatgtacaccggaaaggtaattcctctttccgaactttttcggccgaatattatcgatatagagcatactattccgaggagtatatcatttgacgactcgatggccaatcaaaccgtgtgttatgcagactataaccgtcaggtgaaacgtaagcagtttcctacgcagttggtaaattatgataaggattatgggaagtttaaagctatacttccgcgacttgatgcctggaaggatagggtagaacggataaaacaacagatagaattttggcagaacaattctaaaaaggccttggataaggataccaaggataaagcaataaggcaaaaacatctgtggaaaatggaattggattactggcagaacaaactcgatcggtttttgatgactgaagtaaccgcagggtttaagaacagtcagttggtcgatacgcagttgatatcgaaatatgctctacattatttgaaaacttattttaatagggtggatgtgcaaaagggaagaattgtttctgccttccggaaaatttataatttagaaaatgtagacgaaaagaaggatcgcagcaagcattcgcatcacgcaaaagacgctgcggtattgacgttgattcctgttgcagcacaaagagacaatatattggctcaatattatgaggccagggaaaacaatctaccattttttttggctccatataagtcattttcgcgtcagcatattgttgcgatcgaggatgctgtattaataaacaacagtgtaaaggatcaaacgcttacaccgggccgaaaaaaagttaggaaaagaggaaaggagcagatgattccgggtacaaatagaattatgtgggctaccggcgattgcattcgcggacagcttcatcaggagaaattttatggcgcaattaagcgtgcattacgtgacgaaaccggaaagctattaaaagatgagaatggaaagattttgcacgaagaggaggtgacgcatgtgattcgggaacccttcgtgtttaaaaaggatgatgtttcgcctggatttaagtcgcttgacgatataaagaaacgggttgttgacccaaaactcgtaagggatattgaggatcaggtttcgaaacacggaagcttgcgcgaggcgatggcgcacggcatatatcttttggataaggaaaagaaacctcatggtagcccaattaggcatgtccgcgtttgggcgaatatcaaagagccattgaagataaaattgcaaactaatttatcgagaaaaaaacataagcaatattatctggcggccaatgcaacaaatagttatttcgcgatttatgaaggagaagggaagcggaccttcgaattaaaaaatctgtttgatatcgctaagacgaagaatcagattcctgtttcgagtgttaatgatcttttcgaagctagaaaaatagtaagcaagggaaagaaacaaattgagatggggctgaagtatgtccttcgttctggtttaaaagttttgttcaggaaagatgaacacgagaatttaaaaagtctggatgttgtggagttactcaagagattgtatgtttttacaaattttgaaaaggatggacggttgaattttcgatatcatcttgaagccaggaaggatatttcagaagaatattcggattcagaaatcgacttcgagattcctaagccgacattaagattcagttacaacaaatatgattttctgctggaaggggtcgatttcgacgttgagatggatggaatgttattgtggaagtgacagttgaattggcgtatttaaaaacaatttcttctataaaaggtcgttaatatttatattatcggcctttttatttttttttgatgggatttagttttctatcgacggacggtcttcttcgggcttgaaaactcttaacttccctgtataaatgtgttggatatcaatgatgtagatttgtttgccgatcccgtcccttgtaagataaaggagatgtttcctgttttttcctgagtagtttagtgaaggtgggtgagcgttgccgaatggttatctgatctaaattcagtgaacatgataaaacgaactctttactttggaaatccggcgtatttaagaactgtcaatgaacaattggtaattgaaaaccgtgaaacaggtgaattgatgcaaattccaattgaggatattggcttggttgttttggaccatcagcagattaccttgacccaggtgttgatttccaaacttcttgcgaataacacagctttggttgcctgtaacgaaactcatcatccggtggggttaatgctgaatttagacggcaacaacctacaaagtcaaaggtttaaagctcaaatcgaagcctctgtgccgttgaaaaagcagttatggcagcaaacggtaattcagaaaatatacaatcaggcggttgggttaacaaaacaaacggctgatgcgaagttgttgtttaaacttgctaaggaagtgaagagtggagattctgagaatcatgaggctcaggccgcagcctactattggaaacatatattccccgaatatttacagtttcaacgagatcggtttggtgctcctcccaataatcttctaaattatggatacgccatattaagggcaatggttgctcggagtctggttggctccggtttgcttccaactcttgggatacatcatcgtaatcagtataattcttattgtctggcggacgatatcatggagccataccgaccatacgtcgatcaggttgtctgtggaataatccgtcagaacggtaaatttttggatatgaggccgtcgatgaaggttgaacttctgaaaataccgcagattgacgtaaagatcaatggacaaaaaagtccgatgtttgctgcggttcaacggactacagcgtcattgtccagatgctttgaggggagcgcaaaaaaaatcctttatccggaaatggaatgatcctatgtatgaacgccttaatgcatatcgggttatgtgggttctagttttttttgatctcccaacagaaagcaagatcgatcggaaaatttatgcaaagttccgaaaagatatcatggcagacggctttcaaatgtttcagtttagtatttacgtccgccattgtagtagtagggaaaatgctgatgttcatataaaacgggtgaaaaagatccttccaccacgtgggcatgtggggattatgtgtattacagataagcagtttgggatgattgaaatattctgtggtgcagcccccattcctggtccggggacaattcaacagcttgagctgttttgaggaaataggattgaaaaaatggggttttcgcccattttttcaatcctgaatttcggcctaatgcattgattttaaattcaatgtaaggattcagttgtcgaagaactaagttaatccaaattttgaaagcaaatcacaaccataagggggagaatacccaaagccatggcgttgtcgaagaactaagttaatccaaattttgaaagcaaatcacaacataatcactggaaattaaaacgggaatacgttgtcgaagaactaagttaatccaaattttgaaagcaaatcacaaccggcttcttggtcaagaaaaaaagcttcgagttgtcgaagaactaagttaatccaaattttgaaagcaaatcacaacttcgcagccgtaggtaagaacatgctaacgttgtcgaagaactaagttaatccaaattttgaaagcaaatcacaaccgcaaagatgtaattgaatttcgtcggatcgttgtcgaagaactaagttaatccaaattttgaaagcaaatcacaacataattataggttcaacttcgggtttacagttgtcgaagaactaagttaatccaaattttgaaagcaaatcacaacctattggacattagaggttaggaatgatcgttgtcgaagaactaagttaatccaaattttgaaagcaaatcacaactctcgcactattgggtattcaactgggcggttgtcgaagaactaagttaatccaaattttgaaagcaaatcacaacttatgctcaagcatcttctccgccagcgaggttgtcgaagaactaagttaatccaaattttgaaagcaaatcacaacacatctgatatatctcggaaactgcatgtcgttgtcgaagaactaagttaatccaaattttgaaagcaaatcacaacgtgatcacctgatcttcgccggcgtatgcggttgtcgaagaactaagttaatccaaattttgaaagcaaatcacaacgcaataacgccgtagtggagatcgccaaggttgtcgaagaactaagttaatccaaattttgaaagcaaatcacaacagaagcccaccgatatagaacctctgcgcgttgtcgaagaactaagttaatccaaattttgaaagcaaatcacaacgattgcaatctctatccttgtattggtcaagttgtcgaagaactaagttaatccaaattttgaaagcaaatcacaacggtggtctggaagaagtgacaactgatgagttgtcgaagaactaagttaatccaaattttgaaagcaaatcacaacttctgccgtatcgggtggcggaaaaacttgttgtcgaagaactaagttaatccaaattttgaaagcaaatcacaacgccggaagcatcatcttttctaccgatgagttgtcgaagaactaagttaatccaaattttgaaagcaaatcacaacatggcctaagtcagtcaaaatttgtcgaaggttgtcgaagaactaagttaatccaaattttgaaagcaaatcacaacggttaagctggaaatagaaactctccttcgggttgtcgaagaactaagttaatccaaattttgaaagcaaatcacaacatgaagatgtgaatggcgtggataatcgatgttgtcgaagaactaagttaatccaaattttgaaagcaaatcacaaccgcgggtatgcgaatcagtttgaacagagcgttgtcgaagaactaagttaatccaaattttgaaagcaaatcacaacattgagggtaaaacatcggctgagaataaagttgtcgaagaactaagttaatccaaattttgaaagcaaatcacaacttaataacttaattcttcttcgtgaacaacgttgtcgaagaactaagttaatccaaattttgaaagcaaatcacaactccccggttctttttgttagcgcgatactgttgtcgaagaactaagttaatccaaattttgaaagcaaatcacaacagcgacacgatacctattactgtggcatgttgttgtcgaagaactaagttaatccaaattttgaaagcaaatcacaacatagttgatctcctgctggaatagcttgcagttgtcgaagaactaagttaatccaaattttgaaagcaaatcacaaccacttctcaatgagttcttcaccttcttcgttgtcgaagaactaagttaatccaaattttgaaagcaaatcacaacacataaggtacagacagaagagactgtgaagttgtcgaagaactaagttaatccaaattttgaaagcaaatcacaactttattcccggttctgtatcattccatgggttgtcgaagaactaagttaatccaaattttgaaagcaaatcacaacagggaggaacgccgagaactgaaaaaccgaagttgtcgaagaactaagttaatccaaattttgaaagcaaatcacaacgggacgctgatcggaccggatgcttccggagttgtcgaagaactaagttaatccaaattttgaaagcaaatcacaacgcaccttcaacggagggtaattaagttaccgttgtcgaagaactaagttaatccaaattttgaaagcaaatcacaacccaactacctccaagtactcaataggaagggttgtcgaagaactaagttaatccaaattttgaaagcaaatcacaacggtttcgccgtgttttcccggccccggtttgttgtcgaagaactaagttaatccaaattttgaaagcaaatcacaactatactgtactgcgaataacatattttcacgttgtcgaagaactaagttaatccaaattttgaaagcaaatcacaacgaagtttccagaattgattaccgcgtggaggttgtcgaagaactaagttaatccaaattttgaaagcaaatcacaacctgatattggcattggttctgctgaactcggttgtcgaagaactaagttaatccaaattttgaaagcaaatcacaaccaaattggtgagaatgctgaaatttattgtgttgtcgaagaactaagttaatccaaattttgaaagcaaatcacaacgttttcagaagcgttccacgattcaaaggagttgtcgaagaactaagttaatccaaattttgaaagcaaatcacaacagtaaatgtcatactattcaccgatctaaagttgtcgaagaactaagttaatccaaattttgaaagcaaatcacaaccaggcgccatcgagcaggacgcggatatggttgtcgaagaactaagttaatccaaattttgaaagcaaatcacaacattatgaatactatggaaaaagaagtaaggttgtcgaagaactaagttaatccaaattttgaaagcaaatcacaaccatgtatactttattaacaagagcatttcagttgtcgaagaactaagttaatccaaattttgaaagcaaatcacaactgcaccatattttcttgtaacatactcccagttgtcgaagaactaagttaatccaaattttgaaagcaaatcacaacgagaagaaaggtaataattcataaaattggttgtcgaagaactaagttaatccaaattttgaaagcaaatcacaactagtgtattcttctctatcgtcgagacgcggttgtcgaagaactaagttaatccaaattttgaaagcaaatcacaactgtgatggcttttttaagtacttcgttgaggttgtcgaagaactaagttaatccaaattttgaaagcaaatcacaactgtattcgattctaccgacatcgtcgtacgttgtcgaagaactaagttaatccaaattttgaaagcaaatcacaactatggacaattggcgcgaagcaaacacattagttgtcgaagaactaagttaatccaaattttgaaagcaaatcacaaccggcaaagtacatgagatgcatgtcctcccgttgtcgaagaactaagttaatccaaattttgaaagcaaatcacaaccttaggagcaatgatctctcacaggtgaacgttgtcgaagaactaagttaatccaaattttgaaagcaaatcacaacaggagcaggctaaggccctaagaagcatggttgtcgaagaactagttaacccaaatgcaaattcagaacatgcattgctggctacgaattagcataaccatcttcccgaaggattttttctccgaacgattcaatagatctaatccctcttaaaaagcattgtgataatagttcaaggtcattggttttttggagtgtctggcgtaacaattgtttttcttgctccgaccaggattcgtaggcgcggggatatgtgcgtctggcgaaaattagctgatctgacaagtccgtcgtttttagcacccccatcttttttacctcctctttaatatgttgaagttcggaccggtgatacctctgaagcgtttaaaggaaattttacccaggcatttgactttcgtatacaagggtcgctgaaatccggagatcctcttcctgattttgttgttaacggaaattacgaatttgactacgtacttcaagagtcagccctcctgaagctatctggtgattgagtttctaaacaatttcgacgtcggcgtcatcaaacagtgcgccatcgggaacatctgcaggttaccaaaatattcttttgccggcagcttcggccgcttctaacgccataaagagctgctcttcggcgatacatcggtacgcaaaacaaagcgtattaaagtgtttttttccggtgttcccttcggtgcggattggtattgttcaaatatttctttcccagtcatattcgccttatgccattatctttatttgcaaattggtaaacgccgccaaatgcaatttgttcctgggttttcctcctggcgggatcagatcccccaaaccttccgattgcagtcggctgttcacaacctctcactgcctgatcaacacgatattccccattttcaacctttccgaaagccaggatttcagcttgggttcatcgatattttgggtggttgtgtaaagcatgatacattgcatacgggaactgtctgctcccaggtattgctcgatctttcccagagaaacacccttgatgtcggggaacagtatgtttaactcccggataagcgatggatcgtttagcttgtatttgcttagttcattgcttaatttgttgatcgcgatgtccttttcagaaatggtgttttcctggcggttgatctctttcaggatttcggatttcaggtcttcgtcgttttgacggatggtgagcagggtgtttcccgaacacatgtcgttaagaatgcggttgtagtttttgatctcctggtcgttgaatttcttgttaagcagggccagctctacctttcgcggattttcattgtaactgatctttttatagataaccatatacccgttgttcacaaattcccggttgatgaaattttccacggtctttgtatacgctttttcattccataggcgataggcgagataacaactcggaacaatcatgataaagatcagtgaagtaatgcccagtcggatttgctttgtatagattttccctttaaagctcgccgcaggatatctcaggtattttacgatgagaaaggtcgcgatgcaaatgaaaaaacaattgatggtatagaggtaaaaggcgccggcaaaataggcgagattgaaggtggccaatccataacctgcagtacacaggggcggcatcagggcggtcgcaatggctaccccggggatgggattgcccttctccacccgggtaatggcgataacccccaccaatcctccgaaaaaggcgatgatgacatcgtaaatattgggggaagtgcgggccaggatctcagactgtacatccttaaacggactcaggtaaaaataaagaccggaaaccaccaggctcaccaccgtagcaataaacaggtttttcccggattttttgagcagcgcaaaatcataggtggccaaggcaaaaccggcacctacaatcggtcccatcagtggtgaaatcaacatagcaccgatgatgaccgccgtggagttcacgttcagcccaacggaggcaatgatgatggcgcaggccaaaatccagagagtggaaccgcggaaggaggtattgctgaaaacattttcaagcaccttttgtttgtcttcttcgccgtaatgaagattgatgaattcaatgattttgttactcatatttcaaaggtcagattaagcgtttaacgaatgtccgcagtgaaaacaatattccgcatcatcgcggtgtccctcccaattgcaatgggcgcatacaattccatttaatcgggtatgttgcgggggttgggggccttccttttcgttttggggtggtccgttcaactgccgggctatttcaacaccgacaattccggtcgggacggcaattatgccataaccgacaatcatcaataccatggataggaattggcccagtggggtagcaggcaccatgtcgccgtaacctacggtggtaagggtgacaatagtatagaatacgctgcggggtatgctggtgaatccgttttccgggccttcaatatagtacatcagtgttccgataagcaccgacaataccattaccgtatacagaaataccaacacttttgcgcggctggccaggagcgcgacttttagccgggacgattcctgcatgaagtccatcagttttaacaccctgaacacccgtaacagccgtaggattcgcaaactggtgaagatatggctgccggacaggaagatggaaaagaacatgggcaggatggacagtaggtcgatgatgccataaaagctaaaaatatatctccaggggtttttactaacgaaaatgcgcatggcatactccaagccaaacaacaccatgaatgtccattccagcatccggagttccctgtggaaaatcaggtctatccccgataccgtttccagcataatggtgaacacgctgagcataatggcgaccagcagggcaatatcaaatgccttaccggcaggtgtattcacgccatatataatgatgtataccttttgtcggaagcgttcgagccggcttttggggtgctgttcgtttttttccatcctcagttcgatttgtacagccaagttatgggttttctattgatcggctgtacatgccgtgtcggaaagggagaaaaagacaatattaccgggaggtcggtgattggtataccaacatgaatctacctgccgcctgtcacatcaataaagataccggttgaatatgaggagtgttctcctgccagccataggattgcttcggccacctcctcggcagtgccgcctcttttcagggggatgctggctttgatccggtcgacgcggccgggttcgccaccatcggcatggatatcggtatagatgaacgcgggtcggacggcgttcacgcggattccttcatcggcgagttctttggatagtccgatggtaaggctgtcgatggcgcctttcgacatggcgtagtcgatgtactcgttcggagctccggtgcgcgctgcaatggaggaaacgttgacaatcgtgccgcccgggccaccgtgtttgctggataggcgtttgatggcttcgcggctacagagaacggctccggtgacattggcggaaaagatgcggttcagtcgggctacgtccatatcttccagacgcatctgtttttccaggattccggcattgttgatcagagaacggagattcccgaatatccggtccgtttcagagaagagccggagtacatcttcttcacgggaaatatccgcctggatggctaccgcttcgccgcccagggattttatatcagccaccactttctccgccgctccgcggtttttgttgtagttcaccaccacggcatatccctgtttggcggcgagtagggaggtggcagctcctatgccccggctggcaccggttacgatcatcgttttcattagctatggttgaaggtttatttctgctttgattttggtgagctctcccaacaaacgggtctcggttacccaatccgccttgttcaaacgcgctgctattcgcgcaatttccggattgagcgtgtcgatttccgttcttctcttattgcggatatcctgtaaggtagatatttcctgcccatcggcaagccgactgatctgtaggagggcttcctccacttccttaacggtgagctgaacgcctgtttccgcggcaatggctacgcattcggcaataacccgacgggcaatctggagggcggctggattgcggtggaaaatgccgttgtcggtttccagcagcggacaaacggaattaaacacgcagttggcaatggcttttttccagatgatgggctggatacttgtctcggcccggaatcggaattctgcggtgtttaaggcagccacgatggcgctgaggtttgcgggatttccgcgttcgataccaac

SEQ ID NO: 2590 - DNA, 24341 bp, synthetic construct
  misc_feature 1..24341: note = Synthetic
  source 1..24341: mol_type = other DNA
aattgtattgataaatttggagaccaaaccaaaaccaacagatttcattgaaaaacctgattgtagcactctgtgtgtggatgctgttgcccgcattgcacgcacagccatctcgtacagatagtctcacaagcctcttaatggcctctgcagaccttaaagaaaaggctgtactccttctgcaacgcagtaaggcctggccttctacgcaaacagataaaccgctggcagatgcgcagcaggcgcttgcattgtatcagcaaacaaaaaatcaggaaggccaggtagacgcatacctgcagataagtgcagtgtatgcccggcagaaccaatacaaactggcccttactgttgactcctctacacttgagctggccagcaatattcattatacaaaaggtcgcgcacaggcattaagccagatggcccgcaatcagtattcgatgggcagtctgcgggatgcagaaaaaaattgccagcaggcattacggctgtttacagaagcagggctggagagcgaaacagccgatacacacaaccggctgggtatcatttatcgccgcctggcagatattccccgctcactgaaacattatgatgaagggattgcagtggcccgtaagacaggcgatcagacattgctttctatcctttacatgaataaagccaactcgtacaacgaagccgcaagacatgaggaggctattaatatgcatctggaaagtgtaagaataaaagagaagttgcgcgatgagagaggcctcatgcaatcgtacaacaatattgctttagtgtttatgcgcatgaatgagtttgaaaaaagccgttcctattttcttcaggccaatgcgctcgctaccaagtataataacaaaacaacactgggatataatttttccaatcttgccaaccttagtatttcacagaaaaaactcgattcggttgactatttctacagacagtcactggccgcctttacacaaaccggcgaaaaaccaggactcggcctggtgcatcacaactatggaatgtttctcatggagcagcagcactatcccgagtcggaaaatcatttgcgcgaagcgcttgccataagacgccaaacagaggcccgctacgatattgcctctaccatgaatgtgctgggaggcctgctttcgcgcactggccgcaaagcagaggcagagcgactgctgctggaatcgctggatatgctgaaagatgagaatagcagccgtaaaaaggatgcgtataaatttctcgcagaacactataaagctgccggcgattacgaggaggcctataaataccaggctggttatatagccatgcgtgatacactggtaacccaggatgaaataacgggtattctgcgtgcccagtcgcggtatgaagtagaaaaaaaagaagccgagctggcactggcacagaaagacagggaactgcaggcagcattattaagccagaaaaatcagcaactcctttatttattactggcactggcactgacattattgctgctgacagcgttttattttggctaccgcaataagaaaaaacatgccgctgaactgcaatccaaaaacaatcagattgaaacgctgatacgcgaactgcaccaccgcattaaaaacaacctgcaggtagtttcgggtttactgtcattgcaaagctaccggacagaaaatgaagaagcccgccaggcaatggatgagggccggtcgcgcgtggaagccatggctatgatacaccagaaactctacatggataaagaacttgcagccgtggatatgacagagtacctgagaaatctgggcaactccctggcaggaagctttggacattcaccacagaccgtagagaccaccgttgacctgcccatggtcaccatggatatagacagggccattcctatcggtcttattgtaaatgaactgatcacaaatgcatttaaacatgcttttgccggcggtcagcagcctcatgtacaggtaagcctgcaacagaagggaaatgcacttgagctgatggtagcagataatggaaggggtatgaacgaaaccacgaccgaatcgcagtcatttggaatgaaattggtacgtacactggtgcagcagctcgatgggcaactggagacgacagctgcagccggcacggtattccggatacagatcaacaataaactgacatgatcgaacaaaaaatattaatcgtagaagatgagcttctcacggcagaaagcatttctgtgctgctcgaagaagaggactatacggtcattggcattgcccgtgatgcagccacagccctgcgccttagcagtcagcctcagggctggcctactgtagtcatctgcgatattggcttgcgtggcgatgtaagtggtattgaactggcggaacaattgaaacaactctataactgcagtatcatctttcttaccgcattttctgataccaaaacagtaggggctgctgcggaaacagaccccgttatgtacctcgtaaaaccctatacagattctcaattgctcgtagccgtacaaatggcctgccttcgtattcttcggcaaaccgatggtaatacgacaagtacgcccatactgcagcttactgacagggaaaaagaagtggctttactcgctgcacaggggctttcatccaaacaaattgcccgccggctcgacatcagcatcgagacggtaaaaacacatcgccggcggatgatgagtcgcaataacatcagcagcttcccacaactcgtttacctgctgaataaacaagtgtagggggcgtgatccttttcttgtggaatctgctgattactgcattttattggcagcatgtacacagccaacacaccagcttctgcctgccgtcttctgcatctggatgcctggagaggcatagccatcgccggtatcctgctcgtaaatgtttatgcatttggccttccttacgctgcgctcaataacccatatttaatagcaactgctaaaaccgctgacgcctacaactggttgcttacatctcttttactggatggaagtttcagagcaatactttcttttttgtttggagccggattaatgctttggcaggaaagactaccacctggtcagggtggtcaattatttttccgccggatgagcatactgctgttgttgggactgtgccatgcttacctgttgctttggttctgggatatattatttatgtatgctctttgtggaatgctgctattcactgtacgtaaatggtctgttagccgattagcctgtctgtctctgctttgtgtctttattgctgatcttaacagtaacaggaaattgcttgatgataaaatggccatacagcaatacgaactcccgaataataccacagcatacaagcaacttccaaaggaattaaatacacagttattaagagttcaatccgaacgagagataatagataagaccacttccttttgccgcttgtatcaccaacagttgcaacgtgcatggcaggtggagagtgtcgatttccccgggttttatgtatgggatatactgatctggattatactggggattattttctataaactgaaatggctcacgggtcatgtaccgcctaaattgtataaagggttatttctggcaggaatcgctggtctgtatttatgctggcaacgcgtgcagccagcctggcaaaacaattttgacccaatagctactataaaagatacacgctggcaatattatgagctcgcccgcacattgcgctcgttgggtttgctgggcttattaatctggatatggcaaagcggtcgtggtaaggggctctggttattatttgcaccattgggtcgcttatcgctaagtaactatttagttcaaagtgtggtttgtgcggttctgttttattacaccggatttggcttgtttggtcagctgagcaggatgcagcttctattaaccgcgttgatcattatcgtgctgcaattaatgatcagtcactggtggataaaaaagcatggggccggtatagcagaaaggctgttaagaaaataaaactctccgtagcaccgcatcgcgatgcggcaatacagggagtcgggttcgttcaataaatttcgtagcaccgcattgcaatgcggtgctgcagagaacctgggttcgtggattatatcctttaggccgcagcgtaccgcgggaatacagagactcagttcgttcaaaaaattccgtagcaccgcattgcaatgcggtgctacagagaaccggcttcgtggattaaatcctttaggccgcagtgtactgcggcaatacagagactcagttcgttcaaaaaatcctgtagcaccgcatcgcaatgcggtgctacggagaaccgggattcgtggattaaatcctttaggccgcagtgtactgcggcaatacagggagtcggattcgttcaaaaaatcctgtagcatcgcattgcaatgcggtgctacagagaaccgggattcgttggattaaattctgtaggccgtattgcaatgcggtgctacagatggcgatcataatttttcacattattttgtatataccaggcaagggcatcatattctttttcattccggataatgcggtcataaaatcgtggttgccaggcgaaggtggggtcgatcattctggcatttaaagtaaccgtgcccttaaatccgcgaatgatcgccgagaggttttttgattgcggaccaaaggatcggaccggtgccttctggaaaagaaaagggttctgtagcgccgcattgcaatgcggcgctacatgggcgtcttgcggcgctacgtcggcgtcttgcggcgctacgtcggcgtcttgcggcgctacgtcggcgtcttgcggcgctacgtcagcgtcttgcggcgctacgtcagcgtcttgcggcgctacgtcagcgtcttgcggcgccgcattgcaatgcggcgctacagcagacacctccttctgatctgattgattaaattgattatgcccgatatgtacgatgccatgaaaatgatccggcattatcacatatggacctaatgtaagacgcatatcgggacgggtctgcggagtttttatccactccttttctgttagctggccaatttccgaagggaaaaacgtttcgcccgcaatcgatccgaaaaatggcaggcgtttgctgcaattgatggtaacaaaataggctttcgaaaaacggtaatcccaccaccaggcgcggtattgcttacggggataatgtattttctttctcactgacatctgccacacaacttagaactacaatttacaaaaaagcaattccactacctatctttgatcaacttcttttatatatgtccctcacagatatctccatcaggttgcttacggaagcagatgtagcggcattatcggcattgcttatcgaaacagtagcacagggcggatcggtcagttttatgcatcctctgcaaccggccgatgccggcgaattttggcaaaactcactggccgcagctgcgaagggtaaacgtgtggtgctcggagcttttgataaagagctgctggtgggtacagtaacgttgttggttgattgtccacccaatcagccgcatcgtgcagagatcgccaaaatgatgacggcggtaagccatcggggaaagggtatcgcccgtatgctattgagggaagccgagtatattgctaaggaaaaaggtcgcacactgattaacctggatacagccgaagaagaaggagctgccggattttatgaaaaactgggatatcaacgggtggggctgatcccggactatgcattgaaaccacatggcggactcacggggactattatttattataaacggttggattgatcaaaaaaagaggaaaccgttatgagtaaccacccactcaatcttgcccttcgctttttactcgaacttgctttgctggcgatctatttctactggccctatcattatttagagggtttgccacgcatgctgttatgtatactgttaccgttatcgggagcggcattatgggccattttcaaagtgccgggcgaccccggccctgcaacggtagccattcccggatggttgagacttttactcgaagccactctttttgcgctggcggtttacatgcttttttcagttggccaggaaaacgcgggccggatatttctgctgataactattctacattatgcggtttcgtacgatcgcatccggaagcttttaaaaagttaagaactcagccccggaagagaaggttgcaagattctatcagtatctgcaaaacgataaagcaagccggaaatagaattgctcagaacgtgatcttatactcctgcgtgtcgtttttattctacggcgaatcagcataatcacctacaaataaatggcaggatgccctatacagggcagggttttcccgtaatattttgtattgcttttcaaacgaaagcctaaagctatttctatgaagccaatacgttactggttgacaccagtttttgcattgctatgtgcaacgatagctgctcaaagtcccggtctcattgtaaggccccctggtggcgccggcgtcacagcgctcaaccccaatggagatggctatagctctgctactacagcaggatttgttaccaacgatatcacagaaagtgaagtccctttcagggttgtacctccggcattgtctgagccggttggtgatttgcttacgggtccctcaggaggatttaccgatatagtgccacgggtcgatggtattggtttttatatgtataaagatgcgaccaatatttatttccgcctgcgtgtaggcggaatagtaagcgggtctaaaggatatagtgttttgatagataccgatggaaaaatgggtacggcacaacccaatgccgatcccaactatgtagcgccatcaggcactggtccgggtaacccaggttttgaatatgaggtagtcttccgcagcaattttgatgtgagtgtgtataatattgatggaacggccacacccggcacaccgcaaagctttacactcaatacttattcacagatatctgtagcgttgaccacagatggcagtaatcccgattacttttatgactggtatgtaccattaagtgcaataggtaatccgtcatctataaggctggcttgcactacggtggcttcgcccaattctgcactgcagggcacgcgatctgatatatatggcatcgatgatgcagcatataccaatacatccgcagcctggcagctggtcgtgaatgcacaaccggtcattgatcttaccaatttcggagcattggctcctgtatgtaccaacgctcctgccatcaccgggtccatagcagcgggtacgtccgtatctgtagagggcacctggtcgcgactggataatacaaaaccttcctctgcggtaatttctctctataaaaatggcgtacttgtaaacacgaccagcgttgctacaggagcaacctggtcgattatagtccccaccgtggcaaatggagatgtgttttatgcaaaggccctgtctgccggtgaaacttcgtgtctgcaatcaaataatattacagcgagtgcgtgtcttacattgcccacgccgccaacgcttacctgcggatcgttaaaagggatcagtggtacgatgccgtctaccttgctgggcaataccattaaggtttaccagttgccaactactgctgcttcgcctacttctaacctggtaagtacggtttctaatcttacttatccaacggttaccagttttgcatattataccaacggatgttcgggcggtactaactatgtagctaccggtgagtatatgattgtaacacaaaacggcagttgtgtctctactcccgtatttgtatgtatcaactccggcagcagcggcacaccgcctgcattggccactaatgcaattgcgctttcgcaaacagtatatccctatcatacgagtatcaacggtacaggtgccacatctggccagatactgcgtctgtttataaatggtatacatgcagcatctatcagtgctacgggcagtgcattcacttttacggggcttagcctaaaagcgggcgatcagttcaggatctatgcccagacacccggctcctgcctcacacaatcggcgcagtttactgtcagctgttttgtacagcctcctgttatcagtgtaaatgcaaccggcaacctgcttacaggtgcagttaatattgcaggtacggccggaacgccgggcgcaattgtacaagtatataaaggcacagcgccttccggcacagccgtagggtcggccgttactgtagccagtaatggtagctggctggcgttagtgccggcgttgctgagcggtgagtcatactacgccgtgcttacaggaggaggttgtaccagtgcggcatcagcaccggcagccgtactttctcccgcagcatgtcccgccgtttccggtacctatacagatgcttccggtaccgtaacgggtacactgcctgcttcgtttaccggcaccgtgcgcttgtatctcgatggggtgcttattggttcacaatccgtgagcagcgctaccagctggagtataacagtaccagcaggcacactttattatggaggcatactaaaagcaacagcacaggcagctggtacagcagagagtaatggatgtggcactgtcacggttaactgtacttcaccgctgcagcccacagtatcccccgcctcttccatcatcagcgtgggtcagtcggtgacgttcagcgttagcaatataagtccgctaagctggtatgccgtatcagacaacagtggcaaaacctatgcaaccagccagtatcgtcttaataacacaggttttagcatgaccaccggtgctttttcgaatgcgggaacatacaacctgaaaatcacagccgatgcacttaccggttgccctgccagtgcccgatctgtatcagtagaggtaaagggtacattaccccttaccctgcttagctttagcggcaactatgccggcaacctggtaaatcttttctggaccactaccgaagaaaaagatgtaagtcattttgagattgagcgtagtgaagatggtacccgctttacaaacattgctactgtacctgtacaaaataccaccgctgcagagcatcattacagttatgtagtgaacggaacattgcagacagcagcttatttccgtctcaggatggtagatatagatggtaaatatgaatacagccgtgtactgatggtcaaaccggaagcgcaaaaaagcgccgcgctcaaagccctgcccaatccttttgtgcagcaattgtatctgcagtatcactcaccccaggcgggccgtattaatatacgtattctgaatgccggtggcgtattggtataccagcgtctgctgccggtgatgacaggcgaaaacctgctgcccataaaagaatcttccgcgtgggcgccgggtcattactttatccgtatacaggatgagcgcactgccgaaactgtgcagctaaaagtaaccaggcaatagcattaggtgttgactttcgtttatacatggcgggctccgaaaggagcctgcttttttttggcttgaaggtagagggcggaaggtaaaaggtggatttgtatttcgtagcgccgcaatgcattgcggcttcggaaaaggtataagccggggcagtgaaactacgggaaaccatatatgtgattgaagtagtattattaaatttagtcggagctggtcggcgacccggattaatctgacgttgaagcagacaagaaattaccgtgaaaacacctatactaaaatgaatgaacttgttaatttggacgcaggtaagaaaaaaaatgccccaccaaagcagggctaagaactcttcggcttatagccttattgtgatttgcggcataaatgtaggtaaatagtaacatataggtttgttttttttaaaaaaatctgtcatgaatatattaggcatcgatttaggaactaactctattggctgggcaataagaaaccctaatttaaagggaaatcaaattgaaaaatttggggtaattacgtttaataaaggagttgggcttgggaaaactggtgaatattcttatgcagcagaacgaacaagaaagagatctacacgccgattataccaatctcgaaaatacagactctggactaccctggaacatttaataacagaaggttattgccctcttacaatcgaaaacttaaacaaatggagacattacaataaagaagaggccattaaaaatagtaatgcaggaagagtatatcccattggtgatctggcttttgatgcatggataaaattagactttaatgttgatggaaagcctgattatacaagtccttaccagctaagaaaggagttggcggacacaaaattggattttacaaaggaggaaaaccgattcaaattaggaagagcgttatatcatattgcgcaaagaagagggtttaaaagtagtcgaaaaagcgcagaagatacaaaggatagcatttcgggtgatagtgaggtgctagatttacaatattctgaaaaaaagaaaaatagggttattgctgaattatttgaaaaatataatgaggcccgaacactcggttggctttttgctttgttagaagagaataagattagaattcgtgaaagcgttgcccagtatgctattagagaaaactataaagaagaaatcaaatatatttttcagcttcaggagataagttttgatcacccgctatataccaaactggtagaatctgggaggaatagaaataacggaagtattttttataaacgtccgttacgttcgcagaaaggactggttggtaaatgcacattagaacctaataaatacagagcgccaatctctcacccagccttcgagacctttagagcatgggcgtttctgaataatattaagtataaagagatagcggataaaagctccgattggaagcctttgccattagagttaaagagggatatctatcgcgataaattttttagaaagtcaaagccttatttccccttttttgagattgaggagtttatcaaagccaggaagaagggatgggtgttgaattataaatccaaaacaactgtaatggggtgtccggtttctgcaagactaaaagatatttttggggatgattatctgaatataaaaatatccaaaactaaggcagcgaaatctaataaatcaaactatgacatagaagatgtctggcatgttttatttaattacgaagatcaggagtgtgtatcggcttttgcagaacaaaaactaaagcttgattccgaaaaagtaaagcaatttgtaattgcatggaatgctttaccggtaggatatggaatgttaagtattaatgcgataaataaaataaataagtttctggagaaaggtttaatttatacagaagctgttttactagcaaatattcctgacattgttgatgagaaactatggatggacaatgagaatttcttttcccagaacataagtaatgttattgaggaaaataggcaacaaaagacgattctgaatattgtaaatactctagtttcaaaatacaaaaatcttgaaccgggtgaacgttttggcgtaaaagatgatagctacaaactggatgatagcgattataatgatataaacctttctattgaggagcactatggcaagaatagatggaatgaatttgaagaagacaaaaagcaaacaatctttgatagtataaaagattgttatcaggcttatttcaatgtctctgggctaaaaagaaaggatataaatggcaaaaggcattttgaagtccactcaaatggtaaagtttattataagacagattctggatattatcgcctgcctaaattaattgacaccctgagcgagtttctacggttaaaattcaatgttgaagaaaaatcgcttcaaaaaatttaccacccctcggagataaatatttatccgcctgcaaaacctgtaaatggggttataaaattaggcagtccccaaacggggtcatttaaaaacccaatggcgatgcggacgctgcatgagttacgtaaactcataaattttttgattgaaacaaatcaaattaatgatgagacaagagttgttgttgaagtggcaagagagttgaacgatgccaataaaagatgggctattgaagcatggcaaaggcagcgagaagcggaaaatcaagaatttgctaaagcaattgaacagcttttaagtgaagagagaggtattattgcagacccgaaaaatgacagtgatatagataaaataagattgttttacgaacagaataatgaacacacacttccacctgttcttgaacgggaaaatggcaaaacaaaaaataaaaggaatgatgttaaggatgagtctgtaagatggaatgggaatggaaagaaacttattgataagtacaggctgtggaaggagcaagggtatcggtgtatatacacaggaagatttattacgattgtagatttatttaaagaaggtgtgattgattttgaacatacgattccgaggagtaagtcttttgataattcattagcaaatctcacagtctgctatcatgattataaccgtataataaagaaaaatagaattccaacccaattaaaaaactatgatagcctctacgattatggccccaatatcggcgtttgtactgcaattcttccaaggctggatacatggaaagaaaaagtggaacgtattaaacagcaaatagacttctggacggcaaagtcaaaaagggctgtagataaacaatggaaagatgacgctatcaagcaacgtcatttatggaaaatggagctggattattggcaaaataaactggacaggtttactattactgaaattactactggctttaagaatagtcaaaaagtagatactcagctcatttcaaaatacgcctttcattacctaaaaacatatttcgaaaaagtagatgttcaaaagggaagtatcactgctgagtttagaaaaatttataaactacagtcaccaaaagagaaaaaggataggggtaagcactcccatcatgcaaaagatgccataatactaacacttattcctagtgccgcaaaaagggatgtaattctagaaaaatattatgaagcaaaagaaaaaaatctgtcatttacagagactgaaccattcaaaggttttaggcgggaatttgtttctggcatagatgaaactgttttgattaataatattatcaaaaaccaatcccttacacctgcaaaacggaaagtaagaaagagagggaaggagcagcatattccccaaaccaataatccaatgtgggcaaccggcgataccgtacgcggacagctacaccaagagactttctttggagctataaaaccggccaaacgaggtgaaaaaggcaatttgcttatggacgaaaataaaaagtttattcaagaggagaaggaaaggtatgtaatccgaattccttttcagtttaagaaagatgcaaacacgcctggctttaaaaccatggaagaaataaagcaacagatcgtcgacgaagggctaaaaaaacaaattgaaaagcaagtaaatgatataggcggtttaaaagaagcatttgaaaaaggactttatttgttagacaagaatggcaggcctcatggtaataaaatcaggcatatccgtgtatgggcaaacgtttctgagccactaaaaattaagaggcaaacaaacaattccaaagcggagtacaaacaatactatttggcggcaaatgcaacaaacagttattttgcgttgtatattagcgaagacaaaaaagagtttgattttagaaacttatttgagactgcaaaaattacgtcattaaatacagtaaagaatcccaaagaattattcccaccggttataagtatagtaaaagggaagaaggcaatagagttaccacttgtttatgttttagaagtcgggacaaaggttttcttcaggaaagataaaaacgaggatttgagtatactgtctaataatgaattatcaaaaagattatatgtgtatacaaattttgagaaggatgggcggctgaatttcaaatatcatttggaagcgcgtaataaaatagaggaagcgtataaagactcagaaattgattttgataatccgaaaccaacacttagattcggttatgccaaatattcttttttagtggaaggatgtgattttagaatagaaatggacggaactataaagtggaaggatttaagagcacctcaagattagtaacaggagccataggtgggtaaaagtagttttgctggttaaatgttcagaaggccggtagggcctgccctatatgtaataattggaacggttcggaagataatttctttaattttcttgttggaaaatcactactgcccagtaaaataaaacatgctaaaaaaagagtttgacaatcagatttgtatagtggattttgtaaactctgggtaatgaagtcctgtaaaattcttggtccttcggtagagtcaactattttatcgccatttccctgctttattcccttacttttttcttgtggttcaccggccgtggagacaaaaaggtaaatgaacagggatacgcaaacagttattcaggtacaaaataaaaacagcttttttcgcagtatatcctcgaacaacagcggttagaaaattatgatgttacacaaggggagacttagtataaataataaactgaattttcatacgttttatctgggtaaaaccaattcctatgataaaacggaccctctattttggtaatccggcttatctgaaaaccgttaatgaacagcttgtgatagagcagccattaccggtttccgccagccaaaatgaaacaactctagctgttaaagcaaatagccggaccattccgatagaagatattggcctgcttattctcgatcaccggcagattacgattactcaggcgttgctatccaagctactttctaataatacagcagtagttagttgtgatgatacacatcatcctacagggcttctgttgcatttggacggccattctctgcatagtcagaaattcagggctcaattagatgcttcattgccacttaaaaaacaattgtggcaacaaaccgtcagtgcaaagatcagcaaccaggcttcattgttatccattcacagagaagaaaataaaatcctccttcagctggcatccggcgtaaaaagtggtgatagtgataactgcgaagcacaggcggctaattattactggaaaagaatatttccagattacctcgaatttaggcgggaacggtatggcccgcctcctaataatctgctcaactatggctactcaattctccgcgctctagtggcccgcagcctggtagcgagtggcctgcttcctgtaatgggtattcaccatagtaatcagtataatgcctattgcctggcagatgatattatggaaccttaccggccttttgtcgaccgggtggtctgtcaattggtacgtagcaacggtcagtatctggagatgagcccttctatgaaaaaagcattactggaggtgccggcgttggatgtgtatatggaaggccggaaaagtccattaatgaatgctgtacagcgaactaccgcatcgctggctaaatgttttgaaggccagtcgaggaagatattgtatcctgaactacagtagccttttaataagaaagtactgttatgtatacacgtttaaatgcctatcgcattatgtgggtgctggtattttttgatttgccgacagaaacccggaaggaacgaaagatatatgcccgctttcgtaaggatattatgacagatggttttcagatgtttcagtttagcatttatctgcgccattgcgccagcagagaaaacgcggaagtacatattcaacgggtaagacgtatactccctccgcaagggcatgtgggcatcatgtgtattaccgataagcagtttggcatgatggaaatcttccaggggcgtgagctaatcgactcaccggaaacttcgcagcaactcgaattattttaaaacaggcgcaatttgattttacagaccataaaccttaatctatgcttacacctaagaaacaacagctactgctggacaggcttaaggcctaccaaaaacgattcctttcgggttccatacccgatgaccttgacgaaagcggaacacgcattatgatcaatcatttcttaacagatgtattaggttataccgcgttggaagaagtgcgaacagaatatatgataaaagggacctatgccgattatatggtacaattggagggaaagcgctatttcctcgttgaagtaaaagcattttccattaatctgaatgaaggccatttgcggcaggcggtcaattatggagccaatgaaggtgtggagtgggctgttcttacaaatggacggcaggtggattgttacagaattctgtttgagaagcctattcgccatcagcaggttttttctattaatcttagccaggcgcagggtttaaaggccgcaactgaatttttacaatatcttacccgtgacggaataatcagaggctcactcgaatatttatggaataaatcactggcgctgacaccagcctccatggctaaaatactcttatgtagcgatatgataagcctggtgagaaaacgggtgaataatagctttgagacccgatttactgatgaacagattcagcatgctgtttacagaataataaccgaaaaactggatttacaggatttccggatgccgcggctgacgaaaaaagaaaagccggtccgccggatgcaatcccagggttcagagattgtatcggagtcgtcggtcataaccatccggccggattagtcaggactttagatcggccgggaaaaaataaaacagaactaaaaaaatgggcctgaaaacccatttttttagttcaaaaaccaggctcaatggaaacaaaatcagcgttttacagcaaatctgttgtctctgagctaagctacagtaaaatttgaaagcaaatcacaacgattaccatatcctgccgtatcaaatcattgttgtctctgagctaagctacagtaaaatttgaaagcaaatcacaacatatttcggaagaagatattcctgctgcttgttgtctctgagctaagctacagtaaaatttgaaagcaaatcacaacatccggacggctgggaacatttcggctcctgttgtctctgagctaagctacagtaaaatttgaaagcaaatcacaacatgcgcgaccagttttctgataatcctatcgttgtctctgagctaagctacagtaaaatttgaaagcaaatcacaactggcaaatgtgggatacttccgtatgatctgttgtctctgagctaagctacagtaaaatttgaaagcaaatcacaacgtatgcagtcgtcaaatcacctacatacttgttgtctctgagctaagctacagtaaaatttgaaagcaaatcacaacttcaaagacggcgtgatcacagtcaactgggttgtctctgagctaagctacagtaaaatttgaaagcaaatcacaaccggtatcggcgccatccgtggcgtggccaggttgtctctgagctaagctacagtaaaatttgaaagcaaatcacaacctggaaggactacctgaaacaggccgagagttgtctctgagctaagctacagtaaaatttgaaagcaaatcacaactaaccctttgcgtgggaaataaacaaaaggttgtctctgagctaagctacagtaaaatttgaaagcaaatcacaacgctgtctggtgttcggttagactttttcatgttgtctctgagctaagctacagtaaaatttgaaagcaaatcacaacatttcagctttagttgccggcgccaggcaagttgtctctgagctaagctacagtaaaatttgaaagcaaatcacaaccagaaagaacttttcaactttgaaaagtcggttgtctctgagctaagctacagtaaaatttgaaagcaaatcacaacggatcgggaccagggttgttggtaatcccgttgtctctgagctaagctacagtaaaatttgaaagcaaatcacaacatcgaagaacaccgccctaaattttttgagttgtctctgagctaagctacagtaaaatttgaaagcaaatcacaacgaagaagtatccgctgcatttgctgattcagttgtctctgagctaagctacagtaaaatttgaaagcaaatcacaactgatggggttcaaaaccatcgagaccaggagttgtctctgagctaagctacagtaaaatttgaaagcaaatcacaactaacctgcagtactggtgtaatgaacgatcgttgtctctgagctaagctacagtaaaatttgaaagcaaatcacaactgtaggtcgttgagtgattgcaggtaattcagttgtctctgagctaagctacagtaaaatttgaaagcaaatcacaactctgttgacgctgctatgtcatctgcctagttgtctctgagctaagctacagtaaaatttgaaagcaaatcacaacctccaactcattaagcctttgagtgaaaaagttgtctctgagctaagctacagtaaaatttgaaagcaaatcacaacaaatacatttgcatgtgttctaatgccttggttgtctctgagctaagctacagtaaaatttgaaagcaaatcacaacatcgattcagtgcagtactctggcattaatgttgtctctgagctaagctacagtaaaatttgaaagcaaatcacaacttgtacctgcgggctacaaagaatgaggaagttgtctctgagctaagctacagtaaaatttgaaagcaaatcacaacaaaagccccgagctggctgcgcagggctttgttgtctctgcgctaagctacagtaaaatttgaaagcaaatcacaacctgaagctgtggtagagttttgttcctgctgttgtctctgagctaagctacagtaaaatttgaaagcaaatcacaactgcaggtatcgggattagttgacataccggttgtctctgagctaagctacagtaaaatttgaaagcaaatcacaaccaattgggcctgatcgcttggcgcagctcgagttgtctctgagctaagctacagtaaaatttgaaagcaaatcacaacgttcaggttgataatggcaacggtgggactgttgtctctgagctaagctacagtaaaatttgaaagcaaatcacaacagtcactgggaagagatgcttcctttatgtgttgtctctgagctaagctacagtaaaatttgaaagcaaatcacaaccacgtaaagcacgggccctgtcttccgcatgttgtctctgagctaagctacagtaaaatttgaaagcaaatcacaacgcatttcgtatctaccgtgctctcgtcattgttgtctctgagctaagctacagtaaaatttgaaagcaaatcacaactaccagccctttccatggatcaccgttatgttgtctctgagctaagctacagtaaaatttgaaagcaaatcacaaccagggaataggaaagagcacaatcctgagtgttgtctctgagctaagctacagtaaaatttgaaagcaaatcacaactataaaaccttattggatgattacgttgtagttgtctctgagctaagctacagtaaaatttgaaagcaaatcacaacattgtgttttgcagccggttcgcatcgaatgttgtctctgagctaagctacagtaaaatttgaaagcaaatcacaacttttctggcagtagtattacaaacggagcgttgtctctgagctaagctacagtaaaatttgaaagcaaatcacaactatagctactgaggcatcgccatcggtaggttgtctctgagctaagctacagtaaaatttgaaagcaaatcacaacattacgctgaatcaggacatggattctggggttgtctctgagctaagctacagtaaaatttgaaagcaaatcacaactacttcgatgtccacgaattcgtcaccaatgttgtctctgagctaagctacagtaaaatttgaaagcaaatcacaacatatttcctacggttcggacgcatgcggttgttgtctctgagctaagctacagtaaaatttgaaagcaaatcacaaccaggacggcaaacctttcaaatatccgtaggttgtctctgagctaagctacagtaaaatttgaaagcaaatcacaacggtagctcgtgcgtatgcaatggctgaaaagttgtctctgagctaagctacagtaaaatttgaaagcaaatcacaactcaggattacaagttttatttttctcatttgttgtctctgagctaagctacagtaaaatttgaaagcaaatcacaacaccgctggcgccattcggtaattccgtgaagttgtctctgagctaagctacagtaaaatttgaaagcaaatcacaacagacataccagtctactgacatgtcgtgtggttgtctctgagctaagctacagtaaaatttgaaagcaaatcacaacgactgtacaataaccgtccgatccggggctgttgtctctgagctaagctacagtaaaatttgaaagcaaatcacaacagctagaaccaacaccaggtaaaggaaacagttgtctctgagctaagctacagtaaaatttgaaagcaattcacaacaatgcggtttgccatttccatcgcgatcatgttgtctctgagctaagctacagtaaaatttgaaagcaaatcacaaccatgtattctatattatcaagaacggcgtgttgtctctgagctaagctacagtaaaatttgaaagcaattcctaaccatttagtataagaatgcaaaatcattaaccgccagtagcgccgcaatacattgcggcgctactggaaggcgttttcacaccataaaagatgaaatcccgggggctgagatgtcttgcttccacgccgttcgtctgccctttcccactgtctgttgacaccagagtcaaaaagggcagcgagcccgtatcttcagcaaaaagccattatgaagccttctattgccattcgcatcctggccatcgttattgctgtatttatgatcctgcacggcatcagccgtattgtaaccaatggagtggaaggttttggtgagtttctggacagtaaacattttcctgccggtcacctgctggcatgggcgcttacagtaggtgagctgctgtttggcttgctgatgatcgtgggcttgtttgtagaggtctgctgtatcttctttgccgttgaattattattcggcattatcctcgtgcattaccagaatggctggtttgtagtggggcacacactgggtggcatggagtataatgtattgatgattgtctgctttgtactggtattgttaagttggagaaaggtaaatgggataagggaaaaggcctgacgaacctttagccatttatctcttgttgtccttccacctttgaccatttagcttccgccttactgtactggtattgttaagttggagaaaggtaaatggtgtaagggagaaggcttgacggtcttttaaccaattatcccttgttctccttatacctttgactatttagcctccaccctgctataactccttacgcagacgcgccacaggaatattgagctgctcgcggtatttggctactgtgcggcgggcaatattatagcctttttcctgcagtaattcggtaaggcgctcatcactcagcgggcgttttttgctttcgccttcaatcaggtcgctgaggatcttttttacttcgcgggtagatacttcttcgccgctttcggtgctgagtgattcactgaagaagaacttgaggcggtatgtaccaaattcggtttgtacaaatttgctgttggccacgcggcttacggtagagatatcgagaccggttttttcggcaatatctttcaggatcatcggcttcagactggtctcatcgccggtaatgaagaaatcgtgctgatggttcatgatggccgtcatagtgctcagcagtgtatgctggcgttgtttgatggcatcgataaaccatttggccgcatctattttttgtttgatgaagagtacggcttctttctggcgtttatcttttttggcgccacgttcgtattctttcatcatatcgcgatagccttcactgatgcgcagttcaggggcattgcgcgagttgagagtgagttccagtttaccgccattgttgaagatgaagaagtcgggcaccacgtagctttctgctttgttgataccacctacattgcctccgggtttggggttgagacggatgatctgctgcatcacatccttgagctcatcttcatctatagccagtccccgctgaatcttttcatagtgcttcttggtaaactcatcgaagtatttgcggatggcctgcatggcagtttccacatccttgccttcctctttctgacgctgcaattgcagcagcaggcactcctgcaggtcgcgggcggccacacctggcggatcaaaccgctgaatgcgctgcaccatttcttctacctcttcttcggtagcattaatattctggcggaaagccaggtcgtctactattgcactcgtttcgcggcgcaggtacccatcttcgtcaatactgcctacaatctgttcagcaatcttttgctgtttttcatccagcttcagcagccccagctggttgagcagcgtttcataaaaactcgcttctgttttaaatggcacctgcttattatcctcttccggataattgtcgtcgcgtgttttgtaatccgctacttcatcatctccatcctgcacatattcgcttacgtctatattatcgtattcgtcttcactgccactctgctcttcaaattctgtttcggcattgtcgctaaactcatccaccatttcttcgccgccttcctcatggttctgatcatccagctccagggcgggattctcttccagttcttccttgatccgctcttccaggttggcagtaggcacctgcagcagtttcatcagctgaatctgctgtggtgaaagtttctgtaaaagcttctgttgtagtgactggctaagggccataattttgtccaaacgttttaggtggccagataatttgaggctcttaaaaagtcaaaaatccggccattcatcaaaaatcaggccgtaaatttacaaaacaaagagatataaatggcccaacgcatttttttggtagttgttgtgctgatttttccgtttaacggggaaatttttgcccagcaaaaagttgtggaaaaaaactttgctttgccttcatttttaagcgcatcgcgtaaaatcgactctttacccctccgtctggccggggcattttttcccgcaaaaaaaagtgtagaggtcccctcattttttcagaaaaagctacagccggtagccccttcgttttatatcaggaacctcagttttatctgtcgccaggaatggcagtttcagaaaaacaccggcattcccctgcgtatcaggctgggatcgctggagtatgtagaccggttggaagggaagagaaaagaagtgcgataaatcaatagttgaaagggtttaaaaagtataaagggtataaagtgctattaaaaccctttataccctttatactctttatactttatacctgtcacctctctaaccactccatcaccggtacctgcgccggcatgcggtaataattatttctcaggctgtcgttccatccgttgggattgcggtcaaatatcttgctgctataatagatgctgccctgaatattgggatactgacgcagcaacttgatctgattgggcaattcagaggggttcttccaggcaggatttttttcaccggcacgatatacgccatgaccaatataaacatggcggccatagctgtggcggctccaccagtcaaccatggtctcatacgcaattttatcatgtcccatctcaaggtaaagctggggtgctacatagtcgatccactgtttctgcatccatagcaggatgttggcatacagatcgtcatagttcgtctggccggcacgggtgtcgctgcccatggggtccctgtctttattgcgccatacgctgaaaggggagataccaaattttacctgcggcttttcctgcttaatagccacgcttagtttataaatgatggaatccacattgc

SEQ ID NO: 2591 - DNA, 24332 bp, synthetic construct
  misc_feature 1..24332: note = Synthetic
  source 1..24332: mol_type = other DNA
gcagaccaccacccagcggcacataaccgctccaggcagtaccataattgccgatacctacaccggcagtaatgaatggagagaaaacatgctcatcgttaataggacgggcatgtaaagagccttcaaattcgttggtatagtcagacttagagcctgttttgctgtaatctgtaaacaaaccattatagcgtaaagagaaatcgatctttttggtgatacctttccagtacattacagaaaaaccgggatctactttcccgatcttgggtacagaggccgaaaaatcaaccaggttggcactgaaacctattaccgatggtttctgtgcatacgtgacaagtgttgacattaataagaagcctgttaaaactcttttcataaataattactactgtttatctttttggttaaaaaacgcatagctataacgggtagttcagtcaatgctgaaccacaatacaataccgtctgagcaaggctttaccagccggcaattacaataagttttgaggaaaaggtaagcacagctaacaatcgtccgggtaagaacccggtatgaacaaagtatttgaacagatagaccgtgaaaggaaagcaaacgtttcgcgtggtaaatatttttttttacttttttattttttgtatcttttttatagcaattacagggcagcattacatgcaataaagattgtgtttcaacggtatcgataacattggttcaacaatgatcatattggtatatagccttacagcacagcgtttcagcgattgtataatttatgcaaacgtttgcctgaaaatgggtataaatgcctgtgggctggtacatcttttaaattaatcagatatttgccttatggaacccctgcgcaacgccccgcctttttttgaggtcttagctcaaaaagctgcaaaaggcgataatcatgcttttcagcagctatacgattcaatcgccggcaagatgtatagtttatgtcttcggtatgccggtaataccaatgatgccaatgactgtttccaggaaggatttgtaaagctgtaccggcatctcgccgcttatcgtggtgaaggctcgtttgaaggatgggccagaaccatctttgtgggcgtatgtattgattacatgcgaaagaaaaagaacttcctgtcggtagtaaccgatgggctggaagtttttgccgacaacctttcagggtatgataagcttaataacgaagatctgatgaagctgatccgcaagctgcctgacggatacagggctgtcattaacctgaacctggtggaaggatataaccacaaggaaataggagagatgctgaacatttccgaagaaggaagccgttcgcaattgtaccgggcaagagtaagcctgcaaaaattattaaaagaaaccaatggccaatcgatctgatatattcagccggttacagagctatgaagtgtcacctccacaggaggcatttcagttgttgcagaacaggctgcttgcagagaatgcggctgttgtgcaggaaggtgtctggcatggtttgcagcaactcagcatttctcctccggaaatattgcaggaaaagatcacgcaggcaattgccgcattgccatcattgatctgtctgcagcaggtagccatactgccgccaactggtgtatctgcacacatacaacagcaactgttccccggaaagaaacaaactggtaaacaatggctgcaggcacgctggatagctgctgcttgtttagtgctggcactggcaggctggggcatatattatcttggtacggtaaaacaaaccttacctgttcagcaacctgtggtacaggctccggttgcaacaccccgatcacagatagcagaacaacctgcagacagcaatgctgctattgtaaagaaagtattgccgcaatacaaagactacgataacaacagtaatgtaaacttctttaagaataaccgttttaaaacagaaggcgccttcatcacaatcaccgataatgattttgtggtaacatttgccagtttcagttatgatgaactgcctgcatttttaaccagcgaagaaaataaggaacagtttatcaggttggatcagtacagctattttaccatttctgaaaatatggtagctatgctgaagaaaatgtaccagacaaaatcaaaaggtactcctacccgtagagcacgtaaagaaaaagaaaagctggagcaatggaaaaaagcagacgaaaaacggtttgatctgcaaaaaggtaacccgatggacccgattgacctgggtgatttcctgtttaaataatcagaacctatcatgcatgtatatcgctgtcaattgtatatgtttttcctgttgtgcctggcattacaggtaaacgctcaacctgccaatgctactgcagatgtgcaggctgatcttactgtttcatataccattgctgtaaaagggaaaagaagcaataccggtatgggcgaagcttattccggtggtaccaaaacgctttttgtgagcaatgaagtggtacgcctgcggcagatcaacatgatgcgtatgcagaatatctttattctgcctcccggcaatgaacggcgcaaagcggttattgtaaaagaatccggtaaggataaatacaaaacctatctcgatgccgcacagtggaagcaatacaaccagaaatatgaaggtgctacctgtcagttaagtgaagaatatgtaaccatcgcaggctatgcctgtcataaggcaatcattaaattaacggacggccgtttcattaccgcttattatactacattattaccacacactgcagccgctgttgctgaacctgcctttgcctgtgtaccggggctggttttgaaatatgaataccggtataagaaaaatagtatcacttacactgcaacgtctgtcagccgtcagccaattgatcagaatattctgcgcgttccttccaaggggtatgtggtgaaatgagggaaatttgaaaatgggtagcccgattgcttgatggttgaatggttggattgtgggggtacatgaagtcggatgtctgaaatcagaaaaggcacaagaggcaaggaacaaggttcaaggcgaagagaaggttgaagaagctacgagctttgagctacgagtgatggccaatacagtatgaagggttgaaaagttgataagggaatagccaactgtttttgcgttaattaggttgagggcaaaaacagcaacgatcactcacgattgacgattcacgaccctaatccggatagtcccgcgtcaggatgttcatatactcatcgatcactttttccatactgaacctgcggatcaccagtaaacggccctgtttgcccatgtgcaggcgatcttctgtagacaggttgatcattctctccatcttatcggccaggtcgaacgggtcatgcattttgcagaagaaaccggtaatgttgttctgcactacttccttacagccgcgatttacagacgtgatgatgggcatttccatactggcagcttccatcaggcagcggggaataccttcgttataaaaagaggggaatacaaaacaatcagcctgcgttaaccagtgacgtacatctttggcaaaacctttatagtgtacgagaccttctttttcccagttgtcgagatcttcctgggtaatggagtccgggtggtgtttttcaaaaaaaccgatgagcaggaactgaacgtcgtaattctttttcttcagaatgcgggctgcgtctgcatacagacgaatgcctttgcttttgagcaaacgtgtgctcatgatgaatgtaaaaggctgctcacgtggttttcgtttggcagggtagaaatgctcagtattaacaccttcgccaggcaatacctttacattcctgatgtgtacgatcttttcgctgatgaaaaccttggcgtcttcattattcaggaaccatacttcgcgggttttacgtaatgcttttttgtacagcagttttacaatccggtacagcaggttcttgcgtgcaaaaggataacccagcccggtgatcaccgctacagaaggaatgccggtagcagcggcagccaatgaaccgtaaatattcggtttggctacatagtgaaagataaaatcaggccggtgtatgcggtaaagctgttttagctgacgataaaagaaaagatcgcggaaaggattttcagttttgttatcaaaatgaagcggaataaaccggcaaccgctggctgtaatttcggaagaatattcatcatcaggtgccattaccagcacgcgataaccttcggacagcaggtgcctgataacatccatgcggaaattatacactgaccacgcgctgttggatacgaaagctatcagtttatcacaagtgcggtattgctgcatccgttattattggtgtcaaatttatagatttgatgcggaattagctataaaccattgaatccgcgtgattttatgctcaccttgatcctgtttactgtttacacaatattgctggtatatgcctggtacaggttggtgcgacgtgctgccgtgccgctgtcagccggtgaaacagcactggccatggctgttaaaatagcaatggggtgtttatatggctatatcttttggcattactatcagggcgatgacacctggcaataccaccacgattcgctggaagaatacgataaactgctgcaccatacaaaacagttcttttatgagctaacccctgcttctgccattgaaagcggcaataccgcactggaaaaactgcaggtatatgtaatgaacctggagtaccggataacggtgaagttgctgggtgtattcaacattttcagccggggcagttactatataaacgtaatattgttcaacggcattgttttctgggggcactactggttgttcagcctgttggtgaccttgtttccggccaaacgtaagtggctgtacatggctgttttcctgttgcctgcacctttgttctggctcagtggcatacgtgccgatggattcttgcttttttttaccacacttatttttctgcatacctaccgctggctgcacctgcaaaaaagctggtctgtactatggatattgttgggattgataggtttatggctttttcgcacagtgacggtaggattggtcattccaccggtagtagcctggtatcttactgtaaaggcaaaacgacaggcagcactggcttttgcaagtgtatatagcattggcattgtgctgttttttggcaccagcttattaccgggcccggtgagtctgccaaaggtaattgccgggcggcaggctgcctatttcgcactgcaagccaatacccgggtgccactggatacattgcagcctacggttatcagctatgcaaaggtgttgccgcaggccgtcaataacactttcctggagccttatccatggaaggccaagggattattgcagattgccacatcgctggataacctgttgctgctgggactagctatagctcttttctggcttcgtagtcctgcctggaaacagtctttagcacatcctgtttgtatttccctcctttgttttgctatatccctttacctgttgatcggttacatggtgccttttccgggggctattgcccggtataagatcatcgggtcgttatttctgtattgtctggtagtgatcgctgcccgtaagcgagatgttaatgaaacgaattatgaaaaaaaataatattttgttatttggccgaaattgagtattttattgaataataatcagtgagataccagttttttcacattttgtccaatattattgtatcacaggttaaaaaattttttaaactgcctatttctcgtttatttgcacacacttaaaattgttgtttaatggaatctttacgttttaaagcaatcaacgacctcactgttaacccaagcggcgtgactgtagaaggttctgccaaaattaccggcatcttcggggagaatgtatttaccctgaaaacggcccgcgaattcttaagtgatgaagcatataaaagcctgctggcttctattaaaggaagcaagaaaattgaccgcgtgatggcaaaccagatctctgccggattgcgtcaatgggctgaaagcaaaggcgtaagccatttcacccactggtttcaaccattaaccggtactactgctgaaaagcatgattcgtttttcaccattaagggtgatggtacacctattgagcaatttgaaggtgatgcattaatacaacaggagcctgacgcttcttctttccccagcggcggtatccgtgctactttcgaggcccgtggttatactgcatgggatccttcttctcctgcctttattatggagatcggttatggaaaaacattgtgtatacctaccatcttcgtttcttataccggtgaaacgctggactataaagctccgctgctgaaatcactggaaacactgaacaaagctgctttagacgtatgtcattatttcgataaaaatgttaccaaagtaactgctaccctgggttgggaacaggagtactttgtaattgacgaggcgctgttcaatgcacgtcctgacctggtaatggctggtcgtactgtatttggtcatgagcctgcaaaaggccagcaactggaagatcactatttcggttctattcctgaaagagtgtatgctttcatgcgcgattttgaaactgaatcatacaaactgggtgttcctttaagaacccgtcacaacgaggtggctcctgcacagtttgagtgtgcacccatctatgaagaagtaagtgtggcagtggatcacaacaccctgttgatggatatcatggatcgtgtggcacgtcgtcacagactgcgcgtgttactgcacgaaaaaccgtttgccggcatcaatggcagcggtaagcacaacaactggagtatggctaccgataccggcgtaaacctgcttgctcccggtaaaactcccaagaccaacctgatgttcctgacgttcttcgtgaacaccatcaaggcggtacatgattattctgacatcctgcgtgctgctattgcatcagcgggtaatgatcatcgcctgggtgcaaatgaagcacctccagccatcatttctgtattcattggtcaatacctgtacaaagtgctggctgatgttaaagaacgggtaggtggtaaatttgatgagcaggacgaagcgatcctgaaactggatctgcaccgcagtattcctgaactgttgcttgataatactgatcgtaaccgtacttctccttttgcgttcaccggtaataaattcgagttccgtgcagtaggctccagtgctaactgtgccaacgcaatgacctctctgaataccatcatggcagaaacactgaagaaattcaaaaaagatgtggacgccctgattgaaaaaggtgagaaaaaagagatcgctatcatgcatgttatccgcgagtatgtggtaagcagcgaaaaagtattgtttgaaggtgacggttacagcgacgaatggcaccatgaagctgaaagacgtggtttgcctaacgtacgcactacaccgctggcgctggatgctatggtgacagacaaagcaaaacacctgtttgaaagcaataacgtactgagccatgtagagctggaagcacgtcatgaaatagaactggaaaaatatatcaaacgtgtacagattgaaagccgtattatgggcgaattgtgcaccagtcatattttacctgctgctatcaaataccagaacctgttggtaagcaatatcaaaggtttgaaagaagtgggactgccggaaagcagttatgcaaaccagaaagcgatcctggaaaaaatatcagaacacatcaataaagtgagtgccctggtagaaaaaatgatcgaagcacgcaagacctgcaatgccatgaccgatacccgcaccaaggctatcgcttaccagagccaggtaaaagacgcgtactttgacgccatccgctacagcgtagacaaactggaactgctggtagcagatgattactgggtactgcctaaataccgtgaaatgttgttcctgagatagtgaatggagaatagtcaatggtcaatagtgaattggtagctgttgcattgaaaattcaggaacttaaatcatacaaaagcctcttctgctgacccggaagaggcttttgcttttctgtgataaagtgggatgggatagattatctgccgtaaaaggatattaattgttttgcactctttctttttcccgtagatacacgaagaacataagtgcagaaaaaataagcagcaaatagttgttgttggtaataaagttatatgcacctcccgcaagaaataatatggtaaacaaaagatacacgttacgcatatcatatttgtgagctgtaaaaatgtaatcgatatcttcctgtgtatacccttcatttatcagttcctcaacaatttcaccctggggctcgccttttttcagccgtgttttgatctcgtttattttttgaggtgtaaccatagcagtaaatatatataaaatatgaagtagtctgccttacgaagccggttcgtagcttgtatgcatccgatttctccatttcctgatagtgtatttcttttatcattctctctcttcagccttgtgccttccatacggtttcccgtactattgatactaactgtttaagtacattagaacccggattcaggacccgggaatataaaaattgactttcctcaaataaatgatgtaggagggcaattgtttttgtttgcctgaaacttcgagtatatttaatgttagtacaatttcatccagccaggcagggttacctgaagacggtagctgattttttattattaaacctctaaaaaaactgcgctatgctttcacctgccaagaaaagcaagctgttgctggctttaaaaaactaccggaagaaattcctggaacgtgatctgacagaactggatgaatcgggtacccgcctgatgatcaatagttttctgtcggaagtattggattacctgcctatagaagagatcagaacggaatatatgatcaaaggtacctatgctgattacatgatccagatgggcggtatacgtcattttctgatagaagtaaaagcctattcgttacagttatctgaaaaacacctgcgccaggcggtgaattatggcgccaatgaaggcattgaatgggcattgctgaccaatgggaaacagtttgacttttacaagatcattttcggacagcctatcggggagagaaagatcttttctgttgatcttagtaatgggcctaatctgaaacatgatgccgagtttatacaatacctgcacaaagatgccgtattaaagaaaagtctgaaacaactgtggagcaggtgcgaagcgctggacccggtgaatgtggcgggcattatctattcaaaagaagtattggcggtaattaaaaagctggtaaagaataaatactgtgagaaatgtgatgacgaagagatcgtaaaatcattgaatcgcattgtacaggaaaagatagacccggatgttataaaaccctataaaacgggcaaagcccagaccaaaacaaagaaagctacaaaatctggtgaagcaatagtacatgtgcctgtagtggatattacggtaacggatagcgagagcggacaggaagcagtgttggggtgaaataaaacaaggttgataaaaacaaaagccccaccaaagcagggctaagaaattcttcggcttatagccttattgtgatttgcagtgtgaatataagcaaatcacagcatacactctacataatgctatgaattgtgtaaaaataaaaaggtcaagtgatttactcggctatgggtttggaagccataaccaacattttgtaccaaatgtttaacctttcgagcaaagatagtatatttgatttatagtagagtgtatgagtccaattttaggtataaaaattgataaaaaatgaaaatcttgggaatagacttgggaagtaattctttaggatgggcaataagaaatactgatttaaccggaagtcaaattgaaaaatttggtgttttgacatttaataaaggagttggtgttggaaaaactggtgaatattcctacgcggcagaacggactaaaaagcgttctacacgccgtttatatcaatcacgaaagtataggctatgggctacactcgaacgtttaatatcggaggggtattgtccgttgtccattgaaaaattaaacaggtggagacattataacaaagaagaagctattaagaataataatgcaggtagagtatatcccattgaggatttagcttttgatgcgtggataaagcttgattttaataatgatggaaagcctgattatacaagtccttatcagttaagaaaagaactagctgaaacaaaattagattttgctaaagaagaaaatcgtttcaaattaggaagggcattgtatcacatagcgcaacgaagaggttttaaaagcagtcgaaagagtactgatgatacgaaggagaaagaaacaatcgatagtgatgtattagatttacaatattctgaaaaaaagaaaaataaaagaattattgaagaatttaacaagtatccagaggctaaaactatcggttggctttttgcccttttagaaaaagacaaagccagaattcgtgaaagtattgctcagtatgctattagagaaaattataaagaagaaataaaatacatgttccaatttcagaacctgaaattggaacatcctctttatattaaattggtagagactggcaagaatagaaatgatggaagcatcttttataaacgtccattacgttcgcaaaagggattagtcggtaaatgtacattagagcccaagagatacagagctccgatcagtcatcctgcttttgagactttcagggcttggacatttttgaacaatattaaatataaagatgcaggtgataagaattctctttggaatcctttaccacttgaattgaaaaaggaaatctatgatgataagttttttaggaaatcaaaatcatatttccctttctcggagataatagattttgtaaaagcgaagggaaataattgggagttgaattataagcctaagacaactgtaaccggctgcccggtttcagcaagattgaaagatatttttggggataattatttgtccataaaaatatctaaagaaaaggcctctaaaactaataaaacatactatgatatagaagatatctggcatgttttatttaactacgaagatcaggaatatgtatctgcatttgcagagcaaaaactaaagcttgagcctgaaaaagtaaaacaatttgtaattgcttggaatgctctgcctgtcggatatgggatgctaagcattaatgctatcaataaaataaatagatttctagtgaaagggttgatttatacagaggccgttttgctggctaatatccctgagattattggtgaagaattatggataggtaatgaaaatttctttcttcaaaacataggtgatgttattgatgaaaacaggctgcaaaaaacagtactgaatattgtaaatactcttgtctcaaagcataaaaaccttgattcaaatgaaaaatttggtgtaaaaaataataactataagttggatgatagcgatcatagggaagtcaatgttgctattgaagaacaatttggtgcaaatagatggagcgaatttacagaagataaaaagcagcaaatttttaatgctgtaaaagattgctatcaggcatattttattacttcggggttaacaagaaaggatattaatggtgaacgatattttgaagttcattcatgcaaggggaaatattacaaaactgactctggctattatcgtttacctaaactgattgatacgctgggcgaatttttacaattaaactttggtgttgaagataaatcgcttcataaaatttatcatccttctgaaataaatgtttatccgccagcaaaaccagtaaacggatttttgaaattaggtagtcctaaaacgggctcatttaaaaatccaatggcaatgcgtgcgttacatgagttacgtaagctgataaattatttaattgaaatcaatcaaatagatagcgatacaagaattgtggtagaagtagcaagagaactgaatgatgccaataagcgttgggctattgaaacgtggcaaaggcagcgtgaagctgaaaatcaggaatttgcgaaggcaattgaacagcttttaaacgaggaaaaagaaattgtcgcagatgccaaaaacaacaatgatatcgataaggtaagattattttacgaacagaacactgaacaaacgcttccttctgttattgaagctgaaaatgataaaagcaaaaagaaaagagatgtttttaaagatgaatctgtaaggtggaacggacatggaaagaatcttattgataagtacaggttatggaaagaacaaggataccggtgtatgtatacagggaaaattatcacccttgcggacttatttaaagaaggcgtaattgattttgaacatacagttccaagaagtaaatcatttgataattcattagcaaatcttacagtctgttatcatgattataatcgtacaataaagaaaaatcagataccaacactgttgagcaattatgataaagattatgattttgggggtaaagttggagcttgtactgcaatctttccgaggttagatgcatggaaagaaaaagtggaacgtataaggcagcaaattgatttttggacaacaaaatcaaaaagggcaatagacaaacaatggaaagatgatgccattaggcagcgtcatttatggaaaatggagctggattattggcaaaataagtttgacagatttactattactgaaattacaaccggctttaagaacagtcaaaaaatagatacccagcttatttcaaaatatgcttttcattatctcaaaacttattttgagaaagtggatgtacaaaaagggagtatcacagctgagtttagaaagatttataggttacaggcccctgatcagaaaaaagataggagtaagcattcccatcatgccaaagatgcggctgtactaacatttataccaactgcagcaaaaagagatgcaattcttgaaaaatattatgaggcaaaggaaaataatctgccatttacagaggtagagccatataagggatttaaacgtgagtttatctggaatattgatgacactgttttggttaataacattactaataaccagtcgattacaccggcaaaacgtaaggtgagaaaaagagggaaagagcaatttattcctggaactaataatacaatgtgggcaacgggcgatagtgtaagagggcagttacaccaggaaaccttttacggagcaataaaacctgcaaagcgagacgataaaggaattgttcaaaaagatgagaatggaaaatttgtacaagaagaaaaagtaaagtatgtagtaagagttccttttcagtttaagaaagacacaaatacacccggttttaaaactttagaggaaatacaaaaacaaatagtggatgaaggcttaaaaaagcaaattgaaaaacaagtacaacaatctgggggattaaaagaagcatttgaaaaaggaatttatttgttggataaaaatggtaagccgcatggaaataagataaggcatattcgtgtatgggcaagcgtttccgaccctttaaaaattaagaaacaaacaaatatttctaaaataaaaagccaggaatacaaacagtattattgggcggccaatgcaacaaatagttattttgctttatataaaggagatgggaaaaaagggtttgcttttagaagtctttttgaaacggctaaggttatttctgtcaatcggattaaaagtccccgagatttatttgaaccactaatgagtatatctaaaggaaagggaacaattgaattgcctcttgcctatgtgttagaagtaggagttaaggttctttttttgaaggaagaaagtgagagtttagaaactttgcccaatactgagttattgaaaaggctttacgtttacacaaattttgagaaagatggaagactaaattttaaataccatttagaagctagaaataaaatagaagatgaatatagggattctgaaattgatttcaatgatccgaaaccaacacttagatttagctatgctaaatatagtttttgggttgaaggctatgatttcaagatagaaatagatggaacaataaaatggacaaattagctggtatttcatccataataaagctgttaaaaagggtgaatagtctatctgaatgattgctctaagtgatatgagaaatcttcccaattgcatgtattgattgccgtctatactggatatcgggtgaatagaatggttgtaaaaatgggaagatgttcatgaatgacaagtataaataagcagttgagaggtttggaattttaagctaataatatgatcaagcgtacattatattttggaaactccgcttatctgaaaacagctaatgagcagcttgtaatagaaatgcatgatagcggagaaaccaaaactgcacctattgaggatattggtttgctgatactggatcatcagcagataactgttacacaggctttactggcaaaactgctggctaataatacggcagtgatcacctgcgatgccacacatcacccgactggtatgatgctaaacctggatggcaacagcctgcaaagccagcatttccaggcgcaggtagaagcttctgcaccgctcaaaaaacaactctggcaacaaacaataatagcgaagatctgtaaccaggctgctttactggaaatacaacggcaggaaaacaagctgttgctgaactatgccaaagaagtgaaaagcggggatggtgataatcatgaagccaaagctgctgcctattactggaaacgggtatttcctgatttcctggaattccggcgtgaacgttatggtcctccacccaataacctgctgaattacgggtatgctattctcagggctgcggttgccaggagtttgacggcatccggcctgttaccaacactgggtatttttcaccgtaatcaatacaacgcttattgcctggcagacgatattatggaaccctaccgcccgtttgtggatagacaagtatgtgctattgtacggggaaatggccggttcctggaaatgacaccaggcatgaaaaaagagttactggcagtgttggcgatggacgtacagatcgatgggcaaaaaagcccgctgatgaacgctgtacagcgcactacagccagcctggctaaatgttttgaagggaagtccaggaagttgctatatcccgaactgatatgaatagtgtagggctcttatattcacctttcgaagggaatgggggctttgaacgcctgaatgcttaccgcattatgtgggtactggtattttttgacctgccgaccgagactaaaaaggacaggaaacagtatgctgtattccgtaaaaagatactggcagatggtttccagatgttccaattcagcatgtacatacggcattgcagcagccgggaaaattcagaagtacatatcaaacgggtaaaaaacattctgccacccaaggggcatgtgggcattatgtgtgtgacagacaagcagttcggcatgatggagatattcaggggcagagatgccgtagaggccccggaaactgtacagcaactggagcttttttagcggattgactttaaaatagcgaaaaccaggttaataggaataaaaaaacgggttggaagacccgtttttttattctgtatccggcctgaaatgcagtctggataaggtttttctgtaattcagttgtgcaagaactaatgtacagaataatttgaaagcaaatcacaaccaataagcagaggttctgcctgtgtgccgagttgtgcaagaactaatgtacagaataatttgaaagcaaatcacaacaaaaagctgaagggttgtacatgagaggttgttgtgcaagaactaatgtacagaataatttgaaagcaaatcacaactgaaaaggctaaggatattatcaacactgtgttgtgcaagaactaatgtacagaataatttgaaagcaaatcacaactacccaggctaagatattcgcggacaaattgttgtgcaagaactaatgtacagaataatttgaaagcaaatcacaactgtcgcctataatgctacatttgtaaataggttgtgcaagaactaatgtacagaataatttgaaagcaaatcacaacgggtacgtccgggttgatctgaaagaaattgttgtgcaagaactaatgtacagaataatttgaaagcaaatcacaactcttttccttacgcttcacgccttcgggctgttgtgcaagaactaatgtacagaataatttgaaagcaaatcacaacgaaggccggggcgctattcccggccagtttggttgtgcaagaactaatgtacagaataatttgaaagcaaatcacaacgttcgacggtcgagcaacgggcataacgagttgtgcaagaactaatgtacagaataatttgaaagcaaatcacaacactgcccatgcatgaagatcattgccataagttgtgcaagaactaatgtacagaataatttgaaagcaaatcacaacggagaactggaaagtttcccggaaaaagtagttgtgcaagaactaatgtacagaataatttgaaagcaaatcacaaccgatgcgttcaggccatttaaagagactgtgttgtgcaagaactaatgtacagaataatttgaaagcaaatcacaactgttagggtctttatcatcaagatccaatggttgtgcaagaactaatgtacagaataatttgaaagcaaatcacaactcccgtatcgaaggcatgggcagccttaccgttgtgcaagaactaatgtacagaataatttgaaagcaaatcacaaccgtattggtttaagcgcctgcgtgtgcggtgttgtgcaagaactaatgtacagaataatttgaaagcaaatcacaactatggaatacctggttacagaggtatgcaagttgtgcaagaactaatgtacagaataatttgaaagcaaatcacaaccctttaacgatcctgcatcaacgaatccatgttgtgcaagaactaatgtacagaataatttgaaagcaaatcacaactgggtctgtattgtctcaggtgattaatagttgtgcaagaactaatgtacagaataatttgaaagcaaatcacaacggtctgcgcctgcatgaacaagctggccatgttgtgcaagaactaatgtacagaataatttgaaagcaaatcacaacgtggtgaacagttggaataacacaaaggcagttgtgcaagaactaatgtacagaataatttgaaagcaaatcacaacgcagtcacgactccggttgcatcgccggcagttgtgcaagaactaatgtacagaataatttgaaagcaaatcacaaccccggcatggttgcccagctttcatacacagttgtgcaagaactaatgtacagaataatttgaaagcaaatcacaactaaatagtcttttgaggccagtttcggctggttgtgcaagaactaatgtacagaataatttgaaagcaaatcacaactcctcattttcttttcttcctagtggccttgttgtgcaagaactaatgtacagaataatttgaaagcaaatcacaacagagaacaagtataaccttacttatgatgagttgtgcaagaactaatgtacagaataatttgaaagcaaatcacaaccgtatggttgggcacatctatcggtagtcagttgtgcaagaactaatgtacagaataatttgaaagcaaatcacaacacctgatgattatcacttcaacactacttcgttgtgcaagaactaatgtacagaataatttgaaagcaaatcacaaccgcaacccgctggctatcctgttcgggcttgttgtgcaagaactaatgtacagaataatttgaaagcaaatcacaacaccacggggtaaacccccaaacaggtgcgcgttgtgcaagaactaatgtacagaataatttgaaagcaaatcacaacattacatggcgcacgaagttcagccctgaagttgtgcaagaactaatgtacagaataatttgaaagcaaatcacaactaattaagggcatggcatacgagcaaaaggttgtgcaagaactaatgtacagaataatttgaaagcaaatcacaacccaactgcataccctggaaccagaacccgagttgtgcaagaactaatgtacagaataatttgaaagcaaatcacaaccgcggctgggtagcctggaacccgctatacgttgtgcaagaactaatgtacagaataatttgaaagcaaatcacaacttaaagacaaagggtttgccgctatgtacagttgtgcaagaactaatgtacagaataatttgaaagcaaatcacaactccaatgtggtacagaaaccataagggcgggttgtgcaagaactaatgtacagaataatttgaaagcaaatcacaacttgcagcagtattaccgaaacttcgtttacgttgtgcaagaactaatgtacagaataatttgaaagcaaatcacaactttcaacggccaggcgcttattgcggatttgttgtgcaagaactaatgtacagaataatttgaaagcaaatcacaacactttgcaatttcttcctttgtgaaaacctgttgtgcaagaactaatgtacagaataatttgaaagcaaatcacaactaatagcggatagctgccccggtggttcggttgtgcaagaactaatgtacagaataatttgaaagcaaatcacaactcgaacgacttaggtacaggggactgcggcgttgtgcaagaactaatgtacagaataatttgaaagcaaatcacaacagttcggccaccgtggcttcctggttcttagttgtgcaagaactaatgtacagaataatttgaaagcaaatcacaacagtctatggtttgccttttattagctgaaagttgtgcaagaactaatgtacagaataatttgaaagcaaatcacaacctgtaaccgttcgcctgttccgggttttccgttgtgcaagaactaatgtacagaataatttgaaagcaaatcacaacgcgcagactgttaccaccacggacagcaagttgtgcaagaactaatgtacagaataatttgaaagcaaatcacaactatcttgtccaggtgcgccaatgtcgccgcgttgtgcaagaactaatgtacagaataatttgaaagcaaatcacaaccatacaacgaggcggaccggcagtatttgcgttgtgcaagaactaatgtacagaataatttgaaagcaaatcacaacggctgttaattttttcgtagtcaatgacgagttgtgcaagaactaatgtacagaataatttgaaagcaaatcacaaccgcaacccgctggctatcctgttcgggcttgttgtgcaagaactaatgtacagaataatttgaaagcaaatcacaactgcgaagatcgggctggctccgcgttcagggttgtgcaagaactaatgtacagaataatttgaaagcaaatcacaaccgcaagtcatcaaaggcggaaattcaaagagttgtgcaagaactaatgtacagaataatttgaaagcaaatcacaacgtgagtcgctttttttatcgcaaagactttgttgtgcaagaactaatgtacagaataatttgaaagcaaatcacaactgcaggaagaatattgctaggtagttatcagttgtgcaagaactaatgtacagaataatttgaaagcaaatcacaactatcagaacacaagaaagcctgaaccgttggttgtgcaagaactaatgtacagaataatttgaaagcaaatcacaacactggcgggtcgtcaaaaccaatggtttctgttgtgcaagaactaatgtacagaataatttgaaagcaaatcacaacgggcgtagttcggctctttaacgatcgtgtgttgtgcaagaactaatgtacagaataatttgaaagcaaatcacaactttgtgattgtaacacctttcattccgaaagttgtgcaagaactaatgtacagaataatttgaaagcaaatcacaacacccggctgaagttgccctgtatgactgtgttgtgcaagaactaatgtacagaataatttgaaagcaaatcacaacgatagcatcatgcgcaacattgctgccgatgttgtgcaagaactaatgtacagaataatttgaaagcaaatcacaacaacagcaggaagaaggtgtagatcataatgttgtgcaagaactaatgtacagaataatttgaaagcaaatcacaactacaccggcatcgtattgccggtaaaacgagttgtgcaagaactaatgtacagaataatttgaaagcaaatcacaacgcgcgtgcaatggctgaacagtgggggtagttgtgcaagaactaatgtacagaataatttgaaagcaaatcacaacattcggcatgatcaccttctctgtttctttgttgtgcaagaactaatgtacagaataatttgaaagcaaatcacaacagctgcaaccgttcgcccaaagataaagtgttgtgcaagaactaatgtacagaataatttgaaagcaaatcacaaccgaatcggatgtgcactgcgttcccatgtggttgtgcaagaactaatgtacagaataatttgaaagcaaatcacaactataaccagcattttccgccctccagaagagttgtgcaagaactaatgtacagaataatttgaaagcaaatcacaactatcagaagacgataaaaattctcaactcagttgtgcaagaactaatgtacagaataatttgaaagcaaatcacaactaggtagtttttattttctaaaaaataaccgttgtgcaagaactaatgtacagaataatttgaaagcaaatcacaacgtatgaccctcttttatcggctgataaggtgttgtgcaagaactaatgtacagaataatttgaaagcaaatcacaacacatacgcagacatacttaacaactacgccgttgtgcaagaactaatgtacagaataatttgaaagcaaatcacaactcaggcgaggaacgaatacaagcgatcaacgttgtgcaagaactaatgtacagaataatttgaaagcaaatcacaaccatagttgagcgatacaaaacgaaaatgaagttgtgcaagaactaatgtacagaataatttgaaagcaaatcacaacaggaggaagttatgtagaagttaccgcaccgttgtgcaagaactaatgtacagaataatttgaaagcaaatcacaacagtgcatcattacgtatttggtcaggaaaggttgtgcaagaactaatgtacagaataatttgaaagcaaatcacaacgcttggagcatattaacgacctatcatttgttgtgcaagaactaatgtacagaataatttgaaagcaaatcacaacttgtgagtttaaaccgcataagacaaactggttgtgcaagaactaatgtacagaataatttgaaagcaaatcacaactacagggtcattgcaaatcaaggtagcacagttgtgcaagaactaatgtacagaataatttgaaagcaaatcacaaccctgcatctccttaaactttgtcagcatatgttgtgcaagaactaatgtacagaataatttgaaagcaaatcacaacttttcaacggctaaaagcatcaacaggatcgttgtgcaagaactaatgtacagaataatttgaaagcaaatcacaactcccggctgtcaggcgactttcagcgtttggttgtgcaagaactaatgtacagaataatttgaaagcaaatcacaactgtaccggatgatgtagcgcaggtcttcatgttgtgcaagaactaatgtacagaataatttgaaagcaaatcacaactatcagagtctatgcaacttccggagaacagttgtgcaagaactaatgtacagaataatttgaaagcaaatcacaacccctggcgtgttgcttttgcgctacaggaggttgtgcaagaactaatgtacagaataatttgaaagcaaatcacaacctcaacgtagaaggaggttgattataattgttgtgcaagaactaatgtacagaataatttgaaagcaaatcacaaccgacctgaagcagcaggcttgggaacaactgttgtgcaagaactaatgtacagaataatttgaaagcaaatcacaacctttttcaaaggacaaaaatgtgtgttagagttgtgcaagaactaatgtacagaataatttgaaagcaaatcacaacggtgaacgtagcggcaaccgggagcaggaggttgtgcaagaactaatgtacagaataatttgaaagcaaatcacaaccaataaggttccattatctgatttgctaaagttgtgcaagaactaatgtacagaataatttgaaagcaaatcacaactatttccggtactaccgccgtgactaatggttgtgcaagaactaatgtacagaataatttgaaagcaaatcacaacccttgcgtatcagttttcccgattgattaagttgtgcaagaactaatgtacagaataatttgaaagcaaatcacaacatcttgttagtcaccatatcctttcgtgctgttgtgcaagaactaatgtacagaataatttgaaagcaaatcacaactacaccggcatcgtattgccggtaaaacggttgtgcaagaactaatgtacagaataatttgaaagcaaatcacaactatacctcaggtattgtcaatgcgtttaaagttgtgcaagaactaatgtacagaataatttgaaagcaaatcacaaccgcaagccatcggtaaaagttttattgaaagttgtgcaagaactaatgtacagaataatttgaaagcaaatcacaacttgccaatacagtgagtgatgtgattgaaggttgtgcaagaactaatgtacagaataatttgaaagcaaatcacaacgtaaagggtgatgctcaatctaaaagaagtgttgtgcaagaactaatgtacagaataatttgaaagcaaatcacaacactatcttatgaacaaaaaaaagaattagagttgtgcaagaactaatgtacagaataatttgaaagcaaatcacaacgttccttacctcaagctgaagtttgtatgtgttgtgcaagaactaatgtacagaataatttgaaagcaaatcacaacttatgatcatccggaccggaagcagaacctgttgtgcaagaactaatgtacagaataatttgaaagcaaatcacaacattcaaatatcgcaaatacaaaaaggcatcgttgtgcaagaactaatgtacagaataatttgaaagcaaatcacaaccttccgagggtatagacgcagttttaaaaagttgtgcaagaactaatgtacagaataatttgaaagcaaatcacaactattttgctcttaagaaacagcaattgaaagttgtgcaagaactaatgtacagaataatttgaaagcaaatcacaactattttgacgttaaagtatttggcaagattgttgtgcaagaactaatgtacagaataatttgaaagcaaatcacaaccccaagccctttgccataatccatgataaagttgtgcaagaactaatgtacagaataatttgaaagcaaatcacaaccatcaatgcaaggtgcctgaatgcatgaaggttgtgcaagaactaatgtacagaataatttgaaagcaaatcacaaccatttctcctagatatacaccatatttttgttgtgcaagaactaatgtacagaataatttgaaagcaaatcacaactcctaatcgtgtaaccaaaattcgttaatagttgtgcaagaactaatgtacagaataatttgaaagcaaatcacaaccttccactatgtataagagctgttcctgaagttgtgcaagaactaatgtacagaataatttgaaagcaaatcacaactccacggacttgctgcacgatacgatcgccgttgtgcaagaactaatgtacagaataatttgaaagcaaatcacaaccctctgatgcatatccccaccctgttaacagttgtgcaaga

SEQ ID NO: 2592 - DNA, 24317 bp, synthetic construct
  misc_feature 1..24317: note = Synthetic
  source 1..24317: mol_type = other DNA
acttggttcgggtgtttatatgaatctcgacacgattgatattgttccatacgctgcgtttttatcggaaaaacaaaatccaaaaaaccctgaattgctttcggcaaacggaaatttaatttttgatagaacctcgcaagaatatagaattggtagtactgataagttgaaagaactttccctacccggaaattatatttcgctcaaaaaagaaaaatgcgaaatttttggcgatggtaaattcaccttcatgaccgaccctaatttatttaaattaagcactataggctcaatgaagcacaacccgtcagccaacaaaactgaaattacggcaagtatgatttttgatttcccttttaacgacaatttactcgaaaaatttgccgaaaaaattaataactaccctgatttagtagcagttgacattgaaaaaacaccttacgaaaaggcattaagagagttggccggttttgaaaaggccgataaggttaaacaagatgtgattttgtatggcgaaataaaaaaatggcctgatgagattaaaaaagcaatttttttaacagatattaccctgaaatataaccctttggaagcttcttacgtatcgtgtggtaaaattggaattggacatctctttaaaaaagaggtgtttaaatatgttgaaggaaaagttgtgatcaaaaaaactaaaaaagaagatgtaatttcggtgtacttgcaaaccgacgaaacaaattattttttctttcaatacagcacaaaaacaggaattgccgatgcttattttggcgatcaaggattaaacagtacaatacaagatgccaaagacgataaaaaacattttaaaggtgaaaaaggagaaaaagattttgattacagattacttgggcaaaaaggaaaaatagaattggtaaaaggaaccccttgcgaatgataaatgatttttcatattacaatgttgtaagcgtatttattgcgtatatactgggcagtatcccaaccgctgtttgggtaagcaaatattattatggtattgatattcgaaactatggaagtaaaaatgccggcgctaccaatacatttcgtgtgttaggaagacgtgcaggtgttcctgttttgatgattgatataataaaaggttttcttgccgttaaattaggcggaactttttcggaatacatggccaatacaaacccattggtgaattttaaaattgtacttggtgttgcagcagtgttgggacatatttttccgctgtttgcaagatttaaaggcggtaaaggtgtagctactgtttttggtgttgtaatagcaatgcactggcaagcggccggaatttcattcgcaatttttgcacttgtttttatactttctcactatgtgtccttaggttcaatgttagcggcaatcctttatcccttccttataatggtggtattcaacagtcatagccctagtatgatttatttttcaatagctgtagcagttataatacttttcactcaccaaaaaaatattgatcgacttatgcgcggacaagaaaataaaatgaccttgcgtaagcgaaattaaaccaataacccttacacgtgtactgctaagtattgaaaaagccgctttgcgaacaaagaatcttaaatataaaatactattcgttttttttattctatgcaatgtcattacaaatggtcaaagcaagtctgaactagaacttttaaaacaaggaaataaattttttgcggatgaaaattatacagctgccgaaccgctttttttacaattgctttcgcttaatcaaacaaacgccgaatacaattacaaatatggaacctgcctattgtttaacgacggtgaaaaaagtaaacccctaaaatatcttttgttcgcagccaccaaaggtacaggtttagataaagaagtattttattttaccgcaaaagctttgcatttaaattatcgttttgccgaagcgataaaatattataaaaaatatactgagttagccgggtcaaaaggcgaagaaaaatatcaagttgcgcatcaaattgacatgtgcaataacggaaaaaaattattgcgtaatgttaccgatttaattgttgtaagtaaaaccgattataacgaaaaagatttttttagactttataaatcaaccgaaataaaaggatcaattacccccgccgaagatttacaatcttcaattgataagaaaaaaaatcatcgtgtagtaatacacatccctaaaaacagcgacatcgttttcttttcaagctatggtgaagacggaaaatcgttagacatttatcgcgtacgtaaattaccgggcgcaacatggtcgaaaccacaattggttaaaggcggcgtaaatacaccttttgatgaagagtttccatatatgcaccccgatggtcgtacactatatttttgttcaaagggtcacaatagtatgggtggttatgatgtttacaagagtgaatacaattcggaaaacgaaacttttggtccgcccgaaaatttagattttgcagttaacacaccggatgatgatatattttacgtattggattcgttagaacaatcggcatactttgcatcaaaacgagaaagcggattaggaaaagtttatgtttacaatgtgcgcgttgaacgcattcctgttctcattgcaattttaaaaggaaaatttgttaatgaagtatcgcccggaaaaaattcggctacaattacagtcgaagatgttgccagcaatgaagtagttggtatatacaattcaaaaacttcaaccggcgactacttggttacgttgcctaaaagcggtaaatataaatacaaagtaaaagtagaaggaaaagatgaagcctatgaagcgcccgttgatgttccatatcaaaaagaattaaaaccattaaaacaagaagtagcgcttatcaataaagatggaagtgaaaccatagtaattagaaatatgtttgatcaggaaattgaaaacgctgatgaaataattgccgaagtactaaaaaataaagcttcactaaatccaaacgccgacaatattcccgatagcgttttgcaagcattagcaaaaaaagacaaagacaaaattgttgacaccgcattaaatgaaaatttaaccaatgaacaattaataaaaatggcaaatgatattgccgaaaagcaacaaaaggaagccgatgaattgaaagaaaaattagatgctgcatatacagttgcaaatcaaaaatcgaccgatgcgcgcgacaaatcattagaagccgataaaaatattagtgaggccgataatattgttgatccacttgaaaaaggaatgttgtatgatgatgctaagaaaaaaaatgatgaggcaaataaggcaagtaacgaagctgtaattgctttaaaccttgcaaacagtttagaaaatcaactcaaaaaacaacaagaagcagctaatcgaagtaaagaaaacgcaaaaaaaattgaagaagccattaattcaaaaaaccatgatgaagcggttaaaaaattacgcgaacaacaagattatattaaagaactaatggttggcgaaagttataaaaccgatttatacgatgaagttaaaaagaaggcggccgataaacgcagcgaagcaaattcaaacctaacaaaggccgaaaactataaaaaattagaaaccgaactggcaaatgaaatagaaaaattaaaacgcgatgaagaaaaggcaaaaggcaaaaagaaagaagaaattcaaaaagaaataaaaagacttgaagaagaaaaagaaacagcaaccaataacaaaaaagaagcatttaaaaaagctgatatattaaccaaagaagccgatcaattggatgatcaagctgaaatgttaactaacattttggacaatactacttcgagtaataaaagcttaaccgaagcagaaaaaaatgcgctggctgaaaacatacgcaaagatgccggaaacattaaagaaaacgatcaaaaaatagatcaaaaaacaaataccgatcgtcaaaagaaatttgattacaatgattttttagcgaaatacgattattacgccaacatgtttaatgaatatgaacgattaaaagccaatttactgactcccgatgattatgataaactcattaaccataacgataaatggatgaaagaaattgacgatgacattgtgcgaacagaaaaagatgaaactaacgctaacgatgaacagaaaaaagcattggctgctaaacgagaagaattaaagcaaatgcgagaattaaaacgcaaagaaaatgatgatttaagaatagaaaaacaaaaattgcttgatcggttggccaacaaagacaaaaacaaagaaaatttattggcttataatgataataacttgaatgaggcaactaataagaatgataaacaaataaaagaaattgaaaaatcaaatgcttcggatgtaaaaaaggcaaacgataaaaataaaaccaataaagaatacattaaagaacttgataaaaccatagcaaaagaaaaggaagatttaaaaaataaatcgggtgacgatcgtaataaatcaatcgaaaaaataaaaatacttgaagaaactaaaaatcaaaaaaacattgaaattaccaagaacaataaagtacttgaagaaaaaggaatggacaacgcaattgaatcaaccgttaccgataaaataaaggattcgaacaattcaaccattaaaaataaacttgacaaaacaaataaactaaaagaggaattggccgaactatacgttcaaaaatcagacgctttaaatgaaaaagataaaaatgacattgataaaaaaattgaacaaaaaaagaaagaactttataaagaagaaacggatttaactaacgttgtgaaaattgaaaatgataaaattataaatgaaaataacaaaaaattagaaagtgataaaaataacttgaacgaaaatgacaagaacgaaaccaataaacgaatagccgaaagcaatgaattgaaaaaccaagccgacaaattgtttgacgattcaaaaaatgaaaaggacgtgaacaaaaagaatgaattgcaggaaaaagctttagaaaaacaaaatgacgctataaaaaaacaaaatgatgctaaagaaataaccgataattcatcaaacacaattgccactgaaaacaatgcaacttacaccgagaatgaaaaagagtacaaaaacagtgagagtaaaaatgaattggaaaaaataaaagacgacttaaataaaattgaaaatgataaaaaagaaattaacgatttaaaaagtcaagaaaaaaatgcttcgggtaacgataaagaaaatttaaataaaaaaataaccgataaagaaaacattttagttaaagacgaattagcagtatctgatggtgtatcaaaaattaatcgcaatgaaattgatcaaaatttaaaaaacattggcaccaaattaaatcaactaaattccgttactcttacagccgatcaaaaaaacaaacttaatagtgcaaataaccgaattgaagaagccaatatagccatttcaaaagccgatgcacttcgtaacgaagcattaaaagaaactgatgataaacgcaaaaatgaattgcttaaacaagccaataacctggaaaaagaagccatacgcaaacaacgcgaagccgatgaattacttgaaacactactcgctgaaattacggtttcattaaatccggaaaataaaactaaagatcaagaaattatttcagaagtaaataaagagtataatagcaaattagatgcgataaaaaattcgaacgaatcggaaatccgaaaaattttcgccgaaaatgaactgaataaagatttggtaaacaacatagaaaaacaaataaatgaagaaaacaataaatcagtagaaggattaacagaagaggagaagcgtaaaagacgattaaaaattgaagaacttaatcgtttgctcgacgcaaagaaaaaagaattaggaattaccgaagaaaaacttaaacaagccaacgttatagacaataatcaaaacaatgaaaatgattacaaaaataatctcgttgtagaaaacgaatcggctaaaaccgatttaaataaaattcggcctactcttgatgacatagaaaaaaacagggataaaattactgaaaataatattcgtattcaggaaaccaatgaccaaaaagaaaaagataagttgactaacgaaaataaatcgttggataaattgaccgaccaaaaggaaataggaattgccgacgaaattgctgatatcaatcaaaaagaaataaaccagaagcgaaatgaaattgctgatatgcaaatgaattttacaacgaaaggaattgaattattggaagaagatgccactaaattaaaatcatttacagaaaccgcaaataatttactgaaagaagccgacgccttgcgtttacaggccaataaagagacaaatcccgatcgcaaaaatgaattgttcaaaaatgcatttacaaaagaacgtgaagcaattgatttattaaataaagcagaaactttacttaaaacctataatgaaaaagaacctgtaagtgttaattcatcaaatgaaactttaaaagaaattgatgcgaattatgaaaataaaatgaaagaaattaatgattcaaatcagtcactattgagcaaaacagtacaaaaggaaaaactgaatgagaaactaatcgtttcaatagaaaatgaaattaatgcgcaacaaaaagatttgtcgaatcaaactgaggaagaacaaaaacgcaggcgaatgcgaattgaagaattaaatcggttattggatcagaaaaagaaggaattaaatattcaggaaaattatttagcggcaaacaatattaataacaacaatagttatactacaccctactccattaaaaacaaatcggctatagcactagaaattgaagcaaaaacgcgaattgaagaattaagacgtgaagaagaaaaattaagcgctttagaaattaaacgaagcgaagcgatttctgaaagtgaaagaaaaaagattgacaatgaaatcgccaatcaaaagaaaattgtcatggagaaagaacttggtgtggccaaaatttatgccgacatgaacaattatgaaatcaaagaaaataaactgctggttgaaaatttagaagataaaatagcggcaaataataaagttgatagaaattcgaaaaacgcagttgaagccgataaaaaattaaaagaagctaatcaacttttactcgaggctcaaaacattcgaaattcagccgataaagaaaacaataaggaaaagaaaaatcaattattaaaaaacgccttttcaaaagaaaaacaagcaatacgattgcaaaatgatgcgattgcgttatatgaaaatttattgagcgaagtaattgtttacgctaataacaaaaataatgaaacagtaattcctgaaaatccaaatgatcgctcgtcggcaagagcatttgaaaaatatgaatcgttaaacaatcgcgccaattatttggaagaacgagctaaaacagttcgtgacagcgccgaaaccgtaaagaaaaaaaacaaacaaagtgttttaaatttagccgaaaaattgcaagaagaagcaaacgacgcacgaaacgacgcaaaccgtgctaaaaacaattacgagactattaaacaacaagaagattcgcaactggcgcttcaagaacaaaagaaacgcgatgccgatattgcaaaagaaattactcctgaggttgaaaaaatgaatgaatatgcaaggtattatcaacttcaaaagaaagccaatgataaaaaaattgaattggagaaaaatcaaaaaattgaagaagaattgcgcaattctataaatgataaaaatcgtgaatcaaatttacgaaaagcagactcattaaacacaataaataataaactaaaatctgaaattgaaaacgatgaaaatttggcaaacaattatttagcaagtattgaaacggataaagccgaaaaaataaaaaaagtaattggtgatgaaaagaaaaatttaatcgttcctgcaatttcctataccgaaaatgttgtaattacaaatactaccgatttcgctaaaaactttaaagcgcccgacgaaattacaagtgatatttacaaaaaatcggatgttgcagcttataacaaggataatcccattccaattgatgtaaacaatccgaaaggtgtttattataaagttcaagtaggtgcttttagaaatccaataccacaagatttatttaaagaatttgtaccaattacaggtgaaacaacgccgcaaggatttacccgttatactgttggatatttcaccactttcaactcggctgatgatgcaaaaaaagaaattagaaatatgggttatcgcgatgcgtttgtagttggatttaaagacggcaaacgcattggtgttaatgaagcaaacactgcgatagctgctaatggaaataatcccgaaagaaataataatcccgaaagaaataataatccggacagaaataacaacactactgccgttaataattttgacctgaatacagcaggtaacgatttcaacaactttactcctaaccgcaataacgccgcttactacaacgataacaatgccgcaaaagcaacacaagttgaattggtaaaaggattgttttacacggtacaagttggcgtatattcgcgccccgttagtttggataaaatttacaatatacaaccattaaataccgaattaacggctacccgaaaaatacgttacacaacaggaatgtacaccgacgttgcaaaagcaattgcaagaaaagatcaggcgcgtgcagcaggaattaatgacgcctttgtaacagcatattttaacggtaaaaaaattaccttagaacaagcgcgccaattggtaacacaatatggcgaaaccatttacgcgaaagataatggcagcaataactcaacagtaaccgtaaatggaaatctgaacggaaacaacaattcaaactcaaataacaatctgaatggaaataatgatccaaacggaaacaatttaccgaatgcgacagaattttactcaattgtattgggagaatacaatggcgaggtgccacagcgcgatgccgaaattttcatgaacaacaataataaatataaaattttaaaagctaatcgcgataataaagaaatttattttatcgaaacaaataaaggaaaaactgatgccgataagattaataattattttaaagaacaaggattaaacggaagcaaaatagtgaccgaaaaaattattggcaatggaaataatacgaataaccgtgtaattgaaccaaaagaaaaacccgaattaaaatttcaggtttatttaggagaatatattgacgaagttcctgaagacgatgccttaatttatattaataatgttgacaaaggcgtacaacgcaaaacgaatgatggtggttatacgatttattatacttgcgattgcaattcgtacgataaggcgcttgaattaaaagcacattttgttcaagagggaatttcatcaatacgaatagtaccatttttaagcgggaaagagattacgatgaaggaggcgtttagattgatttatgagtagaaagagctcaaagtcgaaacttttttggttaatttttaaaataaaaaaataacatttttaaggattcatgtttagcattcataaacatgaattccagcatatcaatttctaatcttttatttaccaattatccattaattaaagagtgtttgaacttaattataggttatcttaatctgacaacagagtatagggcgggctcacaaaacacttaaattccttacaaatcattggcaaaattgaaaaaaatacgatattagaggaataaaaaagccccaccataagcagggcctgagaaatcttcggcttatagccttattgtgatttgcaagacaaatgtaataaataaattaaaccatgagcaaaatttttggattagacttaggaacaaactcaatcggctgggcgttgcgtaatcctgatttaacaggaaatcaaattgagaaatttggagttattactttcccaacaggtgttggaaaagatgattatggacgatacaccaagtcttatgctgctgaacgtacaaaaaaacgttcaactcgccgtttatatcaatcgcgtaaataccgtttgtgggctacactcgaacacttaatcaaagaaaaatattgtccgctttcgattgacgatttgaataaatggcgccattacgataaagaagaagctcgtaaaaacaacaatgcaggaagagtttatcctgtttggaacacaacttttgatgcttggataaaattagattttgacagtgacggaaaacctgattacacaagtccatatcaactcagaaaagaattagccgaaaccgaattggattttagtaaagaaattaatcgctacaaattaggacgagtcttgtatcatattgcacagcgcagaggttttaagagcagtcgcaaaggtgctgatgatactaagccaaaagacaacgaagaaattaccgatttacaatattccgaaaaaaagaaaaacaaagttattgaagacttgtttggaaaatacccccaagcaaaaacaattgattggttgtatgctttgttagagactgataaaattcgtattcgtgaaagtattgcgcaatttgccattcgcgaaaattacaaagatgaaatcaaacacatttttcaatttcaaaaattaggccttgaacattcgatatacaagaaattagtcgaaactggaaacaacaaaaacgacggaagtattttttaccaacgcccattgcgttcgcaaaagggtttaattggaaagtgtaccttagagcctaacaaatatcgtgcaccaatcagtcatccgagttttgaattatttagagcgtggtcgtttatcaacaatgttagatacaaatctgcatccgacagtaacgcttattggaaaacactctccttagatctgaagaaagaagtgttggataaattatttttcagaaaatcaaaaacctatttcccgttttctgaaatagttgattttctttcaaagaaaggaaatactggacaattcaattatccactaaaaacaacagttacaggttgtcctgtttctgcacgtttgaaagatatttttggagatgattatttgaatataaaaattgcaaaagaaaaagcacctaaatcacaaaaagcctattacgatattgaagacatttggcacgttttattttcttacgaagaccaagaatatgttgccgaatttgccgataaaaaactaaaactttcgcccgaaaacataaaacaatttgtgattgcctggaatacgtttcctgtgggctatggaatgttaagcattaatgctattaataaaataaatgtgtttttgcaaaaaggtttaatttatactgaagccgttttgatggcaaacattcctaaaataatcggaaaagaattgtggccggaaaacgaaaaattgttacttgaaaatatctcaggcattattgatgaaaaccgccgacaaaaaacaatattgaatattgtaaacaatctcgtttctaaacataaaaatttaaaagtaagcgaaaagtttggacacaaggacaacaattacaaattagacgatttagataaaaaggatattttaaaagccattgaagaaacttttggcacaagtaaatggacagaaaaaccagcgcaagaacaacaacaaatttttacaattgttaccgattgctaccaagcctatttcaaacaaacaggactttctgttaaatacattcacaatgaaaaacattttgaaataaaatcggaaaaacatttttattacaaaaccgagacaggctattatcgcttacccaaattgattgatacactatcagagtttttgttggcacattttgaaatttcggaaaagcaaattcaaaaaatttatcatccttcggaaattaatatttatccacctgccaaagaagataaagacggagttttaaaattaggaagcccaaaaacaggttcattcaaaaacccaatggcaatgcgaactttgcacgagttgcgcaaattaatgaactatatgattgaaacgaaacagatagataacgaaacgagacttgttgttgaagttgcaagagatttaaatgattccaacaagcgttgggcaattgaagcatggcaacgtcagcgcgaagccgaaaaccaagaatttgctactgcgattgaagaacttttaaaaacaaattcaagcattaacgccaacgccaaaagtaataatgatattgataaattaaggttgttttacgagcaaaacgatgaacaaacacttccacctgtttcagaagaagaaacaaaaggaaaaaagaaaaaatcttttgaaaaagacgaagtcgtaagatggggcgggcacggaaaaaaattgatagacaaatatcgtttgtgggtggaacaaggctatcaatgtatatataccggaaaattcataaaacttaccgatttatttaatcaaaacgtgattgattttgaacataccattccacgcagtatttcattcgataattcattagccaatcaaactgtttgttttcacgattacaacagaactgtaaaaaaaaatcaaattccaacacagttgaataactatgacaaagattttggcggtcatacagctattttaccacgattggaaaaatggaaagaaaaagtagaacgaataaaacaacaaattgatttttggaaaacaaaatcgaaaaaagctgccgacaaacaacggaaagatgatgctatcaaacaacgtcatttgtggcaaatggaactgagctattggaaaaataaattggataggtttaccattacagaaataacatcgggatttaagaacagccaaaaaatagatacacaactcatttcaaaatatgctcttcattacttaaaaacgtattttgataaagtggacgtgcaaaaaggaagcgttactgcagagtttagaaaaatatacagtttacaagtacctgatgagaaaaaagatagaagtaagcattcacatcacgctaaagatgctgctgtacttactttaattccaattgctgcaaaacgcgatgaaattctaaaaacatactacgaacacaaagagcaaaaaaaacactacactactgaaccgtacaagagttttaaaagagaatttgtatggaatattgacgacatcattttgataaacaacattacaaaaaatcaaacactcacacctgctaaacgcaaagtgcgtaaacgtggcaaagaagttttcattgaaggaactaacaaaccaatgtgggcaacaggtaacagtgtgcgagggcaattacatcaggaaactttttatggagcaataaaacccgctaaacgtggtgaaaaagggaatatagagaaaaacgaaaaggggcaatttgttcaggaagaaaaaataaaatatgtagttcgtgttccttttcaatataaaaaagattcaaacacacctggttttaagactttagatgaaatcaaaaaacaaattgttgatggaggcttaaaatcgcaaatagaagaacaagttcaaaaagccggcggtttaaaagaagcttttgacctaggtatttatttattggataaaagtggtaaaccacacggaaataaaatcagacacattcgtgtgtgggcaagtgtttctgaacctttggcaattaaaaaacaaactaatatttctcaaaaaaatatagagtataaacaaaattactacgctgctaatgcaacaaatagcttctttgctatttataagggtgaagataaaaccgattttgattaccgaaatttgctagaaacctcaaaaatcataaacacagggcagattaaaaagcacgcagatttgttcgagccaaaaatcagtttcaaaaaaagtaaaaaagaaattgagcttaaattatgttatgtactaataccaaatgttaaaattattttcttaaaagatgatgagcaattagaagatgtaaaatcgttttcagttattgaattaactaaacggttatttgtttttacaaattacgagaaagacggacgtttaaatttcaaacatcatttagaagcaagaaacaaaatagaagaaaattattccgaatctgaatgtgattttaataatcctacacctacactccgtttttcttatgcaaaatataatttcttagttgagaggtatgactttgaaataaaacctgacggagaaataacatggattgactaaaatgataaagcgcactctctatttcggcaatcctgcttatctcagtaaaaaagataaccagttagtgattgatttattgaataaagaggataaaaaaacaattcctattgaagatattgggattatagtactagacaatcaacaaataaccatttcgcaaggtgcattaatgtgtttaacgcaaaataatgctgcagtaataacttgtgatgaaacacaccaccccattggtttattaatgcccttagacggaaacagcgtgcaacgggaaagatttacgtcacaaattgaagcatcattacccttaaaaaaacaactttggcaacaaactatcgaaacaaaaatttacaatcagcacttgattctaaaaaatctgggaattgaaagtgaaaacatgctttactggagtaataatgtaaaaagtggcgacaatgaaaatcatgaggcccgtgcggcggcctattattggagtaaaatttttccggaacattataattttagaagggaacgggctggattaccgcctaataatttattgaattacggctatgcgattttgcgagctattgtagcccgtgctcttgtgagttcaggattgttaccaacactaggtatacatcaccgcaataaatacaatgcatattgtttggctgacgatattatggaaccgtaccgaccttttgttgatcaaattgtacttgacatcattaatagcggtgaaaattttgaagaactcactccttcaataaaaaaacaactattgagtattgccactgttgatattgagttggaaggtgaaaaaagtccgcttatggttggcatgcaacgcaccaccgcttcattagcaagatgttttgaaggtacacaacgtaaaattgtatatcctgtaatgacttggaacgattaaatcaataccgaattttgtggattttagttttttatgatttaccaaccgatacgaaaaaagaacgtagagtcgcatctttatttcgtaaagctattcttaaagatggttttagcatgtttcagtttagcatttatgtgcgtcattgcaatagccgtgaaaacgccgatgttcatgtaaaacgggtaaaaaacatattacctgaacttggtcacattggcattttaacgataactgataaacaatttggcgacattgaattgtattttggcaaaaaagttcaagagaggcgaaaagtaccgcaacagttagaaatgttttaaataaaaaatccctataataaatttatagggattcatttttgttatcaatttttttattctaaaaaacgttatatattgttgtttattaatgaaataacttcacctctattgataacagtatttcaaagatacaattcgaaagcaaatcacaacgtaaaaaggcaaaacaagtaaaagacggcaattgataacagtatttcaaagatacaattcgaaagcaaatcacaacacacaaaacaacgtgtccaaagcatattgaattgataacagtatttcaaagatacaattcgaaagcaaatcacaacgctaaaacaattctgttataaaaatccattattgataacagtatttcaaagatacaattcgaaagcaaatcacaactatggtatcaaacgaatataccgtacactattgataacagtatttcaaagatacaattcgaaagcaaatcacaaccaggataacgttaacaccgatcaccgatgtattgataacagtatttcaaagatacaattcgaaagcaaatcacaacaaccataagcaagttgttttcgtaaatccgttgttgcatttatgtcaaagatacaatctgaaagcaaatcttgaaacaacctatttcttctttacaaacggaaatcaatttaagcaaattaacaaccgggatttattttgcgaaaatatcaacagaaaatagttttgcaacaaagagagttgttgttgacaggtaatttattatccattgcaaattgttcaatattggcgattagaaatcaagaataattttatccttttttttttattcattttacgtgtagtgaagtgaatgattatttatctcctaattttagtaaggcggttttcattctgcttcgctaaccccacgcaataaaaacctttttattattctcctcattcttctcttcaatatttttgtcaaaatccagcaacaattctatttcacaatttgaatcaaaaatccaataattttctaatcgaaaaacaatttctatttcttcgcccggttgcagaatcggaatttttttcactaatgtccaattaaaatcataatccactcctttcgtcacccactcgccttcatcatttgccctattgttgttttcttttatcgcttcaatttctaatttcgataatttcattttttttgcttcggcaaccgttatatccaaatctcgtaatatcgcattagtttcaatattggaaatagttcctttgttttttattttcactttaataatcgacccctgtaaactctcatcatattcaggtgcggcaatagaaatcacttctaaatcaacataattttttttgctttccattttttgaggatgatcgggcttattataaagcggctcttccttttttactaacgaagtattttctgctttattaaaataatctctcggcggatttggaccaccgttacaagcgtctttatacgtatcaatatattcaaaaattgtttcaatcgctttaacacgcattctgtccgtagtatattcatcgtacgcttttactgaaaacataacttcataaacggtacaccaatctctgtctaaataaaattgcgacattaccaatccaaacacataagtcgccgcctcactatttgaattaagatcggccgcgcgataagcacaataatatccttttaaaggagcaaaataatttcccattatttgcaaataacttaataccgcataatcttgatacgtcaattttgctgcaggattataagctgcgggctgacctccgcgccaaactaaaattgaatcaaaaacagaatgttttaacgtataatttgacattaaataccgaatatatttttcagtatgtgttgtatcgccatttcctaaagcattaataaaagcgatttttttgtcaagagaatttgctgtatcaaataaaaacgcacactcaatttcactcaaataattttcaccatcttccaattcggctttaataagcggtatgtcgttataagccatggcaaatggagtagaagttaatggcgaatcacatcggcctttcgttaaaataatcgttaacaaacttactaacattactatttttttcattttaagcgatttattcaacaaataacggttattccctttaatagttacctcaatttttatcgtattttttaactattttgcgcctataaaatcaaatggtaaacggatttaaagtgacaataattatgcctgcgtacaatgcagccgcaacccttgaacaaacttggaaagaaattcctttcgacattgttgatgaggtaatattaaccgacgataaaagcaaagataatactgcagaagtggcacgcaagttaggcgtacatcatgttattgtacatgaaaaaaacaggggctacggcggaaatcaaaaaacttgttataacaaagccttagaaaccggagctgatattattattatgcttcaccccgactatcaatacacccctaagctaattcaatcaatggtatatttaatcgcaaacaatgtttattcggttgttattgggtcaagaattcttggtcgaggtgcgcgcaaaggcggtatgccattatggaaatacattgctaatcgatttttaacttttactcaaaatgttttaatgcggcaaaaactttcagaataccataccggttacagggcttatcaccgaaaagttcttgaacgcattaattacaatgaaaactcagacgattttgtttttgataatgagtttttaggacaaatttgttacgccggttatgaagtagcagaaataacttgcccaacaaaatattttgaagaagcttcaagcattaattttagcagaagttctaaatacgggttaggcgtattgcgtgtttcttttttatactttttaaataaaattggattagcaaaaagtaaattgtttaaacgaataaaacctttaaatggttaatcgctttttaattcgactcccgttttttgcaacagttagcacttttttattgctctgcctttctcttctgctcttttttcccaacggaagaagtttttttatttttaacggcatgcatcacttcactattgattcgttaatgcaatatttaacacacattggtgacggaattttcgcgctgtgtgtaggcgcattattactaattttttacaacgttggctcaggtatttttgcaattcttggtgttgctttgagtggattaattacaagcattttaaaatattttatttttattgaagcaccaagaccaaaattatttttttggggaaataaaatgatacattatgttgatggtgtttatataaacatcgaacactctttcccgtcaggtcatagcattactgcattctttatttttacatttctcaccttgctttcattcggaaaaaatgcggcaatacaatttctttttgctgcattagcaattgttgctgcctattcaagagtttaccttgctcaacattttgtcggcgacattactaccggtgcaattattggtgttttacttggcgtttttatgaatatagtttataatacccttaaaggaaagtcgatttttcgcaacagtataattcattttattgcacgataaatgtttaaaaaatcttataacggatatttactcattacaattttttcggttgtcgcatttttcctttttttgggtcgtgtacatttgtttgattgggatgaaatcaattttgccgaatcaagcagagaaatgttaattagcggcgattattttcatgtgcaaataaattatgaaatgttttgggaaaaacctccgctttttatgtggcttcaatcaactgccatgcaaatttttggcgataatgaattttcggcacgtttaccaaatgcactttgcggtgcaattacattattggtactttttcatatcggtaaaaaacattttgattattcattcgcactattgtggtcgtttatttacgccatgtcaattttgccgcacatgtattttaaatccggaataattgatcctgtttttaatttattcatttttttaagcatttatcaaatcattcaatgtttaaacaacaacaataaaactaaaaatgcaatttacggcggaatgtttgccggttttgcgtttttaaccaaaggccccgtggcatttattctaataggattaacctattttatttaccaaattaccgttcaatttaaaaacattggtaaaataaaattaattgcgctctttgttttttcattaattacagtttcatcaatttgggttttacctgaaattatgaaaaacggtttttcaaccctaaaagattttattgcctatcagtaccgtttattaactaccggtgatgccggccacgaacaaccgttttactatcactttgtggttgtttttatcggatgtttcccaatgagtgtttttagtcaaccactttttactcccggtaaattttcttcaaaattagaattcacaaaatggatggttattttattttgggtagtaatgatactttttactattgtaaaaactaaaattgttcattacagcagtatgtgttggctaccgttgagtttttgctcagcacaatttatttatacaaaatttaatgaaggaaacacgcgcaacgccaaatatgtttttttagttggcggaattttattttcaattttattgatgggtttaccacttttagggcacttcagagaatctattgttccaatggtaaacgataagtttgccgtagcagcaatgcgaatgcctgttgattggccattgtggttaactttaggtggaattttatttttactcggaatttttatctcttttaattatttacgaaaaaacaacatcctgttttttagtttttcaatgttaacttcaacaacaaccgctctattatttaccttgttttttatagtgcctaaaatcgaaaaacacagtcaaggtcctgctattgaatttttagaaaaacacaagaatgagaaggtgtatgtttttccattgggctataaaagttatgctcactactattactttaaagtccctaatgaaaataatgaattaagaaaaaatgaagaatatttagtttatggaaaaattgatcgacccacttattttattactaaaatcaacaatgattttttaaaggataaaaaggatataaaactaattggtgcaaaaggcggatttaaattttatttaagagcaccggccgatttacaaaaatgacacactaattagttaatccttaacaaccccgttttaaactcaatttattatttccaaaaacgaatttgatgtaaaaataaataaagtaaaaaactcaaacaaaaaagcgttacaagaaaattattggctaaaaaactatatccgattctatacttgataagataatacacgagtcgaataggcttgaacttacagtagaacccttaagaaagaacaaggccttaaccgaattaacgcacgttcaactaaaataaattatatttgattatccatttaatgaatgaacttgctcaaacttcgccatcaaatttactggtcaatttgcaacggcctggggtggtcaatttcgtcggcttttacaggtttccttttaaaagaaattattgtaaaattattagtactctcttattagagtttcgagaggaatatttaagtgataatgcagctttctaaccatacttaaattaagctttctgtgcttattaaaaatatcagttacacggctcttataacctaatacatgcgcaagctctttattagatattcctctttgttccatcctatacttgatagcttccaagggagaaggagtgtcaaaaacataatgttcgtcttcgtaatctttgattaacaaagccaagacatcagcatcgtcactgtccttagtccccgattttgcttgaaaaatatcttcaaacttttccatcgcttccaagtaatccttttttgttttgagctttttaaattgcatttttgttttgagtttatgagttgagtttcttattgttctttaagttgcgtttttatttgtttttttcttaccatacaagtcaattgtttctgcattgaccttatcatactcagcgtgggttcctatgaatttaacaaagccccatcccttcttgtaattaaattcgactaccaatctgaagtcgtttccttttatattaaaaactatccgatgatttccaatgatgcttgacgttgcataatccttttttacatcattcggcttcttccagttttttgataaaacatcaaagtaccacaattctaaacttttttttgctgtactgtgtttcaaccaataatttttcaatgtacttttgttgtaaatgttcattcgttttcttttttcatttgttaccgatttttagttttacaattttaatttcttttacaaatatacgttaaagtaaccaatttggttactatcgtataaaatattcttgtatttaagttcatgcaggccgtaatctcgatgctgcgatagagtcggttaaaaagtaaaacgccaagcggattaaaagtatagcgctccatatgtttggtttttttgaggggttgggaggagattaattaaatgaataaatgagaattatttctttatcgatcttaatagtcgtgtcatgccgtagtcctatttctacaaatgagattccgaacactaaagcaaaagagtgtttcgattaggccaaattacttcaggaaaaaggtgaatttaaaaaggcactctattttttcgatagggcaagtgacatttcccctttctcagcaattattttacatgaacggggtttgttaaaatcagatatgggaaattgccattctgcgatacttgatttagaccaatcaattattttaacaacggggttcgagcaaaagaaaataagatattgtaaccgcggtttagttcataagaaattcggcgaaattaagctagcttgttatgattggaaaaaagctggtcaatatggaaaaaaatatttattaaaggtaatacgccatttattgctgccagcgccgagttttgtaatggctgaaatgtttttttttttgattttgtgattgtgatttacctaacattgtttgtaagctgtttaataaatttctttactaatttgcaaataatgacacgtacttttaatgagttttcacagtgtttttaacggttgtgaatgattttaaggattaatgaattagtgtgtgttgggttggtaaaaaataaatgcataacgcatttgtaaataagaaaatgaaaaggggctttgcgccccttgtttattaatacattttatccattttactgttgtttcgccagcctgcgtcgtatttgctgtcaacaaaataaattacaatatcagcatcgtatttactatcgcaaaaataaattttctttttagcatcatatttactatctacaaaataccacaaccctttgttatcggtagcatcgtattttgaagaacacttataaactacaaggtcagcatcgtattttgagctggccacataaacttttacgtcagcatcatatttactgtcacacgaataaacagtttgggcaccggtaaattttcctgtaatgaggaatacagcaagaacaaggatttttttcatggctaaattatttttataaatatagtaccttaaacatcaatttatgtaccaaaaagaaaaaaaagaccgcattttagcagtctttctcattctaatttaattattttaatttaaacgcttttttaacagcgtttacataatccaatttttcccaagtaaataattcaacttttaattttttaatttttccgtcgggcgatttaaacgttttatcaacggtttcatttttacgccccatgtggccataggcggcagtttcgctatacattggttgacgaagctttaatcgttgctcaatataaaacggccgcatatcaaaaaccttttcaacaattttcgcaatttcaccatcggtcatttttacttttgatgatccgtaagtatttacataaacacccattggctgtgcaacaccgatagcataagatacttgtaccaatacttcactacacacacctgctgcaactaaatttttagcaatgtgtcgcgttgcataagccgcgcttctatcaacttttgatggatcttttcccgaaaatgccccgcctccatgcgcaccttttcctccgtaagtatcaacaattatttttcttccggttaaacctgtatctccgtgcggtccgccaattacaaattttccggttggattgatatgatatttaatcttgtcattaaataaatgagcaaattttttatatttcgcttttactcgaggaattaaaattgaaattatatctttcttaattttttcctgcatttttgattcagtatcaaagtcatcatgttgggttgaaaccacaattgcttcaatacgaaccggacgatttttatcatcatactctaaagttacttgactctttgcatcggggcgtaaatattttatttgcttattttcacgacgaaggtctgccaattcaattaatattttatgagcaaggtctaaagccaacggcatataatcttctgtttcgttagtagcgtaaccaaacatcatcccttgatcgcctgcgccctgctcctctttctttttacgttcaacaccttgattaatgtcggccgactgttcatgaatagctgaaaaaattccgcaagaatttgcttcaaacatatattcgctgcgtgtataaccaatttttttaatt

SEQ ID NO: 2593 - DNA, 24311 bp, synthetic construct
  source 1..24311: mol_type = other DNA
  misc_feature 1..24311: note = Synthetic
aggcatgcatgtagccattattaatacatcagtagtattggctacgggcaattgggataagagcagtgccaagatttttaaatacgtatggcaagaaaaacccttctataccaccggcacctttaattatgtggatgtacgcgacctggttgaaatcattgtaaaagcttgccagggagccgtaaacggagaacgcattattgccaatgcaggccaaatcagctaccgcgattttctttgcatggctgcgcaacatttcaataagcgggcgccctcaatcaaaattggcgctggattaatctatgttgtagccgcgtttgaacaagtgcgcagcagaattacaggatctgatcccatcattaccccagaaaccgcccgtttggcccacgcaagcacctttttcgataattctaagataaaaagagccctcggtttcgattttaggtcactggaagataccttgcagtggtgcagtaataaatatgccgagcaattggcttagtattaagctgacacttatagctttgcagctattttttactatcttggtgaaaccactaacgcatggctgagaacttccgcaaaaaagaagagagcaacgagttgattaggaaatttgaagaccacctgaaaaggaaatcaacctgcttcttcgatgttgatgcatttgaactaatcatcgatcattacttatcaaaaggcaaatacaagaaagctttggctgccgccaatatggccattgagcaatatcctttttctatagagttgatcatgagcaaagcgcagatactttctcatctgcaggcttatgatgaagcattagaaatcctggaagaagcgaaagcaatgcagccaaatgatattgatatctatctctctattggttctatttattctttacaaggcaagcatgaaactgccttaatcatgtacaaagaagtgcttgacctggctgaagataaagatgagatttactacaacattggtctggcttaccaaagcatggaaaaatatcatgaggccatagatgcatacaaactttcaatcgaagaaaatatcaatcatgaaggttcactttatgaacttgcctattgcttagacataacgggtcaattagagagcagccttaattactacaaaaaatttattgacgaagacccctactctgccgctgcatggtacaacctgggtatagtgtgcaataagctcaacaaatttgaagaagcgctacatgcttacgagtacgccaccattattgatgaagtctttgcctctgcctattttaacatgggtaatacccaaatgaatttacagaactatgcagcagcattagatgccttcaaaaaaacaatagacattgaaggtcccagtcctgaaacttattgcagcgtaggtgcagcttatgagaatcttgaacaatatgatttaggcttaaaatattttcaaaaagctgccaagcttgacacactaagtgacgaagcctggtatggtgccggtagttgtcttgaaaaacaagaaaaatggtaccaggcactgcacttctacaacaaagcactgaaaatagattcagaaaatgccgaatactggaaagcagttgcgcatgcagagtttaaagtgggcaacaccatttcaagtattgatgcttatgaagaagctgcaaagcttgactccaaagacaaagaaatatggttgaactggtcttatattttctatgagcagggtgattatggcaaagccatagaagtattattggctggctttgatgaacttcctgatgatgccgagttcttttaccgcatgaccatttacctgattgaagccggtaagtttaaagaagccttcaattatttagaaaatgcattaattttggattttgaattacatacaacgctttatgatttcttccctaaactggaaactcaaaaagcactttacaagattattgaacaatttagaagcgaaaacccctgatgaactacttgctaaaaaatctgcctgagcgtactaccaagcccaggcaatatggctttaccatggccatggataaaggactaagcgtaagagaagctgaagattttttaaatgttgccgcagaccatattgacattgtgaaattaggatgggcaacatcatacgtaacacctaatctcaaagataaactcaaagtgtacagagatgccggcatacccgtgtattttggaggtactttatttgaagcattcattatccgagatcagttcgatgattaccgcaaagttctggataaatatgatcttaattttgcggaagtatcagacggatctattgatttagatcacgacaaaaaatgtgattacatcaacaaactttcgcaacaggttactgtattgtcagaagtgggttcaaaagatgcagagaaaattattccgccctacaagtggattgaactcatgcaaaaagaacttgatgccggtgcctggaaagtaattggtgaagcgcgtgaaagtggtaatgtgggtttgttccgttcaaccggtgaagtacgatctggtcttgtacaggaaattcttacaaaaattcctttcgaaaaaattatctgggaagctccgcaaaaagcacagcaggtatggtttatcaaattgcttggtgcaaatgtaaacctgggtaatattgcacctaacgaagttattcctttagagacaatcaggttgggattaagaggcgataccttcttacattttttaggaatagataaaaaagccaacaatacacctccattttttgctgaataagctaaattgagaaaactcaaagattatatactgctttttgtaaaaggcatgggcatgggcgcggctgacgttgtgcctggtgtttcaggagggacaattgcttttgttacgggtatttatgaagaactgttgcgcagcattacatctgtagatgcagaggcattgcgcttactcttcagatttaaattgaaatccctctggactaaaattaatgggagctttttattggtactctttggcggtatcattacaagtatcatcagcctggctaaacttgttacgtttcttttaagcacttaccccattcaggtctggtcatttttctttggcttgattctcatttcatgtatcatcatcatgcgtgaaatcgaaaaatggaatctgtctgtaattttatttttcatcttaggttgtgctgccgcttatttcatcagcacatcaacaggaattcaaatgcccaataccttactatttattttcttttctggtatactcgccatttgcgccatgatacttcccggcatatcaggcgcatttattttattattaataggtaagtatgaatatatgatgcgtgctttaacaagtactgacattcctgttattgcaacttttgttacaggttgcgttatagggttaattcttttcgcaaggctgcttagctggactttaagcaagtacagaagcataagcattgccacattggccggcattatgttaggatcactttataaagtatggccctggaaaacagcgttaagttataggcttaaccaagaaggctaccaggtacctgcatttgaaaaaagtgtgcttccgggcgaatttttaaggattaccgggcaagacccgcacatattctatgccattttattcgctgctctgggcatatttctggtaatattattagaaaaacttgcatcgttagtcaaataccgaaacagcgtttaaatttgctgccttggttaaaacatgcgtaactactcatttttaatatggaaaaagtttttggattaattggtcagacattatcgcattcgttttctaaatcttacttcgatgaaaagtttttcagagacggcatcaaagaccaccactacgaattatttgaaataaagaacatagaggattttcctcaattcataaaagataatcctaatctctgcggacttaacgttacacttccttacaaagaaaaagtaatgaagtttttggatgagttggatgaacaagcaaaaaatattggcgctgtaaacgtaattaaaatcaacaaaggaaaattaaaaggattcaatacagattatatcgcttttaaaaacacactcgacaggtggattcctgaaaagaaaggattgcaggctttgatactgggcactggtggatcttctaaagccatacagcaagctttgaaagaactcaagatcaaattcaaaacagtttcaagagaagccggcaagggtgattacacctatgccgaattagaaaaagatccatccatcattgaaaagtctaaactgattattaatgcaacgccaatggggatgacccccaacacaacaacattcccagccatcaggtatgatctcattggaaaagatcattatttgtatgacctgatctacaatccggcaagaacagtatttattcaaaaagccgagatgcgcgatgctcatttcaaaaatggtttggaaatgctgcatgaacaggccgaaaatgcctggatgatctggaacagctgaaacgcgttttgcgtaatgcacaattgctgttaaagcaacagcaaaataaattgaattatggattttaggttaacaagcgattttaaacctacgggcgatcaacccgcagccataaagcaattatcacagggcataacaaacggagaacctcatcagactttactgggtgttaccggttcaggtaaaacttttacagtagccaatgttattcaacaggtacagaaaccaacgctcgtgctttgtcataacaaaacactggccgcacaactttatggtgagttcaagcaattttttccggataatgccattgaatactttatttcttattacgattactatcagcccgaagcatacatacctacttccaacttatacattgagaaagatctttccatcaatgaagaaattgaaaagctgaggttaagtgcttcctcatcattacttacaggcaggcgcgatatcattgtggtggcttcggtatcttgtatttacggtattggaaatcctgatgacttcggaaaaaatgtgatcaaacttcggataggtgaacagattgcacgaaataaattactattctcacttgttgacattctgtacaaccgcaccgaagcagaatttaaacgcggtactttcagggtaaagggcgataccgttgatgtgtttcttgcttacgctgattatgccattcgtgtatatttctggggagatgaaatcgaatcgatacaacgcattgaacctgatagcggtaaaaaaatttcagacgaaaaacttgttaccatttttccggctaacctgttcgtaactgaccgtgatcaaatgcaagaagccatcaggcagattcaagatgacctggtcttacaaattcaattgtttgaatctgataagcgtcatctggaagccaaacgcattaaagagcgtaccgagtttgatatggagatgatgcgcgagttgggttattgctctggtatagaaaactactccaggtactttgatggcagaaaacccggctcaagacctttttgcctcctggattattttcctgatgattacctgatggtaattgatgaaagtcacgtaaccataccgcaagtaagagcgatgtggggaggcgatcgttcaagaaaagtaaatttagtggactatggtttcaggttgccatcggcattagataaccgtccgcttacattcaatgaatttgaatccatgctcaaccaggtaatttatgttagtgctacacctgccgaatatgaattgaggaaatcagaaggtgtagttgttgagcaacttattagaccgaccggattgcttgagccggaaatttctgttcggccaagtaaacatcagattgatgacctgctggaagaaattcagcagcgtattgaaaaacaagaacgcgtattggtgactacacttaccaaacgcatggcagaagagttgagcaagtatttcgataatgttggcatcaaatgtcgttatatacattctgaagttgatactttggatcgtgtagagattctgcgagaactgagattaggtgtgtttgatgtattggtgggtgtaaatcttttgcgcgaaggattggacttacctgaagtctcactggtagccattatggatgccgacaaagaaggcttcctgcgcaatcagcgctctttggtacaaacaattggcagggctgccagaaatgaaaatggcaaagtaattatgtatgccgatagcattaccgagtcgatgcaatcagctattgatgaaaccaatcgcagaagaagccggcagatggaatacaacattgaacatggtatcgtacctaaaactgtaatcaagtcgaaagaggcaatcttagggcaaaccaaagtggccgattcaaagaaaagtaccgccaactattacattgaaagtgaagaaaaatcattggcggcagaccctgtaatggcctacatggataaaaataccctcagcaaaatggttgacaaaaccaaaaaagccatggagaaagccgctaaagagctcgactttatggaagctgccaaattaagagatgaatacctggccatgctcaaactcttagaagagaaaaaataaaatcagttagccgcgctgttgtacaaattgaaaaataagagcggtaaaaaggcaaaggctaagattaatccaccggtaagcaaaagcgtatcagagcccattaactgaaattgtttgaataatacagcaaggctaatgagcaatacacttaaaaaaccaaaattaaattgtaagcgctcagggcgatttaagacctgtggagaaacatatcttctgtaagcaagtattggcataaagattaaaccaaatgcaatggcaccgtatgaagctaattcggcagccataggcaattgtaacaaggcaaaaatccaacccagggaaaaagctatggcagaaactgttcccaccaaatacacgataattttcataatgctgatgtttttcatgaaagtaatctttttcaatcatatttgcagctaagctattatgtaaaatgagagaactgcggattatattcatgggtacccctgattttgctgtacccagcctggaaatattagcaaaaaataatttcaatgttgtagcggtaattacagcaccagataaaccccagggccgcggacaaaaagtaattgcctctgctgtaaaaatttgtgcgcagcaatacaatatcccggtcttacagcccactaatctcaaatctcctgaatttcttgcagcccttaaatcttatgaggcaaacttgcaggtagtggttgcctttcgcatgctgcccgaagctgtatggaatatgcctgcctatggaacatttaatttgcacgcttcattattaccacaatatcgcggtgcagcaccaatcaactgggcaattattaaaggagaaaaagaaacaggtgtaactacatttttcctgcaacatgaaattgacactggcaatatcatactgcaagaaaaagaaagtattcatgccgatgatgatgcaggaagcttatatgaaagattgatgtacaaaggtgcagaacttgtgttaaaaaccgtgcgattaattgaacagggtgatgttacaacaagtccgcaacaaatgaccggtgatattaaaacagccccaaagatttttaaagcaacatgtcagattaattgggcgcagccagcaacacaaataatcaactttgtaagaggtttaagtccttacccaactgcctggaccatcatccatgaaaaaatttataagatttataaaatcagcttaacaaataaaagtacagataacaaagctgccggtgaaattgaaacagataataaaacttatctttacatcaaaagtgctgatgactggcttgaaatttcagaacttcaggcagaaggaaaaaagcgcatgagcattcaggaatttttcaggggaaataaaatataatcatgcttatttctttaatagctgcagtatctcaaaacagggtgatcggaaaaaataatgacctgccctggcaactgcccgatgatatgaaatatttcatgcaaaccaccaagggacatcacgtaatcatgggcagaaaaaattatgattctattcctgaaaaatttagaccacttcccaacagaaccaaccttgtagtgagcagacaagaaaacttgcatgcaccaggttgccttgtatttgctgatctgcgcgaagcatttaattactccaaagcacaaggcgaaacagaagtgtttgtaattggcggtgctgaaatttatacactcgcattaccttatgcagataagctatacttaaccgaaattaaagcacatattgagggcgatacttactttcctgtttttgatcaaatggaatggaaggagatttccagaactgtacatgaagcagatgccaggcacgcacacagttttgactttgtggtttatcaaagaacaaaaaaataattgttatggaacagcacaagaaaatattaagcatactctacctggtatcaggtgcgcttaacctgttttttggtatagtagccattgcctttttatctgcactatttcccattcttgctgatgaagccggggctgatgcctggaaagttcaaacactgggcaatgtaatgaacatcattatcggtactgtgctcatcatttatgctttgccctcttttattggtgccattgccttactgaatgataaacgctggggcatgatattgctgatggtattgggttgtttcaaattatttatatttccggtaggtactgctttaggcatttataccatatggatttacatagaagaacaaaaaataagacagtcgaaattcttttaacttttacaaaaacatgtctaaactgaaagacagcataatctggattacgggagcctcttcaggcattggcgaagcacttagctatgaattaagtaaagctggcgcaaaactcatcttatctgcacgcagaaaagaagaattggaaagagttaaaggaaattgcgatgcagcagctcagcagcacattaaaatactgccgctcgatttaacacaaacagatacgcttgcgcttgcaacagaagctgcgatacaatttttcggacatattgatatcctcatcaacaatggaggtatatcgcaacgcggtttagccaaagacactttgctaaaagttgacaggcaaataatggaagtaaacttttttggtacactggcccttaccaaagcattgctaccacattttatgcaacgcaagcaaggacattttgtggtggttacatctgttaccggcattgtaggcacgccctatcgttcagcctatgcggcaagtaaacatgccctgcacggattttttgattcactgcgtgccgaacactggaaagacaacattcatgtaagtctcatttgtccgggttttattcatacgcccattacctatgcggcattaaccggagacggtacacctttaaacaaaatggatgaagcgcagttcaagggtaaatcgcctgtatggttagccaaaaaaattcacaaagccattgtcgctcaaaaagaagaagtttacctgggcggtacaaaagaagtatcagctgtttatgtaaaacgctttttcccttccctgttttctaaaatattaagaaaggcgaaggtgaggtaattacccttttaagcgcacagttttttcctaagtcctgacacaagttgtcagcgaaattcatcattatgcttaagtaaatgcagccaacacgcctattttgggtggtgcaggaaaactatgttggtatgattgacacggatgtattatattcaattataaaaaagacgacccgggttgccctgggccgtcttatatgttttcacaacggaattgaagtataaagtagtgttgaaataaagagatataataaaaagccccaccgaagcagggctaagaaatcttcggcttatagccttattgtgatttgcaattcaaacgtagtgataaaatataaaaacaaaaaatatgaataaaatttttggacttgacttgggaactaattccatcggttgggcactaaggaatcccgttttggcagaaaaccaaattgaaaaatttggagtattaacttttaataaaggcgttggcttaggaaaaacaggcgaattctcttatgctgctgaacggacaaaaaagcgttctacaagaagattgtatcaagcccgaaaatacagactgtgggctacgcttgaagtgttgataaccgaaggttattgcccattatcaatagatgacttaaacaaatggcgacattacaacaaagaagaagcggttaaaaacaataacgcaggaagagtttatccggttaacaattcagcatttgacgcatggataaagttagattttgataatgacggtaagcctgattacacaagtccatatcaactacgcaaagaattagctgaaataaaattagattttacaaaagaacaaaatcgcttcaaattaggcagggccttgtatcatattgcacagcgcagaggttttaaaagcagccgcaaaggtgctgatgattctaaagagaatgaaacaaacgacaatgaagtaatagatttacaatattctgaaaagaagaaaaacaaagccattgcggagttgtttgaaaaatatactaacgcaaaaaccattggttggctttttgctctgttggaaaaagataaaatcagaatacgtgaaagcattactcaatacgctatccgtgaaaactacaaggatgaaatcaagttcatatttcaaactcaagaattgaagtttgaagattcactatacacaagattggtagaaacaggaaataacaaaaatgacggaagcattttttacaaacggcccttgcgttcccaaaaaggattggttgggaaatgtactttagagccaaataaatatcgggtaccaatcagccacccagcttttgaaacattcagagcgtgggcgtttttaaacaatatcaaatacaaagaaaacaatgagtggaaacaactacccattgaattaaaacaagaaatctacacagaattgtttttccgaaaatcgaaatcctattttccattttctgaaatagttgcattcataaaaaaaaagggggcaagttggcaattgaattattcgcctaaaacaaccgtaactgcttgtcccgtttccgcaaggttgaaagacatttttggcgatgattacttaaacgtaaagattgaaaaagcgaaagcgccaaaatcagacaaagcgttttataacatcgaggatatttggcatgttttattcagctacgaagaccaagagtatattgctgactttgcagagcaaaaattaaaacttgaacccgagaaaattaaacagttcgttactgcatggaacgcttgccccgtgggttatggaatgttgagtttgaacgctatcaacaaaataaacgtgtttttgcaaaaaggcttgatttataccgaagcggttttgttggcaaacattcctgaaattcttggtaaaggtttatggcaacaaaatgaaacattattgttggacagtatcagtgaggttattgctgaaaaccgtcagcaaaaaacgatactcaacattgcaaataatttggtttctaaacacaaatatttagaagcgaatgaacagtttgggcgtaaagacaacaattacaaattagttgaaagcgatttatacgacattcaaaccgccattgaagaccaatttggtgcattaaaatggaatagttttcctgaagatgaaaagaaaatcatttcagatactgtcaaggactgctatcaagcgtatttcgctaaacaaggaattataagggatactggcaatgaagagcggattgtaactgttcaatcaaacggtaaaaagtattataaaaccgaatcgggttattatcggttaccaaaactgatagataccctgaaagaattttttcaagacaattttgaacaccttagcgaaaagaagctctcaaaaatttatcatccttccgaaatcaatatttatccgcctgctaaacctgataaggacggagtgctaaagctcggcagccccaaaacaagttcattcaaaaacccaatggccatgcgcactttacacgaactgcgcaagcttatgaactatatgattgaaagtaatcagattaacagcgaaaccagagttgtggtagaggttgcacgagagctaaacgatgccaacaaacgctgggccattgaaacctggcaacgtcaacgagaagctgaaaatcaggagttcgcagaagctatcaagcagcttctaaacgaagatggaagtattaaagcaaatgctgaaagtgctgacgatattgataaggtacgtctgttctatgagcaaaatgttgagcaaacacttccggaagttgcagaaacagaagaggacgaaaaaggaaggaagaaaagaaaaaaatcaactcaaaaagatgaagcaattcgttggaagggacatggtaaaaacttgattgataagtttcgcctttggaaagaacagggttaccagtgcttatatacaggcaggtttatcaagttagcagatttgttcaatgaaaacgtcattgattttgaacacacactcccaagaagcaaatcatttgataattctttggcaaacctaacggtgtgttatgcagactataatcgtactgtaaagaaaaatcaaatccccacgcaacttcccaattatgaaatagaacatgactttggcgggaaaattggaaaatgttcggcaatacagccaagattagaggtatgggaagaaaaagtaaagcgcatcaaacagcaaattgacttctggataacaaaatcaaaaaaagcagccgataaaggctggaaggatgatgccattcgccaaagacatttatggaaaatggaactagattactggcaaaacaaattggataggtttacaattactgagattacaagtggtttcaagaacagtcaaaaggtggacacacaacttatttcaaaatatgctttccattatttgaaaacatattttgataaagtggatgtacaaaagggaagcattactgccgagttcagaaaaatataccaattacaagcctccgatgaaaaaaaagaccggagcaaacattcgcatcatgccaaagatgcggcagttttaacgcttatacctgttgccgcccaacgcgatgctattttagaaaggtactatgaagcgaaagaaaaaaatccaaaagccacatttacagaagagccttataaaggttttaagcgagagtttgtttggaatattgacgataatgtattgataaataacattgcaaacaaccaagaattaacacctgccaagcgaaaagtgcgcaaacgaggtaaagaagtatttattgagaaaccagatggaacgaaagtcaacaaatgggcaacaggagatagtattcgcgggcaacttcatcaggaaacattctacggagcaataaagcctgcaaaaaaaggtgacaaaggaaatttattgaaagacgaagacggaaaatttattcaagaagaaagcttaaagtatgtattgagagttccctttactgctgatttcacaggtgttgataaaatcgttgatgagggattgaaaaagcaaataaaagagcacgctcaaagggcaggaagttttaagaaggcttttgaagaaggtatttacttgttggacaaaaatggaaagcctcacggaaatagaatcaggcacatacgtgtatgggcaagtgtttcggagcccttggcaattaaaaaacaaaccaacctttctgataaagaatataagcaaagctattgggcggctaatgctaccaatagtttctttgcgatttataagggcgaagacaggaaagattttgatttcagaagcttgtttgactcagcaaagattaagtcaataaatcctgtcaaaaaccccaaagacctatttgaagccaaaatcaccattactaaaggaaaaaaagtaacagaattaccccttacctatattttagaagttggaacaaaagttatttttagaaaagacgaaaaggaagatttaaaatcactctcaaatagcgaattactaaaacgactttatgtttacactcggtttgaaaaagacggccgcattaatttcaagtatcatctagaagcgagaagtgatagcgatataacagaacgttataaagattcgtctgttaactttgaaaatccactacctacgctgcgtttagttctaaacaagtgcaatttcttagttgaaggatatgattttgatataaaaatggacggaacgataaaatggaaatgaaatctaaaaccttaaacaactcatgatacaatttttcaaaaacttgtcaggtattataaaacatatttaataagatgctttccgaaaagtattatcacatctatacgcacgcaaatggatcagagaacctatttagggaagatcaaaattatttttactttctaaatctatatcaaaaatacatactacctgtagccgaaacgctgagctggtgcctgatgcctaatcacctgcatgcattggtgcaggtgaaaagtgaagaagagttggcgaaattttttaaaaataaactcgatcaagacctgacaggtttcgaaaacctgtcaggtctcgtggtacgccaattcagccacctcttcaatgcctacgctaaagcttataataaactttaccagcgaagaggctctttatttatccgtgcgtataaaaggaaagaaatttccagcgatcattacctcagtaatgtaatccattatatacatcacaatcctgtacatcatggttttgttaaacatccggccgactggccctggtcatcatatcaaaatatattaaacagtgccgattcatttatagcaagacagcagataattcaatggttcgggtctgttgaagcataccagcaatttcatgagcaaaatttatcaggaaaacacctggcagaaattgaaatgaacctacaggcatgataaagcgcactttatatttcggcaatcctgcttacctgagtacacgcgatgaacaattgattgtgcgcctgccagaagttgaacacaacaaaaccttgcctgatcgatttaaaaaagaagcacaggccagtattcccatagaagatatcggacttgtaattctggatcatcaacagcttgtaattacccatgcccttatggccaaactgctggctaataatgctgccctgattacctgcaaccatacccaccaccctactggcttgttacttaacctggaaggtcacagcctgcaaagtcagcgctttcaggcacaggttgaagccagtgtacccttgaaaaaaaatctctggcagcaatgcgtgcaggccaaaatcagcaatcaggctgcattgcttagtgcgcaaggcatagcaactgataacatgaagcgctgggctgcccaggtaaaatcgggcgatgccgacaattacgaaggccgtgcatctgcctattactggaataaaatttttactcctttcattcaaaattttaccaggcatcgaatgggcgatccacccaatcaattgctcaattatgcttatgccattatacgggccacggtggcaagggcattggttggctcaggcctattgcctacgttgggtatttttcaccgcaatcaatacaatgcgtattgccttgccgatgatatcatggaagcttatcgcccttttgctgatgaggccgtgctggagattgtaaaaaatgaagggccggatgttgaattaaacacagctttaaaacaaaagctgctgaagttaccggccatagatgtgcgcataggcaatgaaaccagcccattgatgattgccacacaacgcagtagtgcatctttggctcgttgttttctcggagaaacaagaaaactggtattgcccactttggggtattaaagcagtgttctcataattaaaccgtatgtatcatgaaaaccgggcggctaaacgcttatcgcgtcatgtggattatggtattatttgatttgccaacggaaaccaaaaaggaccggaaaaattatgcagatttccgcaagaaaatgctgaaagacggcttcagtatgtttcagttcagtatttatttaaggcattgcgccagccgcgaaaacatggaagtacatgttaagcgcgtaaaacacaaccttccacccaaaggccatgtaggtatattaaccattaccgacaaacaatttggcatgatggaactgttttacggccctgaagaaaaagaaaaagtccccggtccgcagcaactggaattattctgatcagttgcttttgcaaaacgaggacttttcacttgcacatacagtctttgaagtattctgcaggatttttttgatcctgtttttggccctaaagctttgataatctgctacattacccggggtatactgtatgcaatctatcaaagaacacgaaatgaaagcaaatcacaactctaactcaataattttatagctatatccgactgtatgcaatctatcaaagaacacgaaatgaaagcaaatcacaactattaagtacttcagcacacagccaagtaactgtatgcaatctatcaaagaacacgaaatgaaagcaaatcacaactggcaggtgtggcacctccttggccatagcactgtatgcaatctatcaaagaacacgaaatgaaagcaaatcacaactaaatggctcttttattgaattaccaaagaactgtatgcaatctatcaaagaacacgaaatgaaagcaaatcacaacttctcattggttgctgccggtggcagtaatactgtatgcaatctatcaaagaacacgaaatgaaagcaaatcacaactgcatccgcaaaggggctggtcggaccgccactgtatgcaatctatcaaagaacacgaaatgaaagcaaatcacaactgctgtactcgtggtctgcataaataaagtactgtatgcaatctatcaaagaacacgaaatgaaagcaaatcacaactaattacctgcagtggcttggttaccttgcactgtatgcaatctatcaaagaacacgaaatgaaagcaaatcacaactaatctttgtcgatggaaaccaactgatgactgtatgcaatctatcaaagaacacgaaatgaaagcaaatcacaacatatcgctatcattttcatcagttgaaattactgtatgcaatctatcaaagaacacgaaatgaaagcaaatcacaacaacgtccaatcgaacgtagcgcaaccaacaactgtatgcaatctatcaaagaacacgaaatgaaagcaaatcacaacggctggcccgatagctaaagcgatagaatactgtatgcaatctatcaaagaacacgaaatgaaagcaaatcacaacagaaaaatgttcttgaatccaacccttatcactgtatgcaatctatcaaagaacacgaaatgaaagcaaatcacaacatttgtttaacaaagtgcacaccaggcgttactgtatgcaatctatcaaagaacacgaaatgaaagcaaatcacaactaattgccgccatcgcgcagagaatcaagtactgtatgcaatctatcaaagaacacgaaatgaaagcaaatcacaacttgattcgctaacatcttcaatcttgtaatactgtatgcaatctatcaaagaacacgaaatgaaagcaaatcacaactatagaagctgcaacagctgtgggcgcaacactgtatgcaatctatcaaagaacacgaaatgaaagcaaatcacaactgtaagccgggtaacttggtgaactgattaactgtatgcaatctatcaaagaacacgaaatgaaagcaaatcacaaccgtccccgcattgccctaataactcaaaggactgtatgcaatctatcaaagaacacgaaatgaaagcaaatcacaaccaatttggatgaggcgtttagataatattcactgtatgcaatctatcaaagaacacgaaatgaaagcaaatcacaaccagtttaggcatttgagcaactatttaaaactgtatgcaatctatcaaagaacacgaaatgaaagcaaatcacaacaatgttgaatttggtcacattgataagcaactgtatgcaatctatcaaagaacacgaaatgaaagcaaatcacaacttgtagaagaagtacctgcgttactcgaactgtatgcaatctatcaaagaacacgaaatgaaagcaaatcacaactgtttcggccagcctaatcagcacgttattactgtatgcaatctatcaaagaacacgaaatgaaagcaaatcacaactttattcatgatcaggataatcggtgggtgactgtatgcaatctatcaaagaacacgaaatgaaagcaaatcacaactaacgctcttcaggagatacaagtaaagtactgtatgcaatctatcaaagaacaatatcccgaaacatcgggagaaagcaaaattggcagcttataatctttgatcaaaacatgcatgatttgtaatgtgtatgatcattggttttatatatcccaattaaacaaaatcaggtacaatctttgccatcaaaaggtatgtttaagtttaagcatgccttttattgttttaaaatggttgcaattccagccatcagcatcagcctttttctggctatgatattttggaattcagatgccggaaccaaagtgatacccatattatggggaaaattgatctgcagtattttattaactgcttatgtacatttctttaaaagagaaaacttctacttctttaataaccttggcttttcggtaagaaatatttacttatccattattagcatagacatgttaatttttcttatgctcctttcatcaagattttttatatgaatgttttggaattcgatagtattgaactgagttttaatggccgacaaatcctgaaaaatatttttattcaatgtaataccggaaaaataacaggcttacttggcagaaatggcgcaggtaaatcttgcttaatgcaagttgttttcggtggattacaagctcaatacaaatccgtaagatttaatggcacttatctgcaaaaacaaattattgcctatttaccacaaacaaaattgttgccttcttacatcagtctatcgcaagcattaaaattatttcaggttcaaccactaagcataactgaatactttcccgaaatcaatctaataatcaataaaaagccagatgagatttcaactggtgaactcagggtatttgaagttttactgatactgaattcaaggcatccgttttgttttctggatgaacctttctcaggtctttcgccagtgatgattgatcgactaaaaagctacattcttttaaagaaacagtataaaggcattctcatttcagatcatttgcatcaacatgtaaccggcatttgtgatgagatctttgtgcttagtgctggccaaagttaccgggttaaatcaaaagctgacttaatcggcaggggctatctgccggaagtgtaaaagattattcaaggttattgataaagcatgcaattgaataccttcgcgcattctggcttatggaaatttacgaatacctgctcatcatcatcattggctttgctgccggctttctgaataccgtagccggtggaggttcattgatttctttacccatactcatttttcttggtctgccttctgtagttgccaatgccaccaaccgcgtagccatactttttcaaaatatttttgccgtaggtggtttcagaagcaaaggtgttgacttacccatgccttacagtttatacctggcgctggtttctttgtttggcggattcattggcgccaagctggccatcaatattgacgatgaattattcaaccgcattctggcggtaatcatgattggtgttgtgttgagcattgccttcgactcaagaaaaaagaacggtgtgcaggaagaacgcatgacggttaaggcacaggtactaggtatcatctcctttttcttcttaggaatttatggtggatttattcaggcggggattggctttttggtaatagcaggattgcgctacatcaaccgcatgagcctggtaaagattaattacatcaaagtttttgctgccttgatttacaccggtgttgcagtagccgttttcgcctgggaagggaaaatacattggttcattgccatgatactttctattggtcaggccctgggtggttggattgccagccgctggagtgttgacaaaggtgatgtctggattaagcgtgtgttggtagcagccgtgattatcctcgcaattaagctttggtttttttaaatgaaaggtatcctacacccagaaggtataagacattttcaagcagctaaaaaaaaatcagacttgccgcattacgacaagtctgaaatattaaatctaaaatctaaaatccttaagctttcaccggttccctgtgccctacccaggtaaacctgcgtgttacatattttgaatcggtaaaagaagcattgcccgatggattacctccggtaacatggaaatcagaaaaagctgcattctgattcatgtaaatgccgccaatcaaattgaaagaaactggtgttgctgccagggccatttcatcagcaatttttgcgcgcacatcaggatcggtggtatatgcaccacaagaaatggcgccatgttcttcggccatttctttggctaaggctattgactcatctgtatttttggttttgattaagagtgcaatcggaccaaaaagttctttgctgaaaacctctttcttagctgaactcacttccatcacaacaggcgtagccgttctggcatatttaaacatgggattttcaaggctgcctgatttcaaccagactttctctcctattttttctgcatcaacaacacgtgtgcaggtatttttattttggatggcacccaatacaaaaggtcctgcttttggattatcaacgagtcctttcacattatcagcaagcttctgtgcaaattcttcaaaagataatctgccattaggtgtatcaatgccattttcaggaatgtaaaaattctgaggtgctgtacacatttgtccggagtaaagtgataaagagaaggccaggttagcggctactttatctgcgtcttccaccgaatccaatatcacagagttcacacctgttttttctgtgaacacttctttgccttgcaatccttcgagatagctaccaaagtttgaattaccggtgtagtcaataatcttgacatctttatgctcagccaaattttttgtaatcatcttgtcaaacgtatctactgctaactggcaaatattggggtctaaattatttgctttcaatactttctgaatttctgctactacaattgcgataggcagaatagctccgggatgtggtttcacaattacactattgccagtaattaaacttgcatacaaaccgggcacggtattccaggtaggaaaggttgaacaaccaattaccagcgcaagacctttaggcactgccctccactctttattgatttgcagattgaatttgcccatgggcttatcccaaaaagcggtagcaggaaaacgcttcagttcttcgtaacctgctgccacagcttccaaagcacggtcggctgcatgtggaccagaagcctggaaggccatcatatatccttgtccggtagtgtgcatggtggcataagcaatttcaaagaaacgcgacttcatgccttcaagcgattcaaccaataatgccgcgcgctcatcagcacttacttttctccattgatgaaatgctgccttacctctctcaattaaagtctgtgtatcaaattgcggataggaaatgccaagcttttcctgcaagtaaggcgattcttcctgccctgcccaggcagcaggactatcctgcaataattcttcaaacttcttgttcatagaggcctggaatttttttctgccttcttcatcggcagtttctccatacactgcaggtgaagggtgctctggataagccgcaaaaaaagttctttcgtgtaaagctttgatggctttgtctaaagtgggtttatgtttttcgaataagttcatttctgtttttttaaaaaattattttctccattccaatgattttttctgtaactctacagcgctatattttttagcatagtcttttaatccacctgcccagttttgcttaaacttaccgctggcctgacctttatcactcatcaagtgacttaagtaagattctaactcatctaccaagtgtggcggtaaatctttaattcttttttgtatttcttttattttatccataatactagttattagaaccaaacacacgttttaataaatctgttgcgcgtgcgcccggattttccctgatatttttttcttcaatggctatcatgtaaaacaatccttcaatggctttatcagttgcataatcatccaaatcaggatttaccctttcaaccaaaggaattttgttataggtgctaaccaagtcggtataatagcgtgttgcgttggtcttctccaaagcactttgtattaccggtaaaaatctttgctttaactgggctgatgttgtgcgttgtaaatattgtgtagctgcgttttcttctccacgcaaaattccaaaagcgtcttcaatggtcatagacctgatggccgaaacaaaaataggtttggcttctttggctgcttcttctgccccacgatttaaagtagtaacaaaacggtcaacttcattgcccaggccaatctgccgcaaacggtcttctacccgctttacatcaggtggaaaaggaattttgatgcgtggattattcaaatagccatcggcttgcgaaacaatatcagcgcctttattggtaccctgaataagtgcttccttcaaaccctcagccacctctgcagccgtaaggggttttggtccgcttgtgcgacctaaatcgcctaaagtctgattgatttgcgcagctgtacatgcatttaaaagcatggaaatcagcagtattttaatagccttcataaaatcatgtcttgaattgaacaaaataggcacttattgagtaattagaggtgtgaatttgcaagaatttttctgatgaaaaacatacatgccgaactaatcaccattggtgatgaaatactttacggacaaaccctggataccaatacccaatggatgagtgttgaactgggtaaaataggagttcggattgggcgcagaagtaccattggtgatgaagagcaagaaattcttcaactttttaaagaagcagaaacgcgggcagatatcattttaattaccggaggccttggccccaccagtgacgatttgacaaaaccctgcctcgccaaatattttaactgcgagttaaaaatgcatgcacaggcgcttgaagacctaaccgctttttttaaaagccggggcagagaactaagtgatttaaaccggcaacaggcagcactgccagaatgttgcgaatacataccaaacgaaatcggtactgcagcaggcatgtggtttcatcgcaatggtaaaacatttgtttcgatgccgggcgtgccgcatgaaatgaagcgcatgatgaatcttcacatcattcctaaacttaaagcaagttatgccatgccggtgatttaccatcaaatggttcgcaccgtaggcatacctgaatctatactggcagagaaaataaaatcatgggaagaaaatttacctgcacatattaaactggcttacctgcccactttaggtgaagtaaaactgagactcacagccacaggggcatcattagaaaatttaaaatcagaaacagaaaagttaagcagcgaattaatgccacttattggtcaatttatttatggttatggagaggagagcttagaaaatgtattaggcaaaatattaagagaaagaaagttaacacttgccacagcagaaagctgtacgggtggatacctggcgcataccatcaccagcattccgggtagttcagactattttaaaggaagcattatcgcgtattccaatgaaataaaaatcaattacctggatgttaaagaagaaactcttgaaaagtacggagccgtgagtgaagaaacagtggcccaaatggcggcaggagtcaggctaagattaaacacagatattggcatcgccaccagcggtgttgccggacctgatggcggcacagaagaaaaacccgttggcaccatttggattgcctatgctgatgccgaaaatgtgatttgtaagaagttaca

SEQ ID NO: 2594 - DNA, 24299 bp, synthetic construct
  variation 15622..18656: note = n is a, c, g, or t
  source 1..24299: mol_type = other DNA
  misc_feature 1..24299: note = Synthetic
tgttactaccattcaaaaattaaattacgctatagcaggaaaaaatatcctgcggatgaaagacatacagcaccaacgcatggttttcatttttgacgaatgtcatcgcagccagtttggcgatacacataaaaaaatagttaattacttcacaaacattcaattatttggttttacaggcactcccatcctggccgagaattcgaacggagaaaaaacaacgaatagtttatttggcaaatgccttcataaatacgtgatcaccgatgctatccgtgatgaaaatgtccttcggttttcagtagaatacatacaaacgtttaaacaaaaagatcatattatagacctcaaagttgaggagatcaacgaggaagaagtttttgaagcacctgaaagaaaagaagctattgtagattatattttgcaatatcattcacagaaaacacaaaatggcgcttattgtgcgatgatgtgcgtacaggacatcgactcagtaattaaatattatgaaatattcaaagcgaaaaagaagacaagcgttcatcatttaaagatagctacaatatttagtttcgctcagaatgaagatccgttggattttgagatcaaatccgatactggccgcgcacaagaattgaaagaatctgaacaacttataccacacagaagagatttattagatacgtacattcaggattttaatgaaatgtatggcacagcttatagcacaaaagatagtctcagcttttacaattactacaacgatgtagcgaaaaaagcaaaaaataaagatctcgatattctccttgttgccaacatgttccttaccgggttcgatagtaaatatgtcaacaccctttatgtcgacaaaaacttacaatatcatggcctgatccaggcatttagcagaacgaatcgcatacacgataaaaacaaaacccaaggcaatattgtttgctttagaaatttaaaagaaaaaactgatgaggctattactcttttcagtaataaagatgcgatagatgaggtaattgttgaaccatatgaaaaatatgtgatacagtttaacaaagcggttgatgccctatccgatatcactccaacctttgactcagtagatgacctgtattcagaagaggaccaaatgcagttcgttcttgcgttccgggaagtaatgcgattatttaaaaaaatggaacattacactgaatttgactggaacgacctgaatattaaagagcaaatttttaagaatttcaccgggaagtatcaggatcttaaagataagattagcctcaaaaaagattcgaccaaaatttcaatactggaagacatcgatttcgaacttgagttaatcaggagagataccataaatgttacttatatcctccagctattaattaaattaaagacaaacaataaagctaaggataaaacagccattgaaactgaaatatccaatcttttgaattcagaagtaacgcttagaagcaaaagggaattgatcgacaaattcataaaagaaaactttgtcagaatagcagatgtagaagatattaaagaagagtttgataaattctgggatgaagaacaacgtagagaactttccaagataattgttgaagaaaatctatctgtagacaaaacagaaaaattgatcgaaaactatctgtttgccgaaagagtaccgctccgcgatgaagtattggagttgattgaaggtgcgaagcctggtttattggagcgtaagagctctggcaacagaatattaaaacgcattgttgacttcgtcgaaacttttattaagggcttgtaaaataaaccgttttaaaacatatacagttacaatttaaacacttacagatttaacacgtatacaccatctaatcaacctcattaatattcctcacccttacattcggcatcttcctgaatatatcctgcatatactttcgatgattggcgccggcgatgacgaccacttttttagcgcctgtcattctcgccctgtttacaacattatgacacatgccctcgtttctcatcagccaccaatgtatttttgaaagcatttcttctttgggaaaaccattcgttttatacataacgggcaggtaaaaatctcccgaggcggaaatcgcggctgcctcatccgtgttcaaccattccgtcatggtatttgaagaggtttcgatattcttatacttatcaaatcctttattcatactgtccaaagctgattttaaatcagcttcagcagaagctgtgaggcttttcctgaataaagtgaatgctgtgtcgaatgctacccaggaggcctgccaattcaaatcatagtcctggcaatccatggaaagtaattcctgaatcccgaactcacgcatcatcgggaatgctataaaagcatattccgaagttttcagccttcgcatacttcgcccggttgtatccaactgaggactaagcaattttccgacatagttttcaagtgctgcatcctgtttctgctgcaggaaatcataaacctgccagaactgataatggccatttgccacatcctggtcaaggtaataagcatgagccaaatcggttttcaagcgataatcattgggtttcagcagcgatagcttctttaaactgtcaatcgtatgcggcagtaattcatcttttatagtatgattactccgcagcatttttagccgattgatattgggctgtttacaccagtaatccatcacgagccgctcatcttctctactcagaaactcaccaaaaaatgcatcaggcttaaactttctgattttattatgcaggccggaaaagtcctgtttgggatacttactataatcatgagaaacccctatcaataaaacatcaatatcctgagcgctggcattgaccgcaatggaaaaaaataaaaaaaggatatacttcatgtttttgcaccgcctcattagttaaaggattttgtttttattccgccaggccgacagcatagctttaaaaaggttacctttttaaaattaagacaaattcaacttactgttgccggtcaggcgaccggtaacggagccttgccgttgttgctcgcctgaccataaccattcggaagcatgcattcgaccggaaactgaaatggataagcagctttaaaaatagtaagcacgtgctgcgctgagtccccctttgggagacatcagagacaatgtagaatcggtacggttaaccattaaccagaagatcctaccagtctttgcagaggcgcctctttgggttcggtacccagcgaagcgcaggtaatcgaaatgatgcgaagcgcatttcgatagaggccaaagaagcgctggcgcaaagacgaggcccagcggcctgagcgacacaccgtctgaagattgaaatctataagcagctttagaaatcgcaagtgcatgctgcgctgagtccccttcgggagacatcagcgagagaacaaagacgaggcccagcggcctgagcgacacaccgtctgaagattgaaacatgctccggatcattggtctgtcgaccacaccggctggtattacacctcccccgccagcaacaccgatggcgcatacccgaattgcttcttgaaagcaaaagaaaaatgcgacagattctcgaaccctacttcgtaacaaacatcgatcggttttttctttttctgcacaaattcgtaatgtgccaggtcaaggcgctttttagtgagccagcgctgcggtgtggtggcgaatatctttttaaagtcccttttgaaagtagtgaggcttcttcccgtgaggtaaccgaatttttccattggcagattgaacatgaagttcttctccatataatcggcgagatcaatttttccaggctcttcaaaattcgcgagcacattatcgatgccctgatctatggaacgcaatattgtaacagcctcggttattttcaggttggcgagatccgcgggcagatctttcatgtcgaaatacggaaccagcgaagcaagacaactttccagcaaaggatgacctgaatagtgtcgtatgccctgctcatcttccgtaaaaggcttcacgctttgctttgcataaaaactacgaagccagtccgtggttaagtgcattaccaccgttttatgtggctgcccgtctttgggataattgatgatggtagccagctggtttctcggaatgaggaaaatatcacctttcctgaacaggtatgaaccttcgggccttatgatcttggtttcgccggagaggaaccagatcagcatgtgctggccgaacatgacatccgatttgaagaacttatcctcgtagcacgacagcttgatatcttccgtaatatatttagcctggtattccataacggtaccgcatttagcttttacaaaaataaggtcttcgggctaccggtttaacgattgaccgccatcaacaagatattcagcaccggtaatataagccgcgtcatcaccggcaaggaaactgatcagcttaccagcttcagccggaataccaagcctgcccagcggcacaccggatttaatgaactcctgcgtcttaggatcgttaagacccgctttttccatgatctctgtagcaaaaggcccggggcttaccgcgttcactctgatcctgcgcggggccagttctacggcggctattttcatcactgcattgatcgcaaccttgcttgcagcatatacagatgtttgcgggatagattttgatgccgaggacgatgagatcaacactaccgatgcaccgtcattcaataccggtatcaaacggctcagtgtgaaataagcgcctttcacattcaggtccatcacttcatcgaataattcttccgtagcgttttcgatcatggtcagtttggagatccctgcattcaccacaagaatatcgatctttccatattgtgttgctacagttgctgaaagcgtttcaatgtctgccattttcgactggtccgcgatcattgcaaccgcgcccaattctgccgcagctttttctacagcttcttttctgcggccggtaatgatcacttttgccccgttcgcaaccagttctttggctgcggcataacctataccgctgttgccgcctgtgataagcgcggtcttgccttgtaaattctgcatttgatctatttttagaacgatgccgctattcagtatcgccgatactcataacagcatgtcatgatttaacagggttaatttaacagacgtcaaattcaattccggtcatcgtttccgtgagctcccagagttgttttgcattatgttcgtccagcgaatatgcctgtacgccgtttttatgcaattggtccggatgaacggacagtccggctacatcacagtcctcacagtaaacaccaccggtattattcaactgcgcactggtagcagcccagacagtagtagcagcaccctgcgggatcgttttcagcgttgcggcaacttcagggcgcaggttatcgttctcatcgagaaaacccatctggcggaacagttcaacaggagcttcacgggccagctctgtaccacctattgaacccgggtgcactgaataagcacttacattaaaagcttttgcacgttcattgagttccagcgcaaagagattactcgctgttttagactgaccataagcctgtaaagtttcgtaggcacgatgttcgaaattgggatcaccgaaattgaacggcgacatgtgatgaccgagtgaagaaacattcacaacccttgcgccatttgcttttttaagtgcaggccagagtcttgcagtaagatgaaactgtccgatataattggtagccagctgcgactctataccacgtgggtctttacgcagcggcacccacataattcctgcattattgatcagcaggtgcagcggacggcctgatgcgagaaattttgcagcaaatgcatcgatcgatgcagtatccatcatatccattttttcaatctcgatattagcaatgccttgcaggttcttttttgctttttccgcgtcacgcgccggaacgagcactatggcacctgcacctgctaatgtttttgctgtttccagcccgatgccggcattgccaccggtaacgatggcgatcttgccgctgaggtcgatcccctctatcacatctgctgttgttgactgagcgttgaatcctgagccgagcgggagctgtaatgcgccctggtaattgttttgtatcattttgatgttgttttgttgatacaaaagtagagcgcggttttccggtccgctttgtttaaaaggccgaatttactttgtttaaaagctcatatcagaaaggcaaactgatcagaatttagccaccagtatgatccgcttgaaagcatagatcataggtgaagttgtaaaatgggcggcgatcctgtttttatattcctgtatgaactctgcctgcatcggctcttgcagtttctccatataaggaacgagcgctgatccggagatgaattcatataaagtctcagtggatgctgcaatgatgggatacactttctgataaacgagtatgtctttggccgcgttatcgaaaaacaaacgggtgtaatcgtctaacgatagcacgggagaataacgtatcgtctctttcaatacctcgtaatacggcgcttcctgtacctgttgatgcaggatctggttcagcaggttttctttctgcgatggcatttgtacggcaagctgtccgccaggcaatagtttcgaaattaatttcggaaaaagtgatacgtgatcgccaacccattgaagggatgcatttgcaatgatcgcattccattgtccgggtagttcgagttgctcctgcaccgatcgctgtgcaaagcttatattttcctgccggggtgctttagacagcatttcagcggaattgtcgacacccagcacctgtgcaccattaaatttatctgcaatgatctttgtaagttctcctgttccgcaacccaggtcaaggatacgcattcccggctttacatcgacatgagcaagcatgtcgtaaaaaggttcgtaacgtttttctttgaatttgttatagacatcggggttccatggcatacgtcagcgctttaacacatcaggaattggattctatataaagatacgattcatttaccggaacattttgaaacggattccggtcattttttgaataccagaacctcacggaacaactgaaattccttgttaactttaaagtatgaagcaaacgcaacccttttacgtgcggctggcgatctcactggtatgccttgtattttcagtactgatattacgtgaagcatccgcactgctgatccctttattcggcggctttctcctggccatcgtactgttacctctcgttcatgtattggaaagaaaaggtaccagccgcagcggtgcttcaatgattgccgtgagttgtttcatcctggcgttctttaccatcaattattttctcactgcgcaactggcattgttctctacggaattgcccaatatcaataataaaatgcaggaaatgtttgcaggtctgcaaagctggttcagcagtaaatttcatatagaccaggcgcaccagatcaattacctgagcagttctttcaaagacattgtaacctggataacaggttttgcgagcaggctggtgctttaccttgggaatatcattgtgtggatccttttcgtgtgcatctacgcttattttatcctttattacaggagattactggtacggtttgtaatgaagctgctcgaaaaagattacccggaccaggtacaacatatcatcagggaaaataaaaaagtgatcaaggaatatatcgtaggattgctgctcgagttcctgattgttttactgctgagcttttttgcattgctgatactcaacatcaaatatgcgatgatgctggcgatcatagttgcgttactgaatattgttccttacctgggtatttacaccgccgttctttttgtaatgctggttacctacgccaacagtaccgggaccgcagctattcaagctgctgttgcattgctgatcattcattttatcgatgcactttttttgctgccgaggatagtaggttcgagaatgaagatgaacccgttcattaccatcattgcagtgatcaccggcgatattatctggggagttccgggtatgttcctctttataccgctcgctgcgatgctcaagatcatattccagcatatcagttccatggaagcatgggcgatattgctggatgaggataagccggtgaagaaaaagaaacgcactgctgatcagggatagacgtcgcagagtcctctccgggagagctcgcggggactagctgtgtatacaccacgtggtagtgtttcatttcagcctgagcagatgtctccccgaagggggactctgcgcaggctgaagaccaacctttcaaccaataatactgccgtttcattttataaaatcagcattcggtcataagcccaggaattattgcggctgattacgttaagttagcgaatgcaacaaaaaacagccgtgatctccggtgccaaccgtggcatcggactggaagttgcccgtcagctggcagcattgaactatactgtctatctcggttcccgcaacgcggaggccgggcaaaaggcgctctcccattttgcagataccacacaggtatacccggtcatgctcgacctcgataacccaagcagcttccgtgcattatcagctctgctgaacgaacgccatggccatctcgatgtacttgtgaacaatgcgggtgtgttacttgaaaccgatctgacggcagactcaaccagcaccattgagccttatatcctgcgccgtaccatggaagttaatttcctgggtgcggtaggacttaccaaccagctattacccttattactgaaaagcgatgctccgcgtatcgtaaatgtatccagcaatatgggctcgctgggcatgcatgcagcgggtgcgcctctgccccatactttcgcttacaataccagcaaaacagcgctgaacagttacacgatacacctcgcaaatgcatacaaagaatctgggatgaaagtgaattcagcgcatccgggttgggtgaagaccgatatgggtacacaatatgcgccgttggaagtggctgaaggtgcattaaccatcatcaggctggctactttacctgcagatggccctaccggccggttctttcatatggatgaagagattccgtggtgagttctttttgcctattttacagccgttatgaccatcaaaaccaagctggcactggtgaaaaccattcataccctgatctgggttttctttaatgtagtgatcttttatatgctgtatgccgccatcgccaaccggattgacaaatggttgtggatcggctttggcctgtgtattattgaagggctcgtattgctcgcgttccggttcacatgcccgcttacgattgtggccagaaggtatactgaagaaacaaaagacaatttcgatatttatctccccgtatggcttgcaagacataccaagcgcatttatatttcacttgtatttctgatcatactgatcgttctgttcaggctgtggcaaaataacaacgggcagtaatctcacaatcactgcccgccatcattcaattcaaaaaattatttctcgcccaggccgtcggttttctactatttagctaccgcattataataaatcggccagggatattcatgactttacggtttcccgtaacaaaaaaggccggcttttttgttaatttatacgcaagaaaaaataaaattagcatataacagtatgctataatccgcttttgatttttcttacaaaagattattttgtatgtaattatcataaataaaaagctccaccgaagcagagccaagaaatcttcggcttatagccttattgtgatttgctgtacaaaaataatataaaaaattaaaataattcatttatgaataaaatatttgcggttgatcttggaactaattcaataggatgggctttacgtgatcctaatcttacaggaaaccaaattgagaaatttggcgtacttacttttaataaaggggtcggcttaggaaaaacaggtgaatattcctatgcagctgaacgaacccaaaaacgttcaacgcgcagattataccaatccagaaaatatagattatgggctacacttgaaagcttgataaaggaaggatattgcccgttaagcattgaagatctaaataaatggcgtcactatgacaaagatgaagccattagaaacaataatggcggaagggtttatcccataaataatcatctttttaatgcatggataaaacttgacttcaacaatgacgggaagcctgaatatgcaagcccttatcaattacggaaggaactggcagaaataaatcttgattttactaaaatagaaaacaaatttaagttagggagagcgttgtatcatattgcgcaacgaagaggcttcaaaagcagtcgcaaaacaacagatgagcacaaagagcaagatatatcggacgacgaaatagtagatttacaacgttccgaaaaaaagaaaaacaaagtaataactgatctttttgaaaaatacccggaggcgaaaacaataggtcagctttttgctttattggaatctgatcatgttagaatacgagaaaattttgctcaatatgccatacgagaaaattacaaagacgagatcaaatacatttttttgtttcagaaattgggattagaacactcgatttatactaaattagtagagaaaagaaaaaacgcaaatgatggcagcattttttataaacgccccttgcgctctcaaaaagggttgattggcaaatgtacattggagcctaataaatatagagcaccaatcagccaccctgattttgaaattttccgcgcatggtcctttttaaacaatattaaatatagacctgttacagataaaacttcaacttggcaacctctaccgttggaactgaaagagcatatctatcatgagaaatttttcagaaaatcaaaagcctatttcccattcgcagaaattgctgatctcgttaaaaaaacggggcataattgggaactgaattatcgtgcgaacaccactgtaacaggttgccctgtatccgcccggctaagagatatttttggtgtcgattacatgcaattgaaaatagagaaagaaaaaaactctatctctggaaagagttggtatgacattgaagatatatggcataccctatttaattatgaggatcaagaatttgtatttgattttgccgtcgaaaagctcaggctagatgaaaccaaggctaaacaatttgtaactgcgtggaataccatgccagttggttatgggatgttaagccttaatgcaatacgaaaaatcaatactttcttaagaaaaggtttaatttatacggaagcagtgttgttagcgaatattccatctattatcggtcaagatttatggcttaacaacgaacagttttttttacaacacattggagcgcttattgatgaaaacagaagacaaaaaacaattttaaatattgtaaataatcttgtttcgcgacataaaaacctcgatcaaaaatatgggtacaaggacagctcttatatactagacaatcaagataaaaaggatattctaacggcagtagaagacaccttaggtataaaaaaatggttggaatataaccctattgaaaaagaaaaaataatacaaactatcaccgattgctatcaagcatattttaagacatcggaactgaaaaggaaagatataaatggcgaacgccattttgaaataaagtccggcaatgatttctattataaaacggatgctggctattatcgtttacctaaattaattgacacaatagctcattttgtgcaattaaacttttctgtctctaataaaccattatcattcatataccacccttcagaaatcagtatctatccaccagccaagcctgacaagaatggattgttaatgttaggaagcccaaaaactggggctttcaaaaatccaatggccatgcgagcacttcatgaattacgtaagctaattaactatatgattaaaaataaccatatagatactgatactcgaattgttgtagaagtttcaagggaattaaatgatacaaataaacgctgggcgatagaagcttggcaaaaacaacgtgagtcggaaaataaagaatttgcccaagcaatagagcatctaatattcaccaatccagacatatctgcaagcaatcaaaataagcaggatatagataaaattagattatggtatgaacaaactgaagaagaaacattgcccccagttactaatactaaaaaagacattaaagggatgaggtggacagaaaatgtaaaaaaatcttacaaagaaattatatctcagaaatctttagtggataaatataggctttggaaagaacagggatgccaatgtatttatacaggtagattaattagtattacggacttgttcaatgaaaatgtaattgatttcgaacatacgttaccaagaagcaaatcatttgacaattctttggcaaatcttactgtttgttatgctgattataatcgtacagtgaaaaagaaccagatacctagccaactcgtcaattatgaaacttcacacaacggttattctccaatattacctcggcttgaaaaatggaaagaaaaaatagaacgtattaagcaacaagttgatttttggaaatcgaaatctaaaaaagcaatcgataagcagagaaaagatgactccatacgtcaacgtcatttatggcaaatggaattagactattggaaaaataaggtagaccgattcacaattactgaaataacaagtggatttaagaatagtcaaaaagtagatacacagttaatatctaaatatgcgctgcattatctaaagacatatttcgaaaaggtagacatacaaaaaggaagcataactgcggaatttagaaaaatctacaaattgcaaatgcctgatgaaaagaaagatagaaacaaacattctcatcacgcaaaggacgctgcaatattgacactaattcctgttgccgctaaaagggatgctattttggagaaatattataacagcaaagaacaaaaagaaaaatttactgaagcagaaccgtatagagggtttaaaagagaacatattttaaacatcgatgacaccttactaatccacaatatcgtaaataatcaatctcttacacctgcgaaacgaaaagtaagaaaaagaggcaaagaacagtttattaaagactcttctaatccaatgtggtcaacaggagatagcattagaggccagctgcatcaggaaacattttatggagctataaaaccagccaggcgtgatgcgcaagggatactacaaaaagatgagtccggcaaatttattcaggaggataaaataagatatgtaataagagttccttttcaatacagaaaagactcaaatacaccaggctttaaaactttggaggaaatagaaaaacaaattgtggatgtaggattaaaatctcaaataaggaaacaggttgagaaggccgaaagtttgaaagaggcttttgaaaaagggattttcatgcttgataaaaatggccgtccacacgggaataagataaggcatattagggtttgggctagcgtttctgaccctctcataatcaaaccacaaacaaatctttcgaagatagactataaacaaaattattacgcagcaaatgcaacgaatagttattttgctttatactccggagatgaaaaaaaatcatttaaatatagaaacctttttgatgttgctaatatcttgtcaaaaaatggcgcaagaaaacctgaggaattatttgagccttcaattatttcaaaagaaaaaaaagacttacaacttaagcttagttacattttagagtctggaattaaggtaatcttttacaaagaaaaagaggatttaaaagcattcagcatctctgaattgtcgaagaggctatatgtatttaccaactttgaaaaagatggccgtctcaatttcaaataccatctcgaagccagaattaaaattgacgataattattcagaatcggaattagattttagcacgcccaagccaacattaaggtttagctatgctaaatacgaattcctggtagaaacttatgattttacaataaatatggacggaagtattaaatggcataaatgatcaaacgcactttatatttcggaaatcctgcatatctcaaaaccataaatgagcagatggttgtggagattcaggaaagcggtgaaacaaaaaaggttccgattgaagatatcgggctactgatcatggaccaccagcagattaccataacccaggcattaatggccaagttattggaaaataatgttgcattaattacctgtaataaaacacatcatcctaccggcatgttcctgaatttagacggtaacacattgcaaagcaaaaaattccaggcacagattgaagcgagcattcccttaaaaaagcaattatggcagcaaacggtcagcgccaaaatatacaaccaggctatgttactggcagctgaaaaaatagaaaacaaactattacttgcgttgtcaaaagatgtaaaaagtggcgacagtgataattacgaagggcaggcagccgtttattactggaaaaatctcttccctcctttcctgaacttcacccgcgaacgggaaggggcaccacctaataacctgctcaactacggttacgcaatcttaagagcagttgtggcgcgtagcatcgttgcatcgggtatgttacctactttgggtatttttcatagaaaccagtataatgcatattgtcttgcagacgatattatggaaccttaccgtccgtatgtcgacaaaattgtttgcgacattgttggaatgaatggtcactatctcgccatgggaacaaagttcaaacagcaattattgggtattcctgcaatggatgtaacgattgacgggcagaaaagtcccttaatgaatgcagttcagagaacaacagcaagcctggtgagatgttttgaaggcaagaccagaaaaatattatatccggtaatgaattgaataatcctattgaaaatcagtgcattcccgtttaaatgcatatcgaattatgtgggtattagttttttttgatttaccaacggaaaccaaaaaggacaagaaacactatgccacattccggaaaaagattatgagtgatggattcgccatgtttcaattcagcatgtatatacgtcattgcaatagtaaggaaaatgcagatgtgcatgtaaaaagggtaaaatccatacttccgcctgatgggaatgttggaattatgtgtattacagataagcaatttggtatgatggagatatttaaaggccaggacctggttgatccgccggatactccccagcaactggaattattctgacagaaataaaaaaatgggcaaaatgcccatttttttgatcgtaaaatagctctgtaatcctatcccagtaaggtnnnnnnnnnnnnnnnnnnnnnnnnnnnnnnnnnnnnnnnnnnnnnnnnnnnnnnnnnnnnnnnnnnnnnnnnnnnnnnnnnnnnnnnnnnnnnnnnnnnnnnnnnnnnnnnnnnnnnnnnnnnnnnnnnnnnnnnnnnnnnnnnnnnnnnnnnnnnnnnnnnnnnnnnnnnnnnnnnnnnnnnnnnnnnnnnnnnnnnnnnnnnnnnnnnnnnnnnnnnnnnnnnnnnnnnnnnnnnnnnnnnnnnnnnnnnnnnnnnnnnnnnnnnnnnnnnnnnnnnnnnnnnnnnnnnnnnnnnnnnnnnnnnnnnnnnnnnnnnnnnnnnnnnnnnnnnnnnnnnnnnnnnnnnnnnnnnnnnnnnnnnnnnnnnnnnnnnnnnnnnnnnnnnnnnnnnnnnnnnnnnnnnnnnnnnnnnnnnnnnnnnnnnnnnnnnnnnnnnnnnnnnnnnnnnnnnnnnnnnnnnnnnnnnnnnnnnnnnnnnnnnnnnnnnnnnnnnnnnnnnnnnnnnnnnnnnnnnnnnnnnnnnnnnnnnnnnnnnnnnnnnnnnnnnnnnnnnnnnnnnnnnnnnnnnnnnnnnnnnnnnnnnnnnnnnnnnnnnnnnnnnnnnnnnnnnnnnnnnnnnnnnnnnnnnnnnnnnnnnnnnnnnnnnnnnnnnnnnnnnnnnnnnnnnnnnnnnnnnnnnnnnnnnnnnnnnnnnnnnnnnnnnnnnnnnnnnnnnnnnnnnnnnnnnnnnnnnnnnnnnnnnnnnnnnnnnnnnnnnnnnnnnnnnnnnnnnnnnnnnnnnnnnnnnnnnnnnnnnnnnnnnnnnnnnnnnnnnnnnnnnnnnnnnnnnnnnnnnnnnnnnnnnnnnnnnnnnnnnnnnnnnnnnnnnnnnnnnnnnnnnnnnnnnnnnnnnnnnnnnnnnnnnnnnnnnnnnnnnnnnnnnnnnnnnnnnnnnnnnnnnnnnnnnnnnnnnnnnnnnnnnnnnnnnnnnnnnnnnnnnnnnnnnnnnnnnnnnnnnnnnnnnnnnnnnnnnnnnnnnnnnnnnnnnnnnnnnnnnnnnnnnnnnnnnnnnnnnnnnnnnnnnnnnnnnnnnnnnnnnnnnnnnnnnnnnnnnnnnnnnnnnnnnnnnnnnnnnnnnnnnnnnnnnnnnnnnnnnnnnnnnnnnnnnnnnnnnnnnnnnnnnnnnnnnnnnnnnnnnnnnnnnnnnnnnnnnnnnnnnnnnnnnnnnnnnnnnnnnnnnnnnnnnnnnnnnnnnnnnnnnnnnnnnnnnnnnnnnnnnnnnnnnnnnnnnnnnnnnnnnnnnnnnnnnnnnnnnnnnnnnnnnnnnnnnnnnnnnnnnnnnnnnnnnnnnnnnnnnnnnnnnnnnnnnnnnnnnnnnnnnnnnnnnnnnnnnnnnnnnnnnnnnnnnnnnnnnnnnnnnnnnnnnnnnnnnnnnnnnnnnnnnnnnnnnnnnnnnnnnnnnnnnnnnnnnnnnnnnnnnnnnnnnnnnnnnnnnnnnnnnnnnnnnnnnnnnnnnnnnnnnnnnnnnnnnnnnnnnnnnnnnnnnnnnnnnnnnnnnnnnnnnnnnnnnnnnnnnnnnnnnnnnnnnnnnnnnnnnnnnnnnnnnnnnnnnnnnnnnnnnnnnnnnnnnnnnnnnnnnnnnnnnnnnnnnnnnnnnnnnnnnnnnnnnnnnnnnnnnnnnnnnnnnnnnnnnnnnnnnnnnnnnnnnnnnnnnnnnnnnnnnnnnnnnnnnnnnnnnnnnnnnnnnnnnnnnnnnnnnnnnnnnnnnnnnnnnnnnnnnnnnnnnnnnnnnnnnnnnnnnnnnnnnnnnnnnnnnnnnnnnnnnnnnnnnnnnnnnnnnnnnnnnnnnnnnnnnnnnnnnnnnnnnnnnnnnnnnnnnnnnnnnnnnnnnnnnnnnnnnnnnnnnnnnnnnnnnnnnnnnnnnnnnnnnnnnnnnnnnnnnnnnnnnnnnnnnnnnnnnnnnnnnnnnnnnnnnnnnnnnnnnnnnnnnnnnnnnnnnnnnnnnnnnnnnnnnnnnnnnnnnnnnnnnnnnnnnnnnnnnnnnnnnnnnnnnnnnnnnnnnnnnnnnnnnnnnnnnnnnnnnnnnnnnnnnnnnnnnnnnnnnnnnnnnnnnnnnnnnnnnnnnnnnnnnnnnnnnnnnnnnnnnnnnnnnnnnnnnnnnnnnnnnnnnnnnnnnnnnnnnnnnnnnnnnnnnnnnnnnnnnnnnnnnnnnnnnnnnnnnnnnnnnnnnnnnnnnnnnnnnnnnnnnnnnnnnnnnnnnnnnnnnnnnnnnnnnnnnnnnnnnnnnnnnnnnnnnnnnnnnnnnnnnnnnnnnnnnnnnnnnnnnnnnnnnnnnnnnnnnnnnnnnnnnnnnnnnnnnnnnnnnnnnnnnnnnnnnnnnnnnnnnnnnnnnnnnnnnnnnnnnnnnnnnnnnnnnnnnnnnnnnnnnnnnnnnnnnnnnnnnnnnnnnnnnnnnnnnnnnnnnnnnnnnnnnnnnnnnnnnnnnnnnnnnnnnnnnnnnnnnnnnnnnnnnnnnnnnnnnnnnnnnnnnnnnnnnnnnnnnnnnnnnnnnnnnnnnnnnnnnnnnnnnnnnnnnnnnnnnnnnnnnnnnnnnnnnnnnnnnnnnnnnnnnnnnnnnnnnnnnnnnnnnnnnnnnnnnnnnnnnnnnnnnnnnnnnnnnnnnnnnnnnnnnnnnnnnnnnnnnnnnnnnnnnnnnnnnnnnnnnnnnnnnnnnnnnnnnnnnnnnnnnnnnnnnnnnnnnnnnnnnnnnnnnnnnnnnnnnnnnnnnnnnnnnnnnnnnnnnnnnnnnnnnnnnnnnnnnnnnnnnnnnnnnnnnnnnnnnnnnnnnnnnnnnnnnnnnnnnnnnnnnnnnnnnnnnnnnnnnnnnnnnnnnnnnnnnnnnnnnnnnnnnnnnnnnnnnnnnnnnnnnnnnnnnnnnnnnnnnnnnnnnnnnnnnnnnnnnnnnnnnnnnnnnnnnnnnnnnnnnnnnnnnnnnnnnnnnnnnnnnnnnnnnnnnnnnnnnnnnnnnnnnnnnnnnnnnnnnnnnnnnnnnnnnnnnnnnnnnnnnnnnnnnnngttgtcgaagatctaagctacttaataatttgaaagcaaatcacgaccgaatacatagaataataacgggcagtaaccccacgatcactgcccgccatcattcaattcaaaaaattatttctcgcccaggccgtcggttttccattgtttgatcacagcaatggtactgtctgacaatttcggatgacgcatcggcataaaccctctttcgccgggattgagctggatcctgcgtaatatctcatccgcattggcacttgccgccgcatagctgtcgagtgcttttttgttaccgccttttccaggaaaatggcagggtgcacaattcgtttcgaggatggttgctacatgctgctggtaactgatcttcacaacctttactgccgcctggctcgctgtttttgttgaactgcaataagcaaaaaacatagcaatgccggtcagggaaagggctacaagaatcttcttcatgtcaggtttagtttttaaatggattaattcaggtcatccaaatatatcttttcagtatacgcacttctgcgccgcctgtaataaaaagggtgaagaggcgaagaatgccggtcaattgtcatgattttgtcagccccattcccttcaattgattttcctgaacttttacaccctgttgctttcaagcttttatggaaatggcagcagtgccgaagaagtgaggtgaggaaaagtgaggtgaggttgctaaatagcaagcgatttagcggattatttaagcaagtatggcttggagatattgctgtagctcttattgaatcaggcacaagcgaaaaaaaatcaggaacattgcactcagtcctcatctttttcaccgttcctccagaatccttccctgcaccctttcgcccatgaaaagaattgctttatttacagcctgataaaacctgtataccatgacaaaaatgaacccttacctgaacttcgacggtaaagccgaagaagcttttattttctacaaatctgttttcggcggtgaattcccgggcgtccataaaatcggcgatgcaccgggcacagaacagttgagtgctgaagaaaagaaccgggtaatgcatatatcgcttcccatcaatgaacatacaacactgatggcctctgatatcattccttctgcagggcacaaactaacagaaggcaataacgtacatatttccctgcatcctgaaacgcgggaagaggctgaccgtttgtttgctggtctttctgccggcggcactgttgaaatgcctttacaggaaacattctggggtgcttattatgggagcttcaaagacaaattcggcatacaatggatgatcaatgttgaactgggaaaataaaacgtcattccccggcatgaagaagcccggtatatgaccgggcttctttcatttatgcctgttctgagatttcttttactttctgcagtgccagtggccaggtcttgtcgaaataatctttgtagtcgccgggaatgtctatatctatcagcaatgtcgtttgtccgttctcttccgtaagcgtgtagttctcaaaagatccggcccattgttttactttttcgctggttgtatcttccacaccatccttaaccatgcccaggtgctcgatcgataaaaacgcaggcttgttatttcttgcgatacgtgaaaccatccccatgttatcattaccaaggaataaggctttactgccctcttcccaggtggtttccacctttgagccttcattgaacggtttggtccattcagggtaagtggttttgcccaaaagcacatcccatattttttcacgggaagcattgatcgtgatgctgtactgatgtttttgcatgtttccaggtttttagatgaaagaatgactattgatccggcttcaaagatgtgataattatcgcagccggatactggttattaacgactatttaggggggcgattacggccttccggtctttgttgcaacaatgatcaacacaatgaaaaaagcgggagcattatgcccccgcttatgatatggatctgccagtattgtaattatggcaccgtgatcgtttttgtctgcacggtatgtgcgctgaaataaccaagtgcaccgccctgtatattactcacgggatttgcaggagatgcagaattattatctcccagcgaactgttgttgaggctgaaaaaatatttgtacaccggctgatcgatgcaaagcatatccacacgcaccagatcgccttttttcaggtcattatccggcgctttatcactgtttttctcataacgcagtttggcttcggctacgttaccatcggtataggtatcgtcacgtacgaaaaattccttttgctgaacaccgttaatgaataatacaaactgatagctgttacccaggcctacgggatctttgtagcgtactgtcggaagcaggcggtcctggataattccttccgacaggaaaagactatcaaagcggatacgcggctgaacggtagaaacggatgtaaatgttttaccagctactacaaccttcaggttataagttctgccagccacacctgtcagcgccggcgctgtataaatacctttcgcgttttctgcaaaaacagtaacaatgccattattatcggtaaccgttaccagagctccgctcacaccctgaaaactgttattgtcgctgaaatttttagtctgcgagaccagtacctggttagcgcctgctttatcggtaataattccttcaataacatatctgggctctgccacattctgcagatctacctgtatcactttttcgcaggagctgaacagcatcagtgccagtgcaggaatgaggaaagatgttatatatctcatatcttttagaatttgaagttataggaaacagaaggaacgaatttgaacaatgccgtacgcacagcttccgtagcggttggatctgtttcgctcttgcggaatgtgatcgtataggcattctccctgccgtaagcgttataaatactgatattcaactcggaactaaaccgcttcttttcgcgcattttaagcgtagcacccaggtcaagcctgtgataggatggcatccgataaccattcctttccggatagtagaacacaacctggttattgatcaggtatttcccggcaggaaatgtgaccgcattaccggtataatagacccagttggcagaaagcgtccatttgcggctggcctcataagaagccacaattgaaatatcgtgggtcctgtcctgcttggcattgtaccagttcccgttgttgatcccattgatctttctttctgactttgccagcgtgtagctgatccagccggtgaaacgcccggttttctttttcagctggaactcaataccataggccctgcccttaccgaataacagttgcgtttctatcgcatcgaggttagagaatacatctgccccgtcgcggtaatcgagctgattctgcatggtcttataataagtttcaaccgtcagttcataacgcccgcctttcaggttgcgataatagccgagcgataccatatctgatacttccggtttgatattgttattgctggctacccatttgtcgtccggcgttgaagatgtagagttcgagatcaggtgcaggttctgcacattacgtacataagctccttttacggatgaataattgttaagctgccagctggcagatacacgtggttccagattccagtaggtcttcaccacttcgccgcttttataccgcatggtatcgagtacattgccggcgccatcgatcgtatagaaatcgcctttgccaagtacactcatcgcagagagtcttaccccgtatgaaacattcagctgatccgtggctttccagttattggatgcaaacgcagcattttccagcgaatatcttttctgtttgaatacggagttgatggccgatgtttcttccgacgttacttcgccaggccgcattgtatggaaaatactgttgaccccgaaccggatattgtttcggctgttcaaaaaccattgcatttcctctttcaggttccagtcgcggatctgggaaaggatattgaatttatttaccccgctgttgataaagaccttgaaatcgtaattactgtagaccagcgaagtgttggaaaacagcttgttactgaacacatggttccagcgcagggttgccgtggagttgccccagtctatcccgaaaagatcctgcactttcaatacatctcttccgaaatacccggaaagatataaacggtctttttttccaaggatataattcattttggcattgaggtcatagaagtaaagtgtgttcctgttcacggatgtatccggagataatttcagaaacagatctgcataagtacgccttccggtaaggaggaaagaagatttgtctttctgtatcggtccttccaggttgatcttggaagagatcaggccgatgccgccgctgccaccaaaattctggttattcccatcgttcattttaatgtccagcacggaagacagccgacctccgtattgtgcaggcattccgcctttatatacggtaatatctttgatcgcatccgaattgaaggtagagaaaaagccaagcaggtgcgacgcattgtacaccggcgcttcatcgagcaggatcaggttctggtctgcagctccgccccgcacataaaaaccgctgttcccgtcgcctgccgatttgatgcccggcagcaattgtattgttttcagcacgtccctttcgcccagcagaaccgggatattctgcatttcctttgcagataacctttctacgcccatctgcggactggccaggctccggccccttgatgttgaactgctcacggttacatcttccagcacggttgtctgttcggataatataatgtcgaggctgatgtgtttatccagcactatgtcctgcttttgtgtctgaaggccaacggcactgatctcgaaactgtattttccttttgcgagggtgatggaatagaatccgtattcattacttaccgttgtctgaccgccggttctgattaccgcgccgatcagtgtttcaccggttcgtgcagaacggatggttccgctaactgtaaatttatcctgtgcggctgcaagaacaggatcaagcagtacaagcagcagcgtgctgcaaagaaagatcagtcttttactcataagaggttggtcgtttaccgcggcgaatatattgatcgctttggcttttttggtaaatgcattgttaacctttttaacaactaccgttcagcctgcctgttaaccgctggtaccggaaacacctgaaaacgggttcaaactttgtcgcttttcttctataccacggcaggccggcctgataattttgctgaaaaattaataacaaatgaaaccggaaaaacgttacaattttttcaacaatattcataagggcttgcgcacaatgcttttcagcattcagatgaaagtgcagcagacagatttttcccagccctccgctgcggatgtgatcagcgaactcgagctcgcattaacctattacgatgagcatgccgcgcacgaagatgaatatatccttgcgccgctttttgaacacgaaccggcgctgaaggaagaaatggagaaagag

SEQ ID NO: 2595 - DNA, 23561 bp, synthetic construct
  misc_feature 1..23561: note = Synthetic
  source 1..23561: mol_type = other DNA
tgggtgaatttgaagggccggtagctaaaattaatctcgctaaaaaccagccatgcactattaaccagaatttcacctttacgagtacaggatctgcaaactatacacgggtacaatggttttttggcgaaggagccagccttgcttcatcaacagatcctaatccaccggtgatcagttattcaagccctggctttaaaactgccgttctacaggtttttaatgaagatggttgctcagttggaataacagaatcctttctggttggactaaaacctgatctccccttgatcaatggcctgaaacccaggtattgtattggcgaaaatatcatcctgaatacccccttacaggctgatgcaacttactcatggacaggaccaaatggatttacttcaagcttacaggaaatcaatatcctggttgacaatgcaaataaagcaggtatttatacccttagcgtgacgatcaacggctgtacttcagaccccagatcagttacagtccctcctatcgggcaaactccaacagcatcatttatcagctcaagcaccaatccatgtacgccacagcaaacatttacatttactaacagttcacagaattatacaagactgcgctggaattttggagaaggcgcaagtattttaccgggtaacagcaatcctataaacaccatcacttattcaagttccggggtaaaaaccattattcttgaggctgagggaagttcaggctgtatcagcatttttagccaggaactaatcgttgcattaagtccccttcgcccggtaataacggtcaacaaaccagatttttgcttagcggataccatccgtctaagcacacccttacaaacagatgctgtttatagctggacggggcccaataatttcacatccgaccaaagaacaccacaggtagcggttacaagtcccctggttgccggaacctacacagtaaccatcagtagaggaaattgcagcacagaggctgtaagtgtagttgtgccacccatttatcagaacccaactgctgcattccgggcagaacctggattaccatccaggttatccattccaatacgggtcagattttttaatgaatcaaaagatgctgatgcatatttatgggattttggggatgggaatacctctaccgatacgaatcccgagcatatctacaacagtgttgggaattttgacgtaacacttactgtgtttaaaagttctgtctgcagcgcttcaattgtcaaggggcaattcatgatcagcgcagataatatcctgttcgtcccaaatacatttactcccaacaacgatgcggtgaatgatgaatttgtgatcagcatgaccaatattaaaacctacaggatccagatatttaaccgttatggagtacctttgtttctttcaaacgatatatttgatcactggaaaggattttttaaaaacgagctcctgccagtaggaacgtattactatgtaattgatgccactgatttcaattcaaacatcattaaaaaatcaggttcggtaaccctattgagataatgaagatcacccttctcaccatcggcaaaacagaggacaaatatcttattgagggtattgatatctattttaaacggctgaaacattatatcccattcaagattactgagataccggaactgaaaaatactaaaagcctttcaaaagaacagcaaaagagcagggaagctgaattgatctttaaaaacattcaaagtacagaccatgttattctgctggatgagaatggaaaagagttttcatccaaagacttttccgtatatttaaataagaaaatggttggcggtcagcagcatctggtatttatcattggaggcccctatggcttcagtgatgaagtttattcaagaagtaatgataaaatatcgctttcgcaaatgacattttcacaccagatgattcgcctgttctttgcggaacaattatatcgtgcttataccatattaaagggagaaccttaccatcacgattaagtcagtaaatatgacagattataaaagaaactataggttcaaatacgccaatccaagtaaggaaaagaagcaattctggatctttgttctgattggcctggccttaggagctgcaatcttatacttcttctgatccaataaaaaagggcactattctcttatggagaaatagtaccctgaatatggtatatctaattatttagatttttgagaaagccttgttgcacttttcacgggagccttggtagcctttggtttctccatagcgacaggctcaggctttttaactaaagactcagtagcagcaccctctgaaataggttcaggtgcagcttcttcaaataatggaagatccttaatggtgttgaaccaggtaatgatctttttcatatctgaagcataaacacgttcctgatcatgttctggggcaacttctgtaaaaaaagaacgtaataccttaccatccgcagatttaggatcaggaatattcttactttccttcattttggaaaatatatcgctcaatttcagatctgtattatcaccaaaaacggtaatatcttctaatgaggccatttttgcagtacttatattcactacaattttattcttaagttcatccagtgtttccaggataaagcctgatttattctggccgatcaatttgaataaccccggtttgccggaaacggaaactagtcctcttaaattcatatgcttttttagatttgagatatcagatatgagatatgagatttctgaaaaagtatttgtaaatactcaaatctcatatctcaaatctaatatctattcttcaattatttctattcctaatatcttatcgccctgacggatatcatccaccacatctacattctcaacaaccttgccgaaacaagtatgattacgatcaaggtgagctgtattattgcggctatggcagataaagaactgggaacctcctgtatttcttccggcatgcgccattgaaaggacacccctgtcatgaaattgattttcgccttccagttcacaatcaatactgtaacccggaccaccagcgcctgttcctgttggatcaccaccctgaacaacaaagtcattgattacacgatggaatgtcacaccatcataataaccttctttcgctaatttcagaaaatttgccactgtattaggggcatctttatcataaaattgcacggtcatgtcacctttttcagtttttataattgctttgctcatagttcaatccttataattggttgacaaagttaattatttcaggcaattgctaaaattctatgaatatcttcttctttttataactttaatacaatcttaacgttaatacttgacatgctaaaagcccgtttaacgcttctaataatactttttactacagtgtgcagggctgcctctattctcattcctatggatgaagaacagaaaaatcatttaaaggcctatggaattacctattgggcattgaaaaatggtcttgaaaccgactggcttctgaattaccgcggtggtagtttcctcatgaaatattcgcagaccatggaatctgaatgtaagatccgtggagtttcctatgaagttattgccgatgcaaaggtgaatgccattttaaatgaaattaccgacccttcggtaaacatggaaatggtcaagctcgaaaaagaacccaaaatagcggtgtactctccgaaaaataaattaccctgggatgatgccgtaaccatggtactcagctatgctgaaataccctacgaaataatatatgatgatgaggtattgaagggcgacctgcccaaatacgactggctacacctgcatcatgaagatttcacaggacaatacaaccgattttggagtgctttcagaaatgcaggttggtatattgaagatgttaagcttcaggaagctacagcaaagagaaatggcttcaaaaaggtttcggaaatgaagctggaagttgccagaaatattagcaatttctgttcagggggaggttttatgtttgccatgtgctcgggccccgaaacaattgatattgccctggcagccaatggaaccgatattgctgaacgcgtttttgacggagatgctgcagatcctaaagctcagtcaaaactcgatttcaaccaaacactggcctttcagaatttcagtctcgatcttaatccggcaaacaatgaattttcaaatattgatgctactcctgtacgatcccaatctttaaacagaacgaacgacttttttacgctttttgatttctctgccaaatgggatatcgtaccaactatgcttacccaaaaccatgataaagtggtgaagggctttatgggtcaaacaactgccttcagaaaaaacgtgatcaagccaaatgttttagtaatgggtgaaaccaaggcaagcgatgaagccagatacattcatggtgagtttggtaagggccaatggacattttacggcgggcacgaccctgaagattatcagcacatggttggagaccctcctaccgacctgaatctgcatcccaactcaccaggatacagactaatcctgaacaatgtcctattccctgcagcaaagaaaaaaaagcagaaaacctgattacagataacagacaaatggaaccaggaaccaggacaatgaagtgctaatctaaaattagcagtaacttttctgacctcatacctcagacatcatgtaacaactaattataaaacttccagcttaccccgaacttcaataatttatcctgcatcggatatcccctgacagtataataaccgttcgaaagcatcccctgattgacataatcgtactttataaacagattggagcgttttaatgtcgctctaacaaatacatctacaaccggataagttgagtattcaagtgatgcattatcattatagaactggcttacattgatcgcataagcaggcgctttaaatggtgtattaaatcgcacatcaaaacctatgtttgttgataatactttgaaaaacttagtggcgtaaaaaaagctattgtaagaatatatctccggagttcttaaaatatcctgaaaatcagttttttggtagacaatataattattgagattaaacttgcccatcctgaaatctttggaaagggtgatcttaatcaaattgatattggtaccggtttgttcaggcagaatctgctttgcactggttgtttccttgaaatacaagtaattattcatcaggaaatattcggcttttgcagccagtttatattttagattttcgtataaaaaggaaagattactcacttttgtcctgtcgaaactcttgtcccagctatgatattggtagtttacccgttcatacatctgttcaggcgacttattctgaacataggcaccaagtattatcctcccgacagatttactcaataaaaagctcgtattggcttcatacagaaaatcgcctgcatgctttccctgtgcgacctggttcaggtctgcttcaatacttaccttatcgctgaacctgtatgcgaggccggcctttaagctggtatttgaaaaattcgatctgtaatcaagctgttcgtaccggtaaatatcattttgtaatcccagatcaagctttaactcattttttataaaactaagtgcctttcctctcaggtaaaaactataattaaattcattccttagattcgacacctttgtagaatcattggtttcagtaaatgattgggaagggagtatcggaaatgcgccaaaaacatcctcctcattccgatagaatttaaagcgatctttggtataggttaaggcatgcgaaaaacgctgggtaggtaatattttctcggcagcttccgtatcaggcagactgtctattcttccaatataatagaattgtttaaagaagaactgtgtttgtcgccagatctgcataggacgatctgttccagtggcctttaaacgaacaggtactgcaattttatcaatcggatcacttttaaaaatagtatcattggttgttgaaccattttctccggcctttattgtattaaagatcacatccccaatgatattataacgcttatttggcgattcataccaggcgaacaaagctgcattcagatgatcggccttctgatttacgtataaaccttccgcacccaaacggttatacattgcacctacgttgagattgcgcttaatattttgggaatgaataactttgaatgtttgctcctgagtccggccattgacataataaagctctgtatatggtgttcttgccctgaaaaacttcattgagtcctgggttagacgataggcatccagcgaatgaaaaccggcatcaaatccaatggtcttagtaggattgaaaagcaattccctgtaggcaagtcctgcacttcccagtccgacagtaggcttgtcaaatctataaatgggactataattctgaaaattagtgagtgtggtatctatcggacgggtttgagttccatcctttaatatttttagattagtatacctgatatatttagaggtataaataattgaatcttccttcatttcctgaccatcctgcgtacccgttcctgaatctctgcctgaacctgatcgcatacctgctccgccgccaccttctgcacggatagtccgctgagcaaaagcatcagagctgaagatatacagcaataaaaaagacccgaatactaagcgtttgatcattaaagttccaggataagatcttttaaaatctttgtcatttttggctctgcctctacagcagttttgattatctcttcgagtgaaacagcctgtagggtatccggaaaaccttcatccgtaagaaccgaaatcgcaaaaacaggtaatgacatatgattagcaacaattacctcaggtaccgtactcattccaacagcatcggcaccaatattacgcaaaaaccggtattccgctctggtttcaagattagggccattcacagacacataaactccctgatgacaggtaatattgtttttctttgctattcccatacctctggcgatcatctccctattataaggctcactcatatcagggaatcgcggtcccaattcatctgaattacgtccgcgcaaaggattgtcagtttgcatattgatatggtcatctatgatcatcagatctccttttttgtaagccggatttaatgcaccgcttgcattggaaacaaataatttctggattccaagcagtttcattaccctcacaggaaaggtgatctgcttcatatcatagccctcataataatgtaagcggccctgcatggcaactaccctcttaccgctaaggattccaaatattaattttccggaatgaaactcaagggtagatattggaaaatttggaatattggaatacatcaatttatgcagaatctcaatatcttctaccagtccgcctaagcctgtacctaaaataattcctatttccggctcaaaatcgccgattttacgtttaatataatcctttgttaactgcaggttttgatgcatattctattattaaattattaaaggaagttttttccggttcattaaaatccgcttcgacaggaaggtaaaaaacaggaatacctgacaattgtttttgaaactcttttgagcttaatctctgggcgtctttttcggttgttatgatcacattttctccggcttcaagcttgttaaatgcccgtacaagtttagcaatatttttcccggtaaaatcatgatgatcgggatactcatggtgagtcacctcagcattaaaactattcagctcattgagtaatggaatgggattagcaattccggacagcaaaatgatcttctctgaattattcaatgaactaagtggccttgaaagcctgtcgtcatacagagacttcaaagttccatacttcaaaaatgaaaaaaacagatgttgttctggtctcagatctaattttttagcaattacctgtttttgggattcatctatgccctgcggacacttagtaaccacaatcacctcagcccttttctttgctgacatgggttccctcagatctccggcaggcaataataattgaaagctctgaaaagaggaatattcaaagagcagaatatttaaaccgggctttactgccctatgctgaaaagcatcatccagaatgatcacttcattttcccatgctatgtattcgatcgcatccaccctgtcctcacaaactgctacagttataccctcaaattttcgtttgatctgaagtggctcatctcctgtatcttcaaaagaatctcttatatcaacaaagcggaatccggttgtcttccttccatagcccctgctaaccactgcaagtgtaaaatcccacttcaatatgcgtatgagatattcagtcataggacttttacccgaacctccaacggctaaattacctacagaaataactggcaattgaaatttcctggacttatatatcccataatcatatgccagatttcgaagtaaaaccccaataccataaaggattgaaaatggaaacaagagcaaacgaagaaatttcatgaattcaggttttgacaaaaatacatatttgatttcaagcttatatttattgatgtttgattaattgaattaatcattatgataagaaaatcgatcgtactttttgttacacttttatgtctggtttatacagctggctctcaaaccagaacggacaaaagactaacaaaagaattgcataagctcgtaaaggatttcaagggcgatgccggaatttacgtgcaaaacctaagaaccggcagagttgcggccatcaatgcagacaccatttttccaacggcaagcatgataaaagttcccattatgtgcggggtatttgataaaattgaaaagaaagaattaagctatcatcagagccttacttatcgcgatagtttactctatgctggagaagatattctgggttcattcaaggatggtgaaaagatacagttgagcaaggttcagatgctcagcatcactacgagtgataatactgcaagtttatggctgcaaaaactagttggttctgagcatatcaataaatggctggctgaaaacggttttgaacatacccgcctgaattcgagaaccgccggacgacaagcataccagaagctttatggctggggacaaaccactcccagagaaatggctttattagtaaaaaagatcagggaagggcaggcagttagccctgcagcgagcgagcgtatgtatcgcaacatgatcaggatctattgggatgctgaggccctttcagagattccaccctatatacaggcggcatctaaacaaggcgctgtaaaccgtgccagatcagaggtagtactggtcaacgccccgcatggcgattatgtattctgcatcgccaccaaaaaccaggaggatgaaagctggactccggataatgaaggttaccggctaatcagaaacctttctaaattgttatggaactattatgaacctaaatccgggtggaagcctgcgatggggttggagaggtatggggattgaagagatggataggaattctataaaatttcttaattctaattgatcaaaattacagtttttcaactgtatttttttttcaaaaaaaatgcccccgttaaagtcgagggcaacttaatgttttcacaacggaataattactattgaaaaatccttgattatttattaaaaatattaaattagttgaaatacgttaacgacaatcttaattaaaaatataattaattgctatttcaattagtattttaaggttttataaataagtcaaattaacgcctgctgaattcatcttaactacaaaaaagccccaccgaagcagggccaagaaaatcttcggcttatagccttattgtgatttgcaactcaaagatagttattaatttaaaaaaaatatgaaaaaaattttcgctctcgacctaggtacaaattcaataggatgggccttaagaaaccctgatctcaccgaaaatcaaattgaaaaatttggtgtattgacttttaataaaggtgtaggcttaggaaaaactggggaatactcgtatgctgctgaacgtacaaaaaaacgttcaatgcgcagattgtaccaatcaaggaaatataggttgtgggctacgcttgaaaatttaataaatgaagggtactgccctttgagtatggaagacctaaataaatggcgacattacagtaaagaagaagcactcaataacaataatggaggaagagtttatcctatcgataacctcgtatttgatgcttggataaaattggacttcaataattgtggtaaaccagaatattcaagtccttaccagttacgcaaggaattggctgaagtaaaacttgactttaacaaagaagaaaataggtttaagctaggcagggcattataccatatagctcagcgcagaggttttaaaagtagtcgtaaaggggccgatgatgttaaggaaagagaggatgacgaaaacgaagtagtggatttgcaatattctgaaaaaaagaaaaataaagtaattagtgaactttttaaacaatattcccaagcgagtaccataggatatttatttgctttgctagaaaacgacaatgttaggataagggaaagtattgcacaatatgcaataagagaaaattataaagatgaaattaaatacatctttaattttcaagacctagacttaaatcataaactctttatgaagttggtagaaagtggtaaaaacaaaaatgacggcagtatcttttataagcgtccattgcgttcgcaaaaaggattaataggtaaatgcaccttagagcttggtaaatatagagctcctgtaagccaccccaattttgaaacatttagagcatggtcttttttgaacaatattaaatacaaaccccttgaagataaagctgcctattggcaaccattaccaattgatttaaaaaaggatatatatataaacaagttttttaggaaatcaaaaagctattttccgtttgcggaaattgctgagtttatcataactaaaggaaataattgggaactgaattacaaacctaagaccactgtcacaggctgtcctgtttctgcaagacttaaagagatttttggtgaggattacatgcatatacaaatccccaaacaaaaagcactaaaatcaaataagtcttactacgatattgaagatatatggcatgtattgttcagttatgaagatcaagaatttgtttcagcatttgcgacagaaaaacttaatctgaacgatgtacaaacaaaacaatttgtaattgcatggaatgctatgcccgttggatatggaatgttaagcattaatgcgattaataaaattaataattttctaaagaaaggactaatttatactgaagctgtactattagcaaatattccgtctataattagtaatgagttatggaccaaaaacgaacaattatttttagagaacattagtgatttaattaatgaaaacaggcgacagaaaacaatcttgaatattgtaaataaccttgtttcacaacataaaaatcaggatcaaaaatctggctttaaagacagttcttatcaactcaatagttcagataagcaagatatttttaatgcaattgaagatacttttggatcaaaaaaatggaaggaaaaaaatgatgcagataaagagcaaattgtaaatactgttactaggtgttaccaagcatattttaaaacatccggcttaacaagaaaggatattaaaggtgaaaggcacttcgaaataatatcagacaatcatttttactataaaactgattcaggttactaccggctaccgaagttgattgatacagtagttgaatttcttcaagtacattttgacgtaaatgatgggcaactaaaaaaaatttaccatccttccgaaataaatatttacccccctgcgaaaccagacgagaatggcattttaaaattgggaagtcctaaaacgggctcttttaaaaatccaatggcaatgcgtacactgcatgaattacgcaaattgatgaactatatgattgaaaccgatcaaatagatagtgatactcggattgtagtagaggttgctagagaattaaacgactcgaacaaacggtgggcgatcgaagcatggcagagacaacgtgaagctgaaaatcaagaatttgcattggctattgaagaacttataaatgctattccggaaatatctgctaatagcaaaaatgagaatgacatagataagatgcgtctctggtacgaacagaacgacgaagaaactgtgcctgcaattgccgatgcaaaaaaagaagttaagggaataaaatggtcagaaaatatcaaatcatcttataaacaaatttcgacgcaaaaattgttgattgacaaatacagactttggaaggaacaaggatgccaatgtatatatactggcaaaataattagtatttcagacctatttaatgaaaatgtaattgactttgaacacacattaccaagaagtaaatcattcgataactctttagcgaatatgaccgtttgctatgccgattttaatcgcactgtaaaaaagaatcaaatcccatttacgttaaattgttacgatgaaattctaccacgaattgaaaaatggaaagaaaaagtagaacgtattaaacaacaaattgatttttggaaaactaaatctaagactgcatctgaaaaacagtggaaagatgatgcaatccgccaacgtcacctatggcaaatggaattagattattggaaaaacaaagtggatcgctttactttagtagaaattaccagcggcttcaaaaatagccagctgatagattctcagctaatatcgaaatatgcctttcattacctcaaaactttttttgaaaaggtagatgtgcaaaaaggtagtgtaacggcagccttcagaaagatatatcaactacaggtacctgatgaaaagaaagataggagcaaacattctcaccatgccaaagacgcagccgttctaaccttaattccaattgctgccaaacgtgatgcagtcttggagaaatattatgaatgtaaagagaataaaaaaccttttactgaaacagaaccctacaaaggatttaaaagagagtttgtttggggtattgatgattcagtactcataaataacattaccaacggtcaagcattaacaccagcgaagagaaaaatcaggaaaaggggaaaagaacaatttattgatggaacaaatcaaccaatgtgggcaactggagatagtatcaggggtcaactgcatcaagaaactttttatggcgctattaagcccgcaaaaagagatgaaaaaggaactattttgaaagacgataaaggaagttttattctggacgagaaaattaaatatgtaattagagttccatttcaatacaaaaaagacagcaatactccaggatttaaaacaatagaagaaatagaaaagcagatagttgacgaaggcttaaaagcacagataagaaagcaggtagaaaaagcaggtgacttaaaggatgctttcgagcaaggaatctatatgtttgataagaagggtaataaagttaataagataagacacattcgcgtttgggcaagtgtttcagagcctttaattattaaaaaacaaactaatctttcaaaaatagcttataagcaaaactattatgcaagcaatgccacaaatagttattttgcaatatatattggagatgataaaaaagattttgactttagaaaccttttagaaacagcacaagtactgtctacaaacagtataaaaagtggcaaagatctatttgaaccatcaattattattacaaaaggaaaaaaacaattggatcttacacttacctacgtattagaaaatggaatgaaaataatttttaaaagagataaggatgatgatttaaagaaaatatcaaataatgaattgacaaaaagactttatgtctatactaactttgaaaaagatggccgtctaaattttaaataccatttagaagcaagaagtaaaattgaagaagaatattcagaatctgaagttgactttgaaatacctaaaccaacattacgattcggttatgcaaaatatgacttttacgtagaggaatatgattttaaagttaacttggatggcacgataaattggaagtaattcgcacttcgtcgggtaccatttaggttgaggcacctcggaagcgttaaacaatactggctgaaagcgttgaaagcaaatcctggggatgttttgcttgggaatgagtctacctgatatatcaaaacatattaaggatatgtattctttttattccagttttcaccaatcattaaccgtgaaaatcaaatattcaatttttgattttcacggttaatgattatatttgctttcatgatcaaacgattagcagcaaaagaaattagcgtcctattaaaagaattcccggctattgcacttttaggtccgaggcaggttggtaaaacaactcttgcaaaagacctggttaaaaagcaaaagaaagagatcttatattttgacctcgagagcgattcggatgctgcaaaacttcaggacccggagtacatattcgatcagtataaagatcattgcattattttggatgaagtgcagcgtgcacccaaattatttgcgcaattacggccaatcatagactcttatcgtaaacccgggagattcattcttacaggctctgcctcaccagatctcattaaaggagtatctgaatccttagcaggcagaattgcatttattgagcttgccccaattaacctgttagaagctaaaaaaagcagtattagtcaggatcagcattggttcaggggcggatttccgcttgccctgcttgctaagactgaacaggcatttattcgatggaccgaaaatttcattcgtacctatatcgagcgggatctgtcgcaattatttggagttgcccttcaggagaaacttatccgcaatttctggcatatgctggcagcaaataatggaagtatatggaatgcagaagtatatgcacgctcattaggaataagtgcaccaaccataaaacgctatcttgattttctggaaggagcatttctgattcggcagttacctgcatggtttgtcaataccaataaaaggctggtcaaatcaccgaaaatttatttgcgtgacagcggactactgcatgttatgaacagggtaagaacatcggcagaacttccactaaacattggagtaggggcctcatgggaaggatatgttattgaacagatctttcagctaaaaccagatcatttagacctgtatttctaccgtacgcatcacggtgctgaatgtgatgtattacttgtaaacggcattaagccagtacttgcactggagatcaaatactcctcaagcccggttctcaccaaaggattctattcggtgatggaggatcttaggctggatcagggctgggtaattattccgtcaggcaagccatttaaaataaatggcaaagtagaatgcagtaatttgacgtactttttaactgataaattacagaatctgcactaaattaccgtgaaaatcaaaaattaaatttttgattttcacggtaataaattatatttatgtgatataagcataacatcttcagtcaaatagggaccatatgataaaaagaactttacattttggaaacccggcatatctcagtctgcaacaggatcaactattaatagatctcccccatttaaaagttcccggagaaaaagagtcgaaaaaaactgtcccaatagaagatattggaattgtattgcttgaccatcagcagatcacaatcacccatggcgccatagctgccctcttagagaacaatgcggcaatcattacctgcaaccatacccatcacccaaccgggatgatgctgcccattgatggccatgatatacaaagtgaacggttcagataccagatagatgcatctcagcctttaaaaaaacaactctggcagcagaccatacaggcaaaaatactcaatcaagcggcggttctgtcagaacgaaatattgaacatgagaatatgctttactgggcccggtctgtacgctcgggcgatccggataattacgaaggccgggcagcagcatattactggaagaatgtattcccgaaaaaaatagaattttttcgcggaagagaaggtgatccgcccaataacctgttaaactatggatatgccattttaagagcgatcgtggcaaggggattggtttgttccggcctgctccctaccctgggtatccatcatcgaaataaatacaatgcctactgccttgccgatgatattatggaaccttatcgtccatatgtcgaccggattgtattaaagatcatagataaaggtgaaaactttttagaattggggacttccatcaaatcgcaactattaggaatagccactctagatgttcagtttgaaaaagggagaagcccattaatggttggactgcaaaacacaacatcctcattggcaaaatgctatgaaggcagcttaagaagaattaactatccggcaattaaaattttcggggcaaaaaatataactgactataaggattcggagaataattatgaagttaatgagtcaaaagatccagaggataataatagcgatacagctaatgaaaaggaattacctttttgataaatgcgtttaaatgaatacaggatcttgtgggtcttagttttcttcgatttgccaactgagacaaaaaaagacaggcaaatttcaagcagatttcgtaaggatattatgaaagatggttttgctatgttccagttttccatatacctgaggcattgcagcagtcgcgaaaatgccgatgtacacatcaaacgtgttaaaaaaaatctgcctccaaaaggccatataggtatcatgacgataacagataaacaattcggaatgatggaattattttatggaaaggaagaaaaagagcttccggataccccacagcaattggaattgttttagaatttaaaatccggaagctatgcaaccggattttttaattcctaattctgaacttaattaactgataatgaataatttgaaccatggtatgttgttgtaaatatcagtagttcaaagaatgaaagcaaatcacaaccctaacctttcccatgtagctgcaacagtagttgttgtaaatatcagtagttcaaagaatgaaagcaaatcacaactccgatttactttctcgtactccgctcgatgttgttgtaaatatcagtagttcaaagaatgaaagcaaatcacaaccatacaaataagattcatccagccctttaggttgttgtaaatatcagtagttcaaagaatgaaagcaaatcacaactcaatcgatccatagtaggaattgaattaagttgttgtaaatatcagtagttcaaagaatgaaagcaaatcacaactattcataaaccaatgcccgcgagctatttgttgttgtaaatatcagtagttcaaagaatgaaagcaaatcacaacaattactcgaagaggctttgtcataaagccgttgttgtaaatatcagtagttcaaagaatgaaagcaaatcacaactatttgcctgttagtttggattatattgatgttgttgtaaatatcagtagttcaaagaatgaaagcaaatcacaactccagattgttcaatttcaaaaccgagtgagttgttgtaaatatcagtagttcaaagaatgaaagcaaatcacaactattgaattagcatctaaaggattaaaggagttgttgtaaatatcagtagttcaaagaatgaaagcaaatcacaacttataaaattggtaatggaaatatatattggttgttgtaaatatcagtagttcaaagaatgaaagcaaatcacaactatacaaaagacttcccttccattggtaggttgttgtaaatatcagtagttcaaagaatgaaagcaaatcacaactacacatccgtaatgagttattgaaaacaagttgttgtaaatatcagtagttcaaagaatgaaagcaaatcacaactcggtcaaacgcaaccatttatgcaataatgttgttgtaaatatcagtagttcaaagaatgaaagcaaatcacaactcatttgattgagtatattcaacgccaattgttgttgtaaatatcagtagttcaaagaatgaaagcaaatcacaactgcagttgatactttaggattacttaaaaagttgttgtaaatatcagtagttcaaagaatgaaagcaaatcacaacttgttattgggcagcaaattgcgtatactagttgttgtaaatatcagtagttcaaagaatgaaagcaaatcacaaccacacagctgacagaagcaatgattgatgcgttgttgtaaatatcagtagttcaaagaatgaaagcaaatcacaactctgtatcgcctgtaactaaaaattgaattgttgttgtaaatatcagtagttcaaagaatgaaagcaaatcacaacaaatggaatcaataaggcaatacaggctaagttgttgtaaatatcagtagttcaaagaatgaaagcaaatcacaaccattgggtttggattcttcaatagttttaagttgttgtaaatatcagtagttcaaagaatgaaagcaaatcacaactgaacgggatggatggatgactgaaatactgttgttgtaaatatcagtagttcaaagaatgaaagcaaatcacaacggagtgatcccgaggtctttaaagcttttcgttgttgtaaatatcagtagttcaaagaatgaaagcaaatcacaacacagagcaccccttcatacttacattccccgttgttgtaaatatcagtagttcaaagaatgaaagcaaatcacaacacaatatcggtaaccaatgctttacgagcagttgttgtaaatatcagtagttcaaagaatgaaagcaaatcacaacaaatgaccctgaaatatatccctatttaagttgttgtaaatatcagtagttcaaagaatgaaagcaaatcacaactccaagcccgaatggaagcttccaggggcaagttgttgtaaatatcagtagttcaaagaatgaaagcaaatcacaactcgtcaatgattaagtcatacgaaaatgtagttgttgtaaatatcagtagttcaaagaatgaaagcaaatcacaactattgtctttagtcggtggtcagaactcaggttgttgtaaatatcagtagttcaaagaatgaaagcaaatcacaacttggggctgacaatagtttcagctcccctagttgttgtaaatatcagtagttcaaagaatgaaagcaaatcacaactagatatatccaaatcgctcgtaatattttgttgttgtaaatatcagtagttcaaagaatgaaagcaaatcacaactgctcaattaaacttgttgaataaatagaggttgttgtaaatatcagtagttcaaagaatgaaagcaaatcacaacaaccaggccgcaaacttaagagccaactgcgttgttgtaaatatcagtagttcaaagaatgaaagcaaatcacaactactggcagataaagaacagattgaaatagttgttgtaaatatcagtagttcaaagaatgaaagcaaatcacaactatacaaaagacttcccttccattggtagggttgttgtaaatatcagtagttcaaagaatgaaagcaaatcacaacaactgttggaatgacttgcaagccattgaagttgttgtaaatatcagtagttcaaagaatgaaagcaaatcacaactacacatccataatgagttattgaaaacaagttgttgtaaatatcagtagttcaaagaatgaaagcaaatcacaactacttcaatcctatatttagacacttctgcgttgttgtaaatatcagtagttcaaagaatgaaagcaaatcacaactagaagatcgcttacttgcacttgatttatgttgttgtaaatatcagtagttcaaagaatgaaagcaaatcacaactctgcattagctaaattaaagttaaaggaagttgttgtaaatatcagtagttcaaagaatgaaagcaaatcacaacgatggataagtatataaatcctttagtaagttgttgtaaatatcagtagttcaaagaatgaaagcaaatcacaacctttcttcctgaacgccaaataatgctgccgttgttgtaaatatcagtagttcaaagaatgaaagcaaatcacaacttggggctgacaatagtttcagctcccctagttgttgtaaatatcagtagttcaaagaatgaaagcaaatcacaaccctgtacgatctgtattatctttggttggtgttgttgtaaatatcagtagttcaaagaatgaaagcaaatcacaactagcagatgccaaattcactaaggataaaggttgttgtaaatatcagtagttcaaagaatgaaagcaaatcacaactataaaattacatcaccaagcggaaaaattgttgttgtaaatatcagtagttcaaagaatgaaagcaaatcacaactaattcctgcaaagttggcaatttgtgtaagttgttgtaaatatcagtagttcaaagaatgaaagcaaatcacaactatatagttgcaagggttcattatttacagttgttgtaaatatcagtagttcaaagaatgaaagcaaatcacaactgaaaccagtaactataaacaaagcttcctgttgttgtaaatatcagtagttcaaagaatgaaagcaaatcacaactgaatgatgtttattatgaggatgttggtagttgttgtaaatatcagtagttcaaagaatgaaagcaaatcacaactatctaatgccaagaacgatgcgatctttggttgttgtaaatatcagtagttcaaagaatgaaagcaaatcacaacagtgcatcagtcattaatgcggaagcatttgttgttgtaaatatcagtagttcaaagaatgaaagcaaatcacaactaaagagctgaaaccgaggacttgacagctgttgttgtaaatatcagtagttcaaagaatgaaagcaaatcacaaccaatatgattcaaaggttaatgtggttttcgttgttgtaaatatcagtagttcaaagaatgaaagcaaatcacaactatgtagttgcaagggttcattatttacagttgttgtaaatatcagtagttcaaagaatgaaagcaaatcacaactaagcctaaacctaatataaaaactatctcgttgttgtaaatatcagtagttcaaagaatgaaagcaaatcacaacagtaattgaatttataattaaacggataatgttgttgtaaatatcagtagttcaaagaatgaaagcaaatcacaacactgactggatcgaatggatttgttaataagttgttgtaaatatcagtagttcaaagaatgaaagcaaatcacaacctatccattatcccattagcttcaagcagggttgttgtaaatatcagtagttcaaagaatgaaagcaaatcacaactatcataggtttttgtttcattccatgatagttgttgtaaatatcagtagttcaaagaatgaaagcaaatcacaacatttgttcatactttcttatcttgtcttttgttgttgtaaatatcagtagttcaaagaatgaaagcaaatcacaacaggattgatactacgtaaaacctatcatgcgttgttgtaaatatcagtagttcaaagaatgaaagcaaatcacaactatgtagttgttaggattcattatttacacgttgttgtaaatatcagtagttcaaagaatgaaagcaaatcacaactttggcgagggaatccagcgcaggatcaagttgttgtaaatatcagtagttcaaagaatgaaagcaaatcacaactattggcgtttataatccctctggctatccgttgttgtaaatatcagtagttcaaagaatgaaagcaaatcacaactattatctttggttggtggtcagaactcaggttgttgtaaatatcagtagttcaaagaatgaaagcaaatcacaactcaattccatattatcctcatttgtgatttgttgttgtaaatatcagtagttcaaagaatgaaagcaaatcacaactatgtaatccgtaaccgttgcacctgtaatgttgttgtaaatatcagtagttcaaagaatgaaagcaaatcacaactaatacggatcgctactgatgttttctgggttgttgtaaatatcagtagttcaaagaatgaaagcaaatcacaactagcaagtaaggttcctttggtaggtcctggttgttgtaaatatcagtagttcaaagaatgaaagcaaatcacaactggtcagcatctacgcttcaatacttatctgttgttgtaaatatcagtagttcaaagaatgaaagcaaatcacaacttgaagctatcgcaaatgcttacaacaatggttgttgtaaatatcagtagttcaaagaatgaaagcaaatcacaacagtcctgatattaacattgtaaatcctgtggttgttgtaaatatcagtagttcaaagaatgaaagcaaatcacaaccagtctgcggctcaggaaacaacaactttagttgttgtaaatatcagtagttcaaagaatgaaagcaaatcacaaccattgcttttgccatttgaaactgatacaagttgttgtaaatatcagtagttcaaagaatgaaagcaaatcacaactatacgaaagacttcccttccattggtagggttgttgtaaatatcagtagttcaaagaatgaaagcaaatcacaacactttcatattacattccctgtacgtaaaagttgttgtaaatatcagtagttcaaagaatgaaagcaaatcacaactatcaagcggcgcattagtgagtgattttagttgttgtaaatatcagtagttcaaagaatgaaagcaaatcacaactattgaatcctcaatatatccagaagatatgttgttgtaaatatcagtagttcaaagaatgaaagcaaatcacaacggggtgcaaccgatatattattagcaaaaagttgttgtaaatatcagtagttcaaagaatgaaagcaaatcacaactgaattataccgttcattttgatgttaccagttgttgtaaatatcagtagttcaaagaatgaaagcaaatcacaactctattcaatatgataaaaatggtcaaatagttgttgtaaatatcagtagttcaaagaatgaaagcaaatcacaactataccctactcttacatctcacaatgctgttggatattccgctccatagtacgccacgattccgacacaaagtacgccgcccattccgaagcaaagtacgccacgattccgagggaaaggttacc

SEQ ID NO: 2596 - DNA, 23102 bp, synthetic construct
  misc_feature 1..23102: note = Synthetic
  source 1..23102: mol_type = other DNA
ttttcctgcctttaccgtgagttttctgtctcgcagccagggatttaattgcttgagagtccgataagtagtgccgttgtctagggcaaactgtgcaagattgggtattgaactcgtgactgttacagactttgtctttacaggattataaccatcatgtttttgaactatataaccaaagcgctgtgcttcaccaattagcagtttgaaagcaagaattcgaaatacatagcgcattgtttcttccggaagcaacagatcataataattgctttgttgctgaaaattggattgattgttataaccaccctgtcccatgttgtaagaagcagcagcagccgtccaggaaccgaatttgctgtaggcctgacggaaatatttactggcagcctcggttgacttcacgacatgataacgctcatctacctcatcgctcacttccaatccgaactcgggagcggtagcgggcataaattgccagaagcccacagcaccggcacgggaagtctgattttgcagcgcactttctgcaatgcagagatatttgaaatcgtcgggaatcccatttgccttcagcaaaggttcaatcaccggaaaccagcgctctgcaagctttagaatatacagagtgctgtattgattgtaatagttgtacaacagttcacggtccagttgctcacggatttcaacacgctccagaggcactttctcaccggcaaagttcatagacttaggcagctccggcgaataccatttatactgcaaacgcccatctttctttacctcgacagtctcttctgcctcattgggatttcggaacgagaacgcaaggatactagctgctcctatgatggctccaaaagataaatacagcgcggttctaaatgcagacatgtgggcgttgggatttcaataaatatacgcaggaaaaatcgaagaaaacgttacaaagtacctttccaaacaagtaacttttagattagtctaaaaatatttaacttacaggcaaaataaaaatttacatgttccgtattgcggttattatacttagtttttttgtactagatcttcaggcgcaaacccccataaaaggccttgttgtttcagggcaggaaccggttccattcgctattgtttccctagaaggcaccaacaagggcaccgtagcagatagtaatggatatttcactataaaagatgctgtatgttcaccctgcaaacttcgtcttagcgctacgggatatttctccaaattggtgacagtgtcgaatggggaattgcagaaaattcagctggtaaaaaatctccgggaaatggacgaggtggtggtaaccggaaccatgaaagaagtaagtcgcgcggaaagcgccatccctgtggagatcataacggcgaaatttttcagaaaaaatcccacgcctggcttgcttgaagctgtaggcttggtgaatggagtcaaacctcagctcaattgcaatgtctgcaataccggcgacatccacatcaacggtatggaaggtccttataccatgatcctgatagatggtatgcccatcgtctccagtctttctaccgtatacggacttagtggtattccaaacagtattgtagaaaggatcgaagtggtaaaaggtccggcatcctcactttatggctctgaagctatgggtggcattatcaacgtcatcactaagaatcctacgaacgctcccattcttgcagcagatatcatgaccacctcctggcaggaacataatattgatgttgcagtaaaaggaaatataggtaaagcacgaacacttataggtgctaattatttccactatcaaaaccctacagatcacaataacgatggctttacagatgtaacgcttcaaagtcggctttcggttttcaacaaatggaacctcacccgaattgaaaaccggttggctagtctggcggcaagatatgtatatgaagaccgttggggaggacagatgaactggacccgcgaatggcgcggaagcgacagcatctatggcgaaagtatctacacgcggcgggtggaactaatcggaatgtaccagttgcccttgaaggaaaaaattctcacgcaatggtcgtacaactggcacaatcaggattcatactacggaaccactccttatatggcaacccagcaagtagcttttgcgcaagcgtattgggataagcagtttggatcaaaacacaacttcctgctaggaacctccctgcggtacaattattacgacgataatactcccgcaaccgccacaacggatggcagcagcaatcttccgtccatcactaccctacccggtgtctttatacagaacgaatggagttttcatcccaaacataaactccttgcaggttatcgttacgattatcatcagcaccatggcaatatccattctcctagaattgcctacaaatggtcgcctgacaaaaaccatacgctgcgagcaagtttgggtacaggctttcgtgttgtaaatctttttacggaagaccatgccgcccttactggtgcaagagcggtggtgattgcagaagcgctgaatccggaacgttcatacaacggcaatctgaactatgtgctgaaaaccgctttcgataagggttttatcaactttgatcttacgggattttattcctatttcaccaacaagatcgttgcagattttaactcagatcccaacaaaatcatttacgataaccttagaggctttgcggtttctcaaggtgtatccttaaatgtggacgccaattttacctttccggtaaggttgatggccggcgtaactttcatggatgtctttcagatggaagaagatggtcacggaacgttgcaaaggaatgtgcagttatatgcccctaaatggagcgggaattttctggtgagttatacgtttaaaaaaggatggctggtagatgtcaccggcaattggaacggtcccatgcgattaccaatactgccgaacgactatcgtcctgaatattccccctggttttgcatagccaatgtgcagcttaccaaaaaactgaataaaggaattgagtgttacggaggcataaagaacattttcaatttcgttcctgccgatccgatcatgcgcgccaacgatcctttcgacaaacgtgtggacgatcccatggataaccctaacggatatactttcgatccgggctacaattatgcttcactacaaggaatcagaggatttctcggcgtgcgatatcaattggagcattagagtatacagcgcatactcctgtctaaaacggttcgtccttttcccggattacgtgaagaaacctggcaaaaccataaagcaatagtaacgtaccaagcaactgaaaaaacagcgtgagaaattcgtcggtttgcatcaatagttcgactacctcgtgcataatgcttccatgtgattgactttgtatgcccgctttgagaaaacactcatcatgcaatccatcaccgcattgttcgcttcataatccccaatggaaacacgaaaggtatttttcagcaagggcatggtggaagtatcaagcaccttaatacctgccgtttcaaatgtttccagcatcgttgtaaacatcacatcatcatacatccttacaagaaggaagttaccggaggatggatagatatgtgcaaacgctggcggaatattttgtttcagcagactgttcatgcgttctctttcctctactatctgcatccgtgcatcgaaaacccagtcgcaaaactccggttcaaacatcatatagcgtgcaaatgccagcgataagggattgatggtaaacggcagcatcagcttcctgatcacacgcacaacttcctcagcgccgcagatatatcccaatcttaaacctgcaatgggtaattccttactaaacgatcgcatgatcaggaggttgtcgaactgcaacagcagatcactaaaatcatcttcccgaaatgaagcatatacagcatctagaatcaccagcgttttcggatggcgtacaagaatgcgttgcaacatagcttttggaatagtgtttccaacgggattgttgggagaaaccacaaacagaatggagccttcctgcaattcgggcaacaaggattcatcgtattccaaagcatcgttgagcatccatggcgtatagtcaattccgaaggttttacagtggtagtcgaacaatgaatatgatggttgtgcaatcacaatctgtttacgttgcataccgaagaaattaagcaacgctgtaataaagcttgcagaaccggaccccagcaaaacctggttaccatcaactcccaatccttcagcaatcttttgttctatatcgttatactcgagtgcaggataccggttccagtccatattcatagccttttgcagcacctgcattttcagccaggcgggaacatcttccggctgctcgtttttatcgagaagatgtgtgtaagtcttttgcaaggaagcaaggcgctgcctgccctgcaccagttgtgcagaaaaaaccgatgaaagcatagtcttataaagtgattagaagttcaggaattatgaagcaaacatgatagccaaaatagtctcctgctgttcagaaaatcccacatagcccttatgaaaaggttgaatctttacacccagcacttctttcggttctgtcagcaacgcaccggcatcagtagtaaacccgttctgatgcagacggtgcaaccaaaccgaaaccggctcatgtttttcaaagcgctcctcgtcatcagccttgctgagaatatcttccatttctctgccaaagaaaagtttcagaccattcttgtcctccatacttgcatccagacgatctatcacgcgaaagatgccgatgaaatgatcgtagcaattgagcattcttgcagccagatcattggtgaagtggttgacattaggttctatcagtaaaaaggctttgggattcagactgcgaattgctttaatcacgcgattgcgatctgcatcagtcttgatgtgatgcaatgcaagtgacgcatttacgatgatagcgctacccgcccttgcaaaccgggatagatctgcatattcaatgtattcagacacagcaataaattgcagttcaaaaggcacctgatctttgtattgatgtattttttcttctgctgtcttcagcgcctgctgaaaaggttctatacccacaatcgtaagtctgcggagatgcttcatctcttttgcacgatcgaggatatgcagcatctgtgtacccaatccaataccaatgtctatgatacaaacatcctcatgttgtgtcataacgttcacaatggcattgttggttatctcctgtccatattttacgaagggaaactgatggataagaatatcgaacaatcggatttgcgaaacaccatcgctggtatcgtacagattctctgtaatacctgtaccggaaaatcttttgcgtaggttgcttgccatcagataacctaacagcttcacagaatcctgatcttttccagctgtgcaggaagcgatcatctgatccagcaattcgttgcgctcattgaaatgatgaggctccagcagttgtccgagtttatgcaattgatttctcacgttgcaatgatggttgatggtgtgggtcttgataactgtttgcatacctgtatctgtttctgagcacaaatttgcaacgcagctttttcccgaaaatagatacttaatcgaacaatcatataaatcaaatgaggtgtcagcttttcaaactgaagcgttccgctcctaacgatcaaaccacttcttgaaagcagcctgtttttctctgctgacatcctgttgcatcttttgcggagcgcgcagaaaaagcgtaagcttcaggttgtcgtgcagttgtacacgctctatcgcatctatatgcacaatgctctgacggttggcgcgataaaaaatccgtggatcgagcagttccataatctcatcgagcgtagcgaagtcgagaatgtatttttcaccgctgaaagtgtagcaatagttgagattgtcgcgcacgatgcaggcgatatcctttgtagcgacgggtatcaggttctgtcggaattttacgagtaacttttccttgtacggactgctatgtgtatgcggattgcgaataagttggaggatattttccagtggcagattaggctcgcttgactgtttgaattgtttgagtttctctatcgctttctgcaattcatcagaatccacaggcttgagcaggtaatcaataccattcactttaaaggctcgtatggcatactcatcgtaagcagtggtaaagatcaccggacaagagatcttctgctgctcgaacaattcaaaactgacaccatcgctgagttgtatgtcggcaaaaatgagatcgggctcggtgttttccatgaaccattttttagcggcacgcagactgtgcagcaccgcaatgatcgaaatatccggtgctacatcgtgtaacttgtattgcaattcctgagcgatcagtctttcatcttctatgattacggctttcataacagcggtatttttacaatgaagaaatgggaattgtcttctatgataatgggcttatccgaaatataaccatacagtcgttccaaactcgacaatccttttttgttgctggtttccacatagtttttacgctgtagattgttctctgccaccaaattatctccttctacataaaaccggatacacaacggagtttccggatcaatgatgttgtgtttaatagcattttccaatagtttttgaagcgtcacgggagcaatacgtttttggtaaaatgctcgatcaacttcattgatcaccatcagtccatcgtcgaaacgtgttttctgaaggtgcgtataattctcaacaaactgcatttcctctcccaatgtcacagtttcattttcctgagtgttaagcacataacgataaagctttccaagtctttcgagaaacaatgaggcctgtcgggtatcggcgtggatcaatccggaaagagaggtaagtgagttgaacaggaaatgtggattcagctgttgtttcaaaccttcaaacaacaccaaagcgttttctttctccagcgcatctgtctttcgttgcagctcgtatatctgccgctgacttctgagtctgccgcgataatatgcccaaagcgaggcgaacaccacagcaatcagcaagatccaaaaccattttttctgataataaaaactgccaatctctacggaaatttctttgggtgctatggtataccagggcgtattgcccgatactgccttgtactgaaaattgtagcttccgccgggaagattggtgtacaccgcctttccgtcctgagaataatgccattccttttcaaaaccatccagtcggtaagcaaaacgtgtttgcgtaggattggcaaaattcagtgcggttatttcaaacgtcagcgaattatcacctgcctccagccgaatgtcttgctgaagattaccgagattcatgcggtgcgtctgtcctttggcagactgataccgtgtgacgtaaaatggaatcttactagcagcaaggttgtattcatgcgtattgaacttcagataaccattgtaggttgccatccatattacaccctgactatcgatgatgcccgcatgttccggaaaaccaaccgatggaagcccgtctgccaacgtaaagctggtcatcgtccgccgatcctgatccagcatgctaagtccgccggaagcacccatccatacgcgatcataactgtcgacgacaatagggctcacccagttattgaccagaccattcttacggttgatatttctgatcgttccgttttctacatcaataccggaaacgccgttcatcgtacttgcccagataacgcccttgctgtcttccttgatatcaatcacctgatcgccgataatccggtgcgccgcatcttgtttggtatcatagagcaccgttgcgcctgtaggcttatcgtaacggatcataccctttctgccaaacgatatccaaagtcgatgcttgcgatcttcataaacataagacaccaccgcatatcgctgatattttttgagcgaaggattctcattgatggaatgataggttttgtctttgatagaataccagtacaaagcactggtatcgttggtgccgaaccagatgtttccgcttctatcggcagtaatcgtattgtaaaaacttaaagggagatccttcggacttacaaattccatcctttggttgaccagatcatagcgattgacaccggatgctgtgccgatccatacaaacccgtttgcataccagatagaacgcactacattgttgtagatacgcagcggcttgtctttttcgttgtgccagtggcgatattttcctgttgcaggatcataggcactgacacccacgtgagcacccatccagatggttccgcgattgtctattgtaatggcccttccaatccgttcctttttccaaagcgcttcttcaaaaggcatcagcaccgaaaaaaaacttttcacgggattgaagaaaacagctcccacatcgcaacccgcccatatcatcccgtttctgtcctgcataagatttctaaaactgttggtgggtaagccggaaggaagcaaaggacttcctttgtgtttaatcacggtgtcgcgctcgcgcaaatattgtatgattccctcagttgccgttataaaccatacattgtcgttatggtccaccagtacgtcttttaggttgatctgcgtgatcagcgattcggcacttaaccatttatcgaagacatccaacgttttccagtcgttgcgcaagcggctgaaccgcaccttatcataggctgccatccagatatcgccgcgagcatctaccgctactgccaccaatccggcatcccgcattgcaggaatatccaaaataaaagcactgtccttttcgagatgatgaaggataagtccccgagaggttgccagatacaaataaggcagatgcaattcgacgtcgcgtatatatgctcccttcaaagcctcatggcgagacaaagaagaacgaaagtaaaagaacgtatcatcggtgcgcgagttcattcgaatcagtcctgatgaactgccaagaaataaattagagtcatttatagaaacgatggaagaaaacgacctaccctccagcgtgcgcaccttgcgaaaggttcctgttggaaactcatactctgccaatcccgattcatagccaatccagaagcgcccctgccggtcgctatgcatgcatctcggctgactggaataaggcgtggtcgaatcgttcatatcgtaggtaaagacctctatcttctttccgtcgaagcgattcaaagcgcccaccgtaccgatccagataaaaccaaaagtatcctaccctacacaccggaccgtaccgtcgtgcaagccctcgctgatgccaagccgtcgaaaattgaaagacggaggctgagcataggcgactgccataccgaagacacaaagcatcatgagcgcagttctgatcatatcaggcggtttccaaagtataaattttcaggttatgtaaccctgtcaaatcctctgatatacaaaactgcgaagccttaagtttttacagagaaaagatcagctcagatgcccatgaaatcaaatgaggcgtgcgggttggaggatgaggtgtttggaaaactgtgtcgtagcgttataagtaattgcatttcataatgcaacttcggaagtgcaacccacacatgaatattacatctgtagatagctgcaaaccatcttgaataaaaagaaattttttcagatattagggggaaagaaaaaagccccacagagtatgcagggctgagaaatcttcggcttatagccttattgtgatttgcaaaacaaaaataaaaaataattacaaatcacaacatagtgtacgcacatacaaatagactaaattaaaataaacaccccatgaacaaaattttaggtcttgatctcggaacaaactcaattgggtgggcattaagaaatcctaatttgaccgagaatcaaattgaaaaattcggcgttattaccttcagaaaaggagtcggtttaggtaaaaccggagagtactcttatgcagccgaaaggactaaaaaacggtccatgcgcagactttatcaagccagaaagtatcgtctctgggctactttagagcacttaattaaggaaggttattgtccgttatcaatggatgatcttaataagtggcgtcattatgataaacaggaagctttaaaaaacaacaatgccggaagagtatatccagtaaacaacgatgcattcaacgcttggataaaactggatttcgacaatgacggaaaaccagattatacaagtccttatcaactcagaaaagaacttgcagagaagaaacttgactttagccgtacagaaaatcgcttcaagctcggaagagccttataccacattgcacaacgcaggggatttaagagtagtcgaaaaggagctgaagaatccaaagagtctaacaatagcgacgaaattcaggatttacagtattccgaaaagaagaagaacaaagtcattactgacctgtttgagaaatatccagaggctcaaaccattggctgcttgttcgctctgttggaaaacgataaagtaagagtccgggaaaacataacgcaatatgcaattcgtgagaattacaaagatgagatcaagtacatctttactgaagcgcaaaaacttggcattgaacaccccttgtacaaaaagttagtcgaaacagcccccaacaaaaatgacggaagcattttttataaacgtcctttacgatcgcaaaaaggactgataggaaaatgtacattagaacctaataaataccgcgcacccattagtcatccggcatttgaaacgttcagagcatggtcgtttttaaacaatatcaaatacaaagaaggtgatacgctgaaagagttgccgcttgagttgaagcaggaaattcattcagaattgttttttagaaaatcgaaagcatactttcctttttcagaaatagttgcattcttaaagaaaaaaggaaaagactggcagcttaattactcaccaaaaacaactgttacggcctgccctgtttctgctcgcttaaaagacattttcggcgatgattatctcaacataaaaatcgcaaaggacaaaaaatcaaaatccggagaaggttattacaccattgaagacatttggcatattctgttcagttacgaagaccaggaatgtgtatcagaatttgcggaaaaaaagctaaaacttgattccgaaaaagtaaagcagttcataacagcatggaatactctgccggtcggctatgccatgttgagtttaaatgcaattaagaagataaactatttcttagaaaaaggattgatttataccgaagcggtgctgctggccaatcttcccaaaatcatcggcactgagttgtggaaacaaagtgagcaattatttctcgacagtattggtctgataatcgaggagaatcataatcaaaaatcaattctcaatattgtcaacagccttatttcgaagcacaaaaatttagacgaaaacaaattcggacatagggacaataactacaagttagttgatagcgacttaaaagatattcaaaccgctattgaagaacaatacggtacaagtaaatggaatagttttcccgaagagaaaaaagaagtcgtcttcgatactgttaaagattgttatcaggcatattttacaaaacaaggcattgtaagagattctggtagtgcagaaagagtcgtaacgatccgatcgaacaacaaaaattattacaaaacagaaaccggatattatcgcctcccaaaactgattgattcactaaaggattttctgcgagataactttgatcaccttgatgaaaataaactttcaaaaatctaccacccctctgaaattaatatttatcctccctccaaagaagataaagacggaccaaaactccgaagcccgataactggttccttcaaaaatccgatggctatgcgcacgctccatgagttgcgaaagcttatcaattacttgattgagaccaatcaaatagatagtgaaacaagaattgtaatcgaaattgccagggaagcaaagggaaaactagattatgctaataaacgttgggcgatagaaacctggcaacggcaacgtgaagcagaaaatcaggaaatcgctgcagccatcaaacaactcttgatcgaatatccaggcatcaaagcaaatcccgaaagtgatgacgatattgataaggtaagattattttatgagcaaaatgaagaacagacacttcctccggtgattgtagaaggtgaggaagaaaaaggtaaaaagaaaaaatcgaaaaagacacctcaaaatggtgaagccataagatggaatggattggggaaaaaccttattgacaaatatcgttcctggattgaacaaggttacaggtgtctctataccggaaaattcattaacctaactgatttatttgacgacaatgtagttgattttgaacacaccattccaagaagtaaatcgtttgacaactcgctggcaaatcgcactgtctgttaccacgactacaatcgaacaataaaaaagaatcaaataccaacgcaactacctaattacgataaagacttcaattttggcggaagcattggaatgtgttctgcaattctcccgcgtttggaaccctggaaagaaaaagttgcccggataaaacagcaaatcgatttctggacaaccaaatctaaaaaggcagcggacaaacaatggaaggacgatgccatccgtcagcgtcatttatggcaaatggaactggaatactggcaaaacaagctcgataggtttacgataaaagaaatcaccacaggttttaaaaacagtcagaaagtagatacacagttaatctcaaaatatgcctttcactatttgaaaacctactttgaaaaagttgatgttcaaaagggaagcattactgctgatttcagaaaaatctatcagctacaatccccaaatgaaaagaaagacagaagcaaacattctcatcatgcaaaagatgcagcagtactaacccttataccggttgctgcaaaacgagatgcaattttggaaaagtactacgaagcacaggaaaataaaacttcgttcactatagaaccgccattcaaaggctttaaacgtgaatttatttggagtattgacgatagtgttttaataaacaacgtcacaaacgatcagacactgacaccggcaaaacgtaaggtgcgcaaacgcggcaaagaagttatcattaacggtaaaacccgttgggcaactggcgactgtattcgtgggcaactgcatcaggaaactttttatggagcaataaaacccgctaaaaaagacgaaaaagggaaccctttaaaagatgaaaatggaaaatttattttggaagaagacatcaaatatgtacaaagggtgccgtttaacgcggacttcacgagcgtagacaaaattgttgacgagggtctaaaaagacagataaaagaacatataaaaagaacaggaagctttaaaaaagccttcgaagaaggtatttatttgttagataaaaatgggcatccgcatggggatagaatccgccatattcgggtgtgggcgagtgtttcagaacctctgaaaataaaaaaacaaaccaacctttcagacaaagaatacaagcaatattactgggcggcaaatgccaccaattgctactttgcaatttataaagatgaaggcaaaaaggccgcaacgtttagaaatctgtttgagaccgccaaaatcctttcattaaatcctataaaaagtcctgaagaattattcgaacctacccttcaaaaacaaaacaaattattgacacttacctgtgtattaaggtctggattgaaagtaattttcaaaaaagatagcaaagaagctttatcacttttatccaatagcgaactaaccaaacgcctgtacgtttatacaaactttgaaaaagatgggcgcttaaacttcagatatcaccttgaagcaagaaatgataaagacatcacagaaaaatatgtttactctgaaatagattttgacaatccaaagccaacacttcggtttggttatgccaaatatgatttcttagttgaaaactatgattttgaaataaaaatggatggaactgtaacctggctttgatctctggaaatctgcttcattttatgaacacattagaaatcaacacctactatcacatctacaaccacgccaacggtaatgaaaacctgtttcgcgaacgggaaaattatcgcttctttttagaacagtatcagaagcatattacacctgttgcagataccctggcgtactgcctgatgccgaaccattttcacctgctcgtccgaataaaagaagcagaaaccttgctatctacttttccaaagttgctaaaaacaacttcaaaccttccaggtttccaaaacctggaaggtttgttatccgcattcatcagcaaacaattctccaatcttttcaacagctatacaaaggctttcaacaaaaaataccaacgaaaaggttcgctctttattaaaaatttcaaacgaaaagcaataagcaacgatcaatatttcggacatattatcacctacatccaccttaaccccataaaacatggatttgtaacaaacattgcggattggaactggacttcttatcacgattacctgcatcaacaaccttctttcattcaccgacagccggttttagattggttcggaacaacagatgaattcagaaattttcatgaaacagcgacacgagagatgacatataaaaccgctgtcatttccgtccctgaacatgattaaacgaacactctatttcggcaaccccgcctatctgaaaactttaaacgaacaaatgattatcgagctcccggaagaaaagggagtacgcctggtcgccgaaacaaaacaaacacctatcgaggatatcggactggttatcctcgaccatcagcagatcaccattacacaagctttgatggcaaaattgctagagaacaatgttgccgtgattacctgcaacaaaacccatcatccggcagggctttttctcaacctggatgggaatacccttcaaagtcagaaattcaaagcacagctcgaagcttcggtaccgctgaaaaaacagctctggcagcagaccgtatcggctaagattgccaaccaggctgccttgctcggcctggaaagagtcgaaaacaaattgctgctacagtatgcaaaacaggtaaaaagcggcgatagcgaaaatcatgaggcaaaagctgctgcatactactggaagaatctgttccccgaatttctgaatttcacccgccacagagaaggcgatccgcccaataaccttctcaattacggctatgccatagtgcgggccctggtagcccgaagtctggtgggatcggggctattacccacacttggcatctttcaccgcaatcaatacaatgcttactgtctcgccgacgatattatggaaccatacagaccctttgttgataaagtggtgtgcaacattgtcagcatgaacggtcgctttctggaaatgacacccaatatgaaaaaggatcttctgagcatacccacgatggacgtaattatagacggagaacgaagccccctgatgaatgcggtacaacgaaccacggctagccttgccagatgttttgaaggaaaggcaaaaaagctcttgtatccaaccttaaagtaaaggactctcaacggaaaaccggagaacctgatacttcacgatatgcttctcaatattgctcatcggcttcaacgcgcaccatcttacggtggtgactggggagaagcgcttaatgcttaccgtatcatgtgggtactcgttatgttcgatctcccgacggaaaccaagaccgatcgaaaaaactatgcgcagtttcgcaaaaaaatgctgtccgacggcttccaaatgtttcagttcagcatgtacctgcgacactgcagcagtcgcgaaaatgccgaagtgcatataaaacgtgtgaagagaattttaccacccagaggacatgtaggcattatgtgcatcaccgacaagcaatttggcatgatggaaatcttccgcggtcaggagcaggtggaagtccctggtacgatacaacaattggaacttttttaagaatcagcctccttccaggcaatgcatttgaaagatctgaagtcaaaaaataaactaaaaaataaaaaaacggaccggtggagtccgtttttttaatactgtagaccggttaaaaagctttactgtagcggctttcgggaatatccgttgtcaaagacctaagctacagaaaagattgaaagcaaatcacaacatcgcagaaaaccctttctctttccttgaggttgtcaaagacctaagctacagaaaagattgaaagcaaatcacaacaagccctcaggtattgaggtaacgctgctggttgtcaaagacctaagctacagaaaagattgaaagcaaatcacaacactacgctgaaaatatacgatgggtacaatgttgtcaaagacctaagctacagaaaagattgaaagcaaatcacaacaggaagatggcagcaactatgtgacggtgagttgtcaaagacctaagctacagaaaagattgaaagcaaatcacaaccgcttatcatacttattcaaacctcaatgcgttgtcaaagacctaagctacagaaaagattgaaagcaaatcacaactttcatcgaggttgcgccgatatgttacgcggttgtcaaagacctaagctacagaaaagattgaaagcaaatcacaactaaaacaccatctcgccgtaggtatcatcgttgtcaaagacctaagctacagaaaagattgaaagcaaatcacaacgagttacggggttaactgtaactaccctgtgttgtcaaagacctaagctacagaaaagattgaaagcaaatcacaactaatgttattaccgtatcctagtttgtaggttgtcaaagacctaagctacagaaaagattgaaagcaaatcacaacaaggaagccgccgaaattctcaaagcattgttgtcaaagacctaagctacagaaaagattgaaagcaaatcacaacagtggcatgatcgttcaggacatcacaaaagttgtcaaagacctaagctacagaaaagattgaaagcaaatcacaactagtttcgcttcgctgccattcgcgctgctgttgtcaaagacctaagctacagaaaagattgaaagcaaatcacaacaacagaacgctatacgacatgatagcgtctgttgtcaaagacctaagctacagaaaagattgaaagcaaatcacaactgcagcgattgctaacgcattgttgtaccggttgtcaaagacctaagctacagaaaagattgaaagcaaatcacaactacttcgagccactcaagagatgcggcgatgttgtcaaagacctaagctacagaaaagattgaaagcaaatcacaacatgcctgaaccaacacagacacgcgaggcagttgtcaaagacctaagctacagaaaagattgaaagcaaatcacaacggcaactcacatactagtggtaaagataggttgtcaaagacctaagctacagaaaagattgaaagcaaatcacaactacattcacaacggcactacacaacagacggttgtcaaagacctaagctacagaaaagattgaaagcaaatcacaacgtgcggtgggttgttttctgttcaaatgaagttgtcaaagacctaagctacagaaaagattgaaagcaaatcacaacaacccatcaggaagtgaggtaacgcttctggttgtcaaagacctaagctacagaaaagattgaaagcaaatcacaactgtatgcgcaggataagctagctgatgaaagttgtcaaagacctaagctacagaaaagattgaaagcaaatcacaactaagttgaggctattaaggaagcgtgatttgttgtcaaagacctaagctacagaaaagattgaaagcaaatcacaactccttcaacataaaaaatcgtagttgcgctgttgtcaaagacctaagctacagaaaagattgaaagcaaatcacaactgtaccactaatgttaaattgaaaaacaaagttgtcaaagacctaagctacagaaaagattgaaagcaaatcacaactgtcatcaaggcggaaagcatgagcatagcgttgtcaaagacctaagctacagaaaagattgaaagcaaatcacaactacggaggatgaggcaaaggcgttcgacatgttgtcaaagacctaagctacagaaaagattgaaagcaaatcacaacccttcttcagacccatctcctgatgcagaagttgtcaaagacctaagctacagaaaagattgaaagcaaatcacaactaccagatgccgtttactgttccggcgaacgttgtcaaagacctaagctacagaaaagattgaaagcaaatcacaactggatggtaaacttccgcttaccgaccttagttgtcaaagacctaagctacagaaaagattgaaagcaaatcacaacttcattggcaggaacgacagatccagaaacgttgtcaaagacctaagctacagaaaagattgaaagcaaatcacaactcttctttgcctctttcacacgggcaataagttgtcaaagacctaagctacagaaaagattgaaagcaaatcacaacttcgggtcagggcgtatgtaaacggagtgagttgtcaaagacctaagctacagaaaagattgaaagcaaatcacaacctgatatgtttttttaatggtttaaccgcagttgtcaaagacctaagctacagaaaagattgaaagcaaatcacaacaggggcatccaccactccacctcccataaagttgtcaaagacctaagctacagaaaagattgaaagcaaatcacaaccgtaggttgtggtttctgttttcagattggttgtcaaagacctaagctacagaaaagattgaaagcaaatcacaacctgaaagcctgaaactttacagagttattggttgtcaaagacctaagctacagaaaagattgaaagcaaatcacaacaatctcctgttcatacaattatcgaaagggttgtcaaagacctaagctacagaaaagattgaaagcaaatcacaaccattatccaatgatcaggcattaccgaatagttgtcaaagacctaagctacagaaaagattgaaagcaaatcacaacagtaaagatgctgcaccgttcccctctatggttgtcaaagacctaagctacagaaaagattgaaagcaaatcacaactaatttttaacaacataaataacaacaaaagttgtcaaagacctaagctacagaaaagattgaaagcaaatcacaacatctacctttcaaactgtggccatgtacagttgtcaaagacctaagctacagaaaagattgaaagcaaatcacaactaccctgtatttgcatatataatctacattgttgtcaaagacctaagctacagaaaagattgaaagcaaatcacaactatggcacagtggaaaggtcaagttattggttgtcaaagacctaagctacagaaaagattgaaagcaaatcacaacttcgtttttgaaaaggacgtcgatcgtgctgttgtcaaagacctaagctacagaaaagattgaaagcaaatcacaacgtttaatgactcaatatcattttcaatctgttgtcaaagacctaagctacagaaaagattgaaagcaaatcacaacagctcaaacatgatcaaactgtttgccgagttgtcaaagacctaagctacagaaaagattgaaagcaaatcacaaccacgcagcaggtttacaaagagcgcatcgagttgtcaaagacctaagctacagaaaagattgaaagcaaatcacaacccggcagtatacgtgccttcacttgcgccggttgtcaaagacctaagctacagaaaagattgaaagcaaatcacaacgtcttctatgctcgttctgtagcggatcacgttgtcaaagacctaagctacagaaaagattgaaagcaaatcacaacggttgctgagttatatgtaactccattatagttgtcaaagacctaagctacagaaaagattgaaagcaaatcacaaccaccctggcacaatacaatcaatcaaacctgttgtcaaagacctaagctacagaaaagattgaaagcaaatcacaactcatcaaccgttagtaccgtaggaggtccggttgtcaaagacctaagctacagaaaagattgaaagcaaatcacaacacaatagcataactatggcatcgaaacattgttgtcaaagacctaagctacagaaaagattgaaagcaaatcacaacaaaatatccaatatcataaattcttgtaaagttgtcaaagacctaagctacagaaaagattgaaagcaaatcacaacttattgccaatacggtgacgtaattaggagttgtcaaagacctaagctacagaaaagattgaaagcaaatcacaacaagcagcgtaaaggaatggtcgccacacttgttgtcaaagacctaagctacagaaaagattgaaagcaaatcacaacgttaagagagacgcggttatttgggaagatgttgtcaaagacctaagctacagaaaagattgaaagcaaatcacaacggaactgaaagaaatatggagaatgacgatgttgtcaaagacctaagctacagaaaagattgaaagcaaatcacaacaatcaatgggtacatcaccattgagtagagttgtcaaagacctaagctacagaaaagattgaaagcaaatcacaactactacggcggtgttgatacacattaaagagttgtcaaagacctaagctacagaaaagattgaaagcaaatcacaacaccactacaaaacggagatactaccgaaagttgtcaaagacctaagctacagaaaagattgaaagcaaatcacaaccgtcaaaccaagattgagcgcatcattgtagttgtcaaagacctaagctacagaaaagattgaaagcaaatcacaacattgttcctgtttgtactgcttccatttctgttgtcaaagacctaagctacagaaaagattgaaagcaaatcacaacatgtccagcttcatgcagcgatattacgctgttgtcaaagacctaagctacagaaaagattgaaagcaaatcacaactcaatgtgtttaggcgaaatgaaaaaacttgttgtcaaagacctaagctacagaaaagattgaaagcaaatcacaacgggaaagggctattggttcgggtgtgcaaagttgtcaaagacctaagctacagaaaagattgaaagcaaatcacaacatggttaatgaattgggcaaggaacgggcggttgtcaaagacctaagctacagaaaagattgaaagcaaatcacaactgtcatagaccagagggggaaaacgtttacgttgtcaaagacctaagctacagaaaagattgaaagcaaatcacaaccgcagtaagttcagcaccatacccttcggagttgtcaaagacctaagctacagaaaagattgaaagcaaatcacaactatcaacgacttcgatagcgcatatctgtagttgtcaaagacctaagctacagaaaagattgaaagcaaatcacaacgtagaatgtatctactctggtaggacgtgggttgtcaaagacctaagctacagaaaagattgaaagcaaatcacaacgtcgaagaattcagtaaccgcctttgtgggttgtcaaagacctaagctacagaaaagattgaaagcaaatcacaacgtcttgctcttgcgttgtcgtaagaattgagttgtcaaagacctaagctacagaaaagattgaaagcaaatcacaacgcggctgcatacgttcagcctgctaaatagttgtcaaagacctaagctacagaaaagattgaaagcaaatcacaacgaggaaggcgaaaacatcattatccctattgttgtcaaagacctaagctacagaaaagattgaaagcaaatcacaacggtacttcattttaccgatggaacacgattgttgtcaaagacctaagctacagaaaagattgaaagcaaatcacaacctaaggcgaatgggtagttcactagaatacgttgtcaaagacctaagctacagaaaagattgaaagcaaatcacaactcaataccgaagggtattaccgttttgtaagttgtcaaagacctaagctacagaaaagattgaaagcaaatcacaaccacaattgtttcatcgctgttaaggctatagttgtcaaagacctaagctacagaaaagattgaaagcaaatcacaacggctgaatgtaaatcaactcacccagcttggttgtcaaagacctaagctacagaaaagattgaaagcaaatcacaaccagcggatatgactattgtttccctttcgtgttgtcaaagacctaagctacagaaaagattgaaagcaaatcacaacttatagaaggtgagacggctggtgaatacgttgtcaaagacctaagctacagaaaagattgaaagcaaatcacaacttccaaccaaataaagtccgcctgttaattgttgtcaaagacctaagctacagaaaagattgaaagcaaatcacaactaaaggataaaatcaaggtaagcgaggaatgttgtcaaagacctaagctacagaaaagattgaaagcaaatcacaacgctgctggtattgcttattctgaaccaactgttgtcaaagacctaagctacagaaaagattgaaagcaaatcacaacaaatgcagatgttggcactaaaattagtacgttgtcaaagacctaagctacagaaaagattgaaagcaaatcacaactg

SEQ ID NO: 2597 - DNA, 20346 bp, synthetic construct
  misc_feature 1..20346: note = Synthetic
  source 1..20346: mol_type = other DNA
gttattgatattgtaaaggcctatgcctgttcttttttgtttaggatcgaacccgttgccattatcttctattgtgatatacagattttcagcagtatcgcttaatgtaatggttactacagatgcattggcatgctttaaaatattattcgtctgttcctgtataatgcggtagatattcagtttaaggtcatcttcgataatagggttttgtaaattgtagtgtaccgtagtttgtatagaggagctactatttaatttatcaactaatgaggcgatgagttccttaaggtcgatacccttgataggcgtaacctggcttttgcttaaagaccgcatttcttcaatagcactatccagcaattcacgggaagttttgattaagccctttgctgcaaattcatctttggatgcaaggcctaaaaagagttttgtgccggctaaaatttgtgtgatattatcatgtaattcctgccctatacggttccgttctttttcttctgcagttaacatagcacgggcaatttttttctgctcctgtattttttggtccagtacctgctgttgcagtaatttgttttcggtaatatccattatagtaccgataatagccggcttttcttcatacattgtttcgctgccaaatacttccatttgaataatatcgccgttttttttcagcccctttgcttcataatgaatgctgtctatttgtttctcaatacgcaggcggatatattctcttactctttccctgtcgtcggaatgcactactacatctaccgcataagaattgattaactcttcctgttcataaccaaacattttggcaaattcaggatttacataggcatatttaccctccttaataatataaacgcctaccaatgatttttcaacaagcgtcctgaatttttcttcagcttctttaatgccctgttcagctttttttctattggtaatatcgtggatgaaagattggtaatagccatccggtagtttttttacatttacttcagcagggaatatagaaccgtcttttcttcttagtatccgttcattgcgtactgttctataatcatctaaaactttaaaattcaaaggatgtgttttaagcgcttcaggatccagtatgtcttcgaggctaagcaacaaaaattcttcccttgtataaccaaacatttcgcaggcacttgagtttatttcttcaaagcctcttttttcattgattaaagtaatagcatctgcagcctgttcaaaaagcagcctgtatttgcttttgctttctttaatttcttttgctgcctgttggtctattattttatttttttcttccagttctttaatcagcagttcgtttttctgttcatggtcttctaccagcgttttcataataatgcaacaaccatttaaaatgaaataggcaataaataaccgcattcggatgatgaccatctcattaggaagcccggtgttatataacgggcctaaaccaaatacatgcattatacgatcgcaaaaaaactcaatacatatctctaaatacttatcaataactatcttagcctgcaaataaaccagggttttaataaaatatacatgaaacaaatccccaacctctttacactgctgaatctttttttaggttgtgttgctatcgtatttgcattgcaaacacaaagtttttatttctacatgaatgaagattacagcagcaactttaatattcccgaaaatctttctgttgccggtcttctcttattcggtgcagccgtagttgatttcctggatggctttgtagcaagattattcaatgcaagttccgaaatgggcaagcaattggattcccttgccgatgcagtaagttttggcgctgctcccggcgtaatattatatcagttattgcgcatcagttatatgcgggaagaaaatgggttgtctgtatccatggcattgttgctaccggcttttattgttagttgtgcggcagcatacaggcttgcaaaattcaatctcgatgattcgcaaaaatattcttttaaaggagtacccacacctgcagttggtttatttgtggcttcattgccacttgtattgcattttggcggaggctatttagacatcaatggcttcattagcaatatctgggtattgtacggaataatactggttacaagctggctaatggtaagcaacctgccggtaatggcattcaagtttaaaaatttttctattcaaaacagcctgccgcagataatattactggctatcgggcttattgcagctattttattgcactggctggcagttccggtaattttcattgcctacattattttatctttgctttttaaaaataaaacaacaccatgaccttcactgcacaggtaaaagtaatgccactaaaagaattgttagatccacaaggaaaagccgtaaaaggtggtttagataatttaggattaaacagcatacaagacgtccgcatcgggaaaaatatagtactgcaaatagaagcagccgacgccaacagcgccaaacaaatcgctgaagaagcagctaaaaaactattggccaatcaggtaatggaaatgtttgaagtaacggttagttaagtattaagtaataagtagtaggtattaagttatacgtagtattaaatacataatacaattttgttaccggcattcgattttcatggcatcatcgttgcgtagcactcttgtacggcatacctttattcaacttttatcgaagcgtagtattgtctgaatcctgatttcacgattaaaggattgtcaggattagctaagaacgaagcggagaacaacttgaatattgaacattgagcattgaatattgaacatttgtatttagttcagaacctacttcctcaatactttataattccaaccactaaattgaagcatgaaattatacatcgtaccatcccccataggcaatctcgctgatatcactttcagggcggtagatgtattaaagactgtggatttaatattggcagaagatacacgtacttcttccgttttattgcagcactatcaaattcaaaagccggtaacgccttatcaccagcataacgaacataaagtgctggcgcatttggtagagcaattacaaggcggcaaaacaatggccctgcttacagatgcaggcacaccgggcattagcgacccggcttttttattagtacgggaatgtattaaaaacagtgtgccagtagaatgtttaccaggcgccacagcctttgtaccggcattggtaaatagcggactacctataaataatttttgcttcgaaggttttcctccccttaaaaaaggcaggcaaacatttttaaaaaaattagcggaagaagagcgcaccatggtattttacgaaagccccatgcgcttagtaaaaaccttaaatgattttatagaatattttggtgccgaaagacaatgctgcgtaagccgtgaactaacaaaaaaatttgaagaaaataaaacaggtacactaaaagaagtacacgactacttcaacagcaaacctgtaaaaggcgaaatcgtaattactgttcaaggaaaataaaagctgcttgctcctgtaactcctctccttcagaagaggggcaggggtgaggtaaaataaaagaacatgaaaaaattattcctcctctctctcctattcatcagttataacacattactagcccaacccgaccgttggcaacaacgtgtaaaatacaccatgaatataaacatggatgttataaccaataaattcaccggcaagcagcggctggaatattccaataactctcccgataagttagataaagtattttatcatttatactggaatgcctttcagcccaacagcagcatggatgtacgaagccgtgaagcaggcaagattatgattaacccgaacagtccaaacaaacaccttgattgggataaccgtgtacgtgaccgcatactgaatttaaaaccggatgaaattggttacgaaaaaatcatttccttaaaaatgaatgggataccacaaccattcaaataccatgaaactattttagaagtagatcttacacaaccgattttgccaaaaacaaaagttgtatttgaaatggaatttgaaaaccaggttcccttgcaaatcagaagaagcggccgtgataaccctacaaccggcgtgcgttacagcatgagccaatggtatccaaaactatgcgaatacgattatgaaggctggcacccaactccctatgtagccagagaattctatggcgtatggggcgactatgatgtaaccatcaacatcgacaaaacatataaactgggaggaacaggcgtactaaccaatgcggctgaaattggctggggatacgatacgccgggttctgagctaaaggtaacggcaaaggataaacgcagttggcattttgtgggcaataatatacatgattttgtatgggctgcggatccggattatatacaccttgtacgcaaaatgccaaatggcgggcctgttataaatgtgctttataaatacaaacccaataatcacccgaatgattcttcgtgggaagcgttagccaatgcttctgttgttatattgccatttatggaaaaacattttggagcttatccttacccccaatattcctttatacaaggcggcgatggcggcatggaatatccaatggcaacattattatcaggccccggcattgagggcaatgcaattcatgaatggatgcatagctggtaccaaatgatgctgggcaccaatgaaggtatgtatgcatggatggatgaaggctttacaagctatgccgaaaatttagtttccaaattcttcgacgggcactcttcgttggaaagctatcgccagatgctgaaagaagacccggataataaacagttaaaagatttaatcaacatggttcctgaagaccattgtgatgcgtatgctgcttactttcaattagtaaaaagcggtttggaagaaccattaacaacacatgccgaccactttaataccaattatgcttataccattgcatcgtattgcaaaggagaaatattcctggaacaattaggatatatagttggtgcagatgttcgggataaaatattgttggagtattatcaccaatggcgttttaaacaccctaatgctgccgacttttttagggtagccgaaacagttagtgatgtaaagctggattggtataaagaatactggtgcagcactaccaaaacaattaactatggtatcgacagtttatgggaagaagatggagtaactaaaatacgcttaaagaatatgggcaaaatgccgatgcctattgacttacaattaactttcaaagatggcagcaccgaaatgcattatatccctttaaacctgatgtttggagaaaaaccaaatgaaaatgcaggacaaacaaggattgtgcatgatgaatggagatggacacaccctacgtatgtagttgaaataaaacatagcttgcgggatgtaacaaaagtagaaatagacccttctaaacgaatggcagatattgaccggaagaataatgtgctcgagttgaagtggtagtagagttctataattttattaaacgcattttgcaaaacgcaaaatgcgtttttgtttattgcaaaacctgtgctgtgtttttccgtaagactggcggaaattagttattaatattaattacatttattatattgtgttatactaatccttcgatcctattctgataaaatctttctcgtagcatttcgcatgttgatataaataaaaagtcccaccgaagcaggaccaagaaaatcttcggcttatagccttattgtgatttgcaagacaaacttaatataaaaaaccagaatactaaccatatgaataaaatttttgcgctcgaccttggaacaaattcaattggctgggctttacgaaacccggaccttaccgaaaatcaaattgaaaaagttggcgtactaacctttaataaaggtgtgggcttagggaaaacaggcgaatattcctatgcagctgaaaggacaaaaaaacgttcaacccgtagattataccaatcaaggaaatacagattatgggctacgctagaaaacttaataacagaaggatattgtcctttaagtatggaggatttaaataaatggcgacattataacaaacaggaagcattgaaaaataataatgcaggcaggatttaccctgtaagcaatttagcttttgatgcttggataaaattagattttaataatgacggaaagcctgaatatacaagtccatatcaattgcgaaaagaattggcagaaacaaaacttgactttactaaagaagaaaataggtttaaattaggcagggctttgtaccatattgcccaacgcagaggctttaaaagcagtcgtaaaggggcagatgatataaaggaaaaagaaacggatgataatgaagtagtggatttgcagtattcagaaaaaaagaaaaacaaggttattacagagcttttcgaaaaatatcctgatgcaaaaacaatcggtcatttacttgctttattagaaaccgataaggtaagggtaagagaaagcattgctcaatatgccatcagagaaaattataaggacgaaattaaatatatcttccactttcaaaatctaggtttcgaacacctgctttttaaaaagctagtagaaactgggaaaaataaaaacgatggcagcattttttataaacgccctttgcgttcacaaaaaggattaattgggaaatgcaccttagaacctaataaatatagagccccaataagccatcctgcttttgaaaatttcagagcatggtcatttttaaataacattaaatacaaacctataaatgataaaaatgcttattggcagccattaccgttaagcttaaaacaaagtatttataatgataaatttttcagaaaatcgaaaggatattttccattctcagaaattagtgatttcataaaatctaaaggaaacaattgggaactgaattataaacccaaaactaccgttacaggttgtcccgtatctgcaaggcttaaagatatttttggcgatgattatttgcaaatacaaatagcaaaagaaaaagctccaaagtcagacaaagcttactacgacattgaagatatatggcatgtactttttagttacgaagaccaggaatttgtatctgcatttgctacagaaaatcttaaactgaatgaagcacaaaccaaacaatttgtaattgcatggaatgctttaccagttggatatggcatgttaagtataaatgcgattaataaaataaatatatttttagagaaggggcttatttataccgaagctgttttattagccaatattccgcatataattggaaaagaattatggcacagcaatgaacagttctttttagaaaacatcagcaatttgattgatgaaaacagaaggcagaaaacaattttaaatattgtaaacaatctcgtttcacaacataaaagtcttgaacaaaaatttggattcaaagacggtgcttatcttctagacgattcagacaaaaaagatatacaaatcgccattgaagaagcctttggaataaaaaaatggcaggaaaaagagcatatcgaaaaggaacaaataataagtattgttacagattgctatcaggcttattttaaaacatcgggctttacaagaaaagatataaatggcgaaaggcattttgaaataaaatcgggcaagcatttttattataaaactgattcggggtattatcgtttacccaaattgattgatacattagcagagtttctgcaattgcgttttgaagtaacagataagcaactacaaagtatctatcacccttccgaaataaatatttacccgcctgcaaaaccagataaggatggcgttttaaaattgggcagtcccaaaacaggttcatttaagaatccaatggcgatgcgtacgctgcatgaattgcgcaaattgatgaactatatgattgaaactaatcaaatagatagtgatacacgaattgtagtagaagttgcaagagaattaaacgatgcaaacaagcgttgggcaattgaagcatggcaaaggcaacgtgaagcagaaaatcaggaatttgcattggcaattgagcagttaataaatgttactccgggaataactgctaacaataataatgaacaagacattgacaaaatgcggctttggtatgaattaaatgaagaagaaactgtaccgcctattactgatactaaaaaagatatcaaaggaataaaatggtctgaaaatgtaaaagtctcttataaacaaattgcttctcaaaaatctttgatagacaagtataggctatggaaagaacaggaatgccagtgtatatatactggtaaaacaattaacatcaccgacctttttaatgaaaatgttattgacttcgaacatacattgccaagaagcaaatcgttcgacaattctttagcaaaccttactgtttgctatgccgatttcaaccgtactgtaaaaaagaaccaaataccttttacactgaataattacgctgaaatacttacacgtattgaaaaatggaaagaaaaagtagaacgtatcaagcaacaaattgatttttggaaaacaaaatccaaaaaagcatccgacaagcaatggaaagacgatgctattcgtcaacgccatttgtggcaaatggaattggagtattggaaaaataaagttgaccgttttactatagaagaaataacaagtgggtttaagaatagccaaaaagtagatacgcaattaatatcgaagtacgcattacactatctaaaaacctactttgaaaaagtagatgtacagaaaggaagcataacagcagagtttagaaaaatatataagctacaagtagctgatgaaaaaaaagacagaagcaaacactcacatcatgcaaaagatgcggcagttttaacactaattcccatagcggctaaacgtgatgccattttggaaaaatattatgaaagcaaagaaaataaaacacccttcactgatacagaaccatacaaaggatttaaacgtgaatttgtttggggcattgatgataccgtattaataaataatattagcaacggacaagcattaaccccagccaagaaaaaaataagaaaacgaggaaaagagcaattaattgaaggaactaataaacctaaatgggctactggcgatagcataagagggcaattacatcaggaaacattttatggtgcaattaaacctgcaaaacgagatgaaaaaggaatactcctgaagaatgaagaaggggaatttattcaggaagataaaataaaatatgttgtacgagttccttttcaatataaaaaagatgcgaatactccgggatttaaaacttttgaagaaatagaaaaacaaatagttgataatggactaaaagcacaaataaaaaaacaaatagataaagcaggcaacctgaaagacgcttttgataaaggcatttatttgctcgataagaacggcaatccgcatggcaataaaataagacatatacgggtttgggcaaacgtttctgagccgcttaaaattaagacacagacaaatctatcaaagcatgaatataaaaatcattattgggctgccaatggcgaaaatattatttgtgcatattataaaaatgattcagtagataaatcagggaaattaaaaaagaaccgtgacttggaaatcattaatcttaatcatgctgcaaaactaaaatcatttggattggttaataatgtcggcgaattagaaatttacagaaaagataaaaacaatgaggtagttgttgataataatggcaacaaagaagttccttacgctttttttaaaactggtcttaaagttattttttacaattcaaatttagatgagcttaagcaaaaaaataatgaagatatcgtcgcatatacaaagagaatttcagaccgcacttataaaattgtaaaatttgccggtgggcaagttacctttttacatcatttagatgcaagagacgagaagcaacatatggaagttttcgctgaaacagcattctttaaaaaagatgaaaaaggaaaagatctaacatacggaaaaagaggtaaaaatgggtttacagaacaaattgatgattacttaattcataataatggaaagccttggcataaactattatatacaaaagattggctagacattgcgattgaaggcaaagattttaaggtacgtattgatggaactataacatggaaataatatgattaaacgtaccctatactttggcaatcctgcttatcttaaaacaaaagatgagcaattggtttttgaaagccctgaaactggtgatttaaaaacattgcccattgaagatataggagtattaattttagaccaccagcaaataaccatcagtcaagcattaatagcaaagctattagctaataatgtagcttttataacctgcgataacacacatcatcctacaggtttattattgaatcttgatggcaatactttgcagagtgccaaatttcaagcacaaatagatgctactgttccattgaaaaaacaattgtggcagcaaacggttagttgtaaaataaataatcaggcaactttattagagaactgcagagtgcctgtaaagaatatgcgtaattggtctgcagaagtaaaaagcggcgatagcgataatcatgaagcacaggctgctgtatattattggaaaaacctgtttcagctttttccggattttaaacgggaacgggatggattacctcctaacaatttattgaattacggatacgctattttaagagccattgtggcaagaaatattgtagcatcgggcatgttacccactttaggcatttttcataaaaaccaatacaatgcctattgccttgcagatgatattatggaaccctatcgtccttatgtagatagcgtagttttaaatattgtgaacctaaatgggaatttcttagcgctaacaccaaacatgaaaaaagaattactgaatattccggcaatggacgtaataattaatgacgaaaaaagcccattaatggtggctgtacagaaaactaccgcatcactggcaaaatgctttgaaggaaaacaacgaaaaatactttatccggaattgatataataaaactggttccggcaaaaaaggcatgaataaccgcttaaatgcatatcgtattatgtgggtattagtattttttgacctgccaaccgaaactccaaaggagcggaaaattgctgcactattccgaaaaaacattttaaaagatggattccaaatgtttcaattctccatttatctacgccattgcagcagtcgggaaaacgcagaagttcatataaaaagggtaaaaacaatacttcccgaaaaaggacatattgggataatgtgtatcacagataagcaatttggcatgatggaaatttttcatggtcacaaaacagtatcagcaaacgctcctgtacagcagttagaaatgttctaattactaaaaacaggattaaaaaattgagctaaatatcaattttttaatcctgcaaatcaacttaaaatcaataccaacaaggattttatacaatcatgttgtgtaagaactaagttaactaaaagtttgaaagcaaatcacaacacgttaacagctaagtatgtaatacctgtgttgtgtaagaactaagttaactaaaagtttgaaagcaaatcacaacaagacattaattcatccggtcaaagggtgaagttgtgtaagaactaagttaactaaaagtttgaaagcaaatcacaacataaaatcatatgtatgggataattcagcgttgtgtaagaactaagttaactaaaagtttgaaagcaaatcacaacttttattatttatacatatttttacataaagttgtgtaagaactaagttaactaaaagtttgaaagcaaatcacaactacactcttttgaggcaaacgatagctgggttgtgtaagaactaagttaactaaaagtttgaaagcaaatcacaacagttatcggcttttcgtgatttcacacaatgttgtgtaagaactaagttaactaaaagtttgaaagcaaatcacaacgaacggttatgttttgcgcccaaacgctcagttgtgtaagaactaagttaactaaaagtttgaaagcaaatcacaactattcgttacctataacaaacatgtcaggttgtgtaagaactaagttaactaaaagtttgaaagcaaatcacaactactcgcttttcatagttgaaaacatttcagttgtgtaagaactaagttaactaaaagtttgaaagcaaatcacaacaataggcaaattgacattatcaattaaatcgttgtgtaagaactaagttaactaaaagtttgaaagcaaatcacaacatcagtcaactacagcaatggtactggcggttgtgtaagaactaagttaactaaaagtttgaaagcaaatcacaactagttgtgcctgacaaagtaatagtagccagttgtgtaagaactaagttaactaaaagtttgaaagcaaatcacaactggttttagataatagtaggaacattatcagttgtgtaagaactaagttaactaaaagtttgaaagcaaatcacaacgaattgcagtaaaacaattaaggcaagaaggttgtgtaagaactaagttaactaaaagtttgaaagcaaatcacaactcgcagtactacagcgagataagcgaaggtgttgtgtaagaactaagttaactaaaagtttgaaagcaaatcacaacgatattggattagagccgcctatccgcattgttgtgtaagaactaagttaactaaaagtttgaaagcaaatcacaactatgttcagcctccttcggcacttcaattagttgtgtaagaactaagttaactaaaagtttgaaagcaaatcacaactaaaagcgtatgcagccagccctgagggggttgtgtaagaactaagttaactaaaagtttgaaagcaaatcacaactaggcaacaccattgaaggtgaattttttgttgtgtaagaactaagttaactaaaagtttgaaagcaaatcacaacccgttcagggctccaaacggcgacatggtcgttgtgtaagaactaagttaactaaaagtttgaaagcaaatcacaacatcacggcgccacttttaaaaccaatggccgttgtgtaagaactaagttaactaaaagtttgaaagcaaatcacaacgtaaacccatctgcgaaaaacgcattgggcgttgtgtaagaactaagttaactaaaagtttgaaagcaaatcacaacgaatggagagacatatgtgccggctacttagttgtgtaagaactaagttaactaaaagtttgaaagcaaatcacaactgtttttatatctttttacaacatacccgagttgtgtaagaactaagttaactaaaagtttgaaagcaaatcacaactatactaatgcgttgtccaaattttacaatgttgtgtaagaactaagttaactaaaagtttgaaagcaaatcacaacttgcctcctgccatttgtgaagttattgaagttgtgtaagaactaagttaactaaaagtttgaaagcaaatcacaaccacaaactctttccgtaaatcacaattgatgttgtgtaagaactaagttaactaaaagtttgaaagcaaatcacaactgagtatcggttatcctgacacaaaccagcgttgtgtaagaactaagttaactaaaagtttgaaagcaaatcacaaaaacgctaaacatcttaattttgtattctatgcatgtaacaatcaaaaaaatacatccgtctgaagcggaacttctatctgtacttgccaaacaaactttctatgatacgtttgtgggtacttgtaccgaagaagatatggatagttttttggaagaatattttaatgttccgcaattaaaaaaggaactggaagatacagatagctttaactattttgccattgtagataatcgacctgcaggttatattcgttttaaagaggattatgacagcctggaatacatgaaaaaatggaaggcactcgaattaaaacgcctctatgtttcaaaagaatttcatggcaagggaattgcacaattattgatgaatacttatcttgattatgccatacaacataaatacgaggcagtatggcttggcgtttgggagttcaactttaaagcacaaaaattttacagcaaatacggatttgaatattcaggatttgaacaccctttccctgttggcaatacgccacaaacagatcgttggtattggaaatttttaacgtaaaaaaactattataaaatccttctattatttcttccctcctcctgcataaacacctaaacttattccgaaataattgttttggtaattgttggtcatactaacaggtgtaccattttctgtatcagtataggatacatgttttgttggcacaaaattatattccatgcaaaggcggaaatgttgtgcttcaaaaccagcccttaataaacagccgattttattggaactactgattatactcgacatagctactgtaggcccgggactacagccacttccacttagttgggcataataatatcctataccagtaccaacatacgggcgaagtttatattcattcgacaagtaataatcagccgcaagcatttcactatttatttgtgtcatgcttccaaaagtttgttcaagcctcaaaccaacagaaagattatcacgtatggcaaatgagggttcgccggatatcattactccggaattatccgatcctgaagcagcgccaaaaccaagattcactttaactaatctataagtttgtgcattacccgaacaattacatccaattacgattattaagacaaggattatctttttcataaacagcaattacaagtgaagaaaatagagaggtccgaaaaatgctataaatagctatagatagactataattctaagattttagctgccgcctggcaaaaggtttatattgattattattggttaaatcaagctgcttattggcttacatgcagcatatacttctctttaaagaaaggctcttcaaatattttttctatttcccaagccctgggcttgcagcggctatcggatatttcctgggttaagtctccaccttttaagcaaattaggccactgccttttatcttttctttttttaataaaggcttgctccaaaaccataaatctttcaaaggtgctacagcccttgacacaactgtatcaaatttgcggtcttttatatcttctactcttgtatgttgtgttgttacattttttaatccgatagctgcagctacctcgcttgccacggttaattttttacggatactatccaccagatgaaaactggtttcaggaaaaataattgctaaaggtattgatgggaagccgccaccacagcccaaatcaacaatggatgaaccgggtgcaaaatcaaactgcgtagctattgtgagggagtgcaatacatggtgctcataaaaattatcaatatcctttcttgatatcacattaattttttcattccattccgtatataaatgtttcaaagctgcaagttgtttcaactgcccttccgaaaaatcatcaaagtatttaagtactatctccataaaaataaaagtgcttcaaattaaaaagctcgtggaaagtcctttttaggggatttaggggcgggggcttacttccacgaatgcttcggcttccgcacaagcgccgtcgcaaatatcaaataataaaaaaacatccagatatcaaaaaacaagaaccatggatataaatcctgttcatctaattttttcatacaaggatataaaacaaatgcctgcaccaaaaaacgaataccaaaaacaatcaatgctgcctgccagcaaaaaaacaataagcttgcagccagcaagggataaaaaagaaaatgtgataatgaatatacgcccaataaaaatttatgcaacggcttataaaatttaccggtgctgtaatgacgtgtcttttgcgctacccattgtccccaggtttttacgggattgcttaatgtaaaagcttctttgtcgatattaatttttgtattggtttttgtagaagccatattaataaacaaatcatcatcgccactggcaatatgattatgtgccgaaaaccctttgtggcggtagaagatagttttcttataacttaaatttcttcccacgcccatgtaaggtttacctgctaatgcataacttaaatattgcatggctgtatgaaaagtttcccatcgaaccagtttatttaaaatccctttctttttataataagcgccatagcctaatacaatctctgtattatcatcgtatgtctcctgcattttttcaatccagaattcgctggcaggcacacaatcagcatctgttagtaatacgatttcgtacttcgatgttttaataccaatacttaaaggaaatttttttccgggaatcaattttgcttcctgtgttagttcaatcacttttagctgcttgaattctttttcaaattcttccagtaaatatttactatcatcaaaggagttatcgtttactacaattacttcgtgagtggtacgatattgctgtaccaatgctcccggcagatttttcgctaaatttgccgcttcatcacgggcacagataattacagataccggatgcgtttgtgaaaccgtttttgtgttgggcttataaaaagccaaccgcaggtacaaaaagaaataatacaaaagctggattaatgtaacaaggcaaaaaacaataaaaagaatcagccgccagtaaggtaaatacaaatgcatcattcggcaaaaatagaggtaaataaacagactactaaaaacaggatttaatttttatggcagcactgcaatttaatttagagcataccgataataattcgaaggcaagagccggaaaaataacaaccgaccatggaacaatagaaacacccatttttatgccggtaggcactgtgggaagcgttaaaaccgttacccagcagcaattagcgcaggatgtaaaagcacagattattttaggcaacacctatcatttatacctgcgcccgggattagaagtattagaagcagcgggtggtttacataaatttaatggttgggataaaccgatattgacagatagcggcggctaccaggttttttcgctggctaataatcgaaagataaaagaagaaggcgtagtattccaatcacatattgatggcagcaaacatttgtttacacccgaaaatgtaatggatatacaacgtgtaatcggcggcgatatcattatggcttttgacgagtgcccaccctaccccagtgattacggttatgcacgaaaaagcatggagcttacgcatcgctggttagacagatgttttgaacgttttaataatacacctgacaagtacggctatacgcagaatttatttccgataatacagggaagcacttataaagatttaaggacggcttcttcggaattcattgcattgaaaaatgcaacgggcaatgctattggcggattaagcgtaggcgaaccaatggaaatgatgtatgaatttacggaactctgttgcgatatcttacctacacaaaagccacgttacttaatgggcgtaggaactccctggaatatattggaaggcattgcactgggcattgatatgtttgattgtgtaatgcctacacgcaatgggcgtaatgcaatgctctttaccaccaaaggcattatcaatatcgacaataaaagatgggaaaaagatttttcagtaattgatgatggtattgattgcgaagtaagcaattattacagcaaggcatacctgcgccatttaataaaagcaaaagaaatgctggggcttaccattgccagtatccataaccttgccttttatttatggttggtaaaagaagcccgcaaacatattattgccggcgattttgtaagctggaaaaacgaaatggtagtacagcttcaacaacggctatagcacatatataaagaacatatttgcaattttaaacttctttcgttggctaaggtcttgaatgggttgttcaattttatcttataaataattttaaggatggcataataattgaaaacgaacaatacttatctttaatatttatctttaaaaaatatcaacaaagtcattatgaaaaagaagtttttatattctctcttcacgttttgtttgcctttatttgttgctgcgcaaacaccgaatgtgccaaaagatgcaagggtagatgttacggttgctgatatgtcgggcaatatgttagcaagcgaaattgttgtattcagaagctctgcaaacggcaccgaatttcaggggctatcagactctacaggcagatttactttacacctgccaagtggttccaaatatgaaatttacatccttggtttccatgattctaccagttatgctactttggatataccggcattaaaaccaggccagttttataaagaaggttctgcttttaaggaagatatccagtttcagcctgccaaatcttttgtactggacaactgtaattttgaaaccggaaaagcaaacctggaacccgaagcttataaagcactggatgatttggtggattatatgaatcggaaagacgatgaaaaaatagaaattggcggacataccgataatgttggttctgctgccaacaaccttaaattatcgcaggacagagctaatactgtaagagcttatcttttaaccaaaggcatttcacccgaccgtgtaactgcaaaaggttatggtgctacggtaccggttgccgacaataaaactgccgaaggcagagctactaacagaagaacggaagtaacggtactttaatagttgcacaattgattcctgattatcaggcgcactcttcgtaaaatcgctggcaaagacagaattttacgaagagtgttttttttagttaagggactgccaataaatgaaagaccggtttgcaacccggcattatcatttatccattaaacaattatccgttaatttcgctgctcatcgcatcatgaagaaaatcgacagctacatacttaagaaatttttaaacacatttttcttttgcctgctattatttacggctattgtagtagtggttgatatcagtgaaaaagcggatgattttgcccgtatcaaattatctgcctggcaaattgtaatgcaatattatattggctttgtgccgcatattgatgcaatgctgcttccattatttgtatttatctcggttattttttttacttccaaaatggcagaacgttccgaaacaattgctattttaagtacgggagttagtttccgcaggtttttatatccgtattggttaggtagtatttttctggctgtactgctttggtttggataccaatatggtttgccaagagccaatgaaatatggggaaccttccaaaccgaatatattgataataacaacggacctgataacagggtttctaaagaaaatatttatttcagggttgacactaattcttatgccggcctacggtcgtatgataccgtatccaaacaaggatataatttctttatagacaaattcgctaacaatgaaatggtgtataatttaagggcggataatatcaactgggatcctgctgcaaaaaaatggaaactatcacgtgcggtagagcatttttttaacggagataaagagaaagttgtacgccagcaaaccatgcttattaattataattttaagccccaagatttgagaggcgatgaatattttaaagaccgcctgccaacccccgacttaaaagcttatatcgaaaaggaaagattaagaggttctgaaatggttagttctttagaactggagcgatacaaccgggatgctatccctgcatcggttatcatacttaccattatcgctgcggtactatcatcccgcaggatacgtggtggtagcggctttcatctcgccatcggttttgtaataagtgtattgtatattttaagcagccgcttttctgttgtatttgcagagaaaggaaacttccctccactgattgcagcctggacacccaatgttatttttggggcgcttgcgttttatttataccaaagagcaccgaagtaatgtgctaatat

SEQ ID NO: 2598 - DNA, 18994 bp, synthetic construct
  source 1..18994: mol_type = other DNA
  misc_feature 1..18994: note = Synthetic
tcttataccatttacctgtataattctatttttgttgaaacgactgtttactatttgtgaaaaaagcaattattttattggtaacgatttcattgctgttgcttcaacatgtttatgcccagggttattacttcaggcattaccaggtagaagacggactttcgcacaacactgttttttgtgctttacaggatcataaagggtttatgtggtttggtaccaaagacgggctgaatcgctatgacggcaataattttaaaattttcaggcatgctgaaaatgacagcgtgagcatcggcaacaattttgtacaccagttatttgaggatagtaagcaacaattatggataggaactgaaagcggtatctatgcttatttatctgcaacggaaaaatttaaacaactgcaaacggatgatagcgcttccgcgatcgtaagcggcattgcgcaggacagcaagagcgttatatggtttattatgggagggagattataccggtatacttccggcactccaaaagcaacacgtgttgatattaccggcaatgccagtatatcatccttatacattgataaagatgatataatatggctcgccacgtatgaaacgctgatccgttataatattgcaggaggaacctcctctgcatataatgtgttcaatcattctcctgccgcatcttcaggctggatatttaaaattgtgcctgcaggtaaagacagcttattgttaggcactattcaccagggcttaaaattattcatcatcagcacgggtgaatataaagatgtactgacctggaataaagaccgttctcctatttatatacgtgattgcattgcaatcagtgaagaggaattctggcttgcaagtgagtccggcattcacatatataatacacgtaccggcagccacaccaatctcaataagcaattcaacaacccatatgcattgtctgataatgctacctattgcctgtttaaagacagggaaggcagtatttgggcaggcacttattttggtggcgtaaattatttttcaaaacagtacaattattttcaaaaatattttccggatggcagcagtaatagtataagcgggaatgctgtgcgggagattaaagaagataaacaaggcaatctatggataggtattgaagacggtggtttgaataagcttgatacacgcaccaataagatcacaaggttttaccctgatggcactccgtctaccttatcacactataatattcacggcttggccattaatgataatgaaatatgggtaggtacatttgaacaggggcttgatgtgatggatatacatagcgggaagatactcaaacattataagcgcggacctgatacttttcaaagcgattttattgtgagcctttgtaaaataagctcaggagaaatattgatcggcactacgctcgatcttacaagctacgacccccggaaaaaaacttttactcatgtgcaggagttgccgggcaacaattttgtttacaatattattgaaggcaaagacagcacgatatgggttgccacgttgaataaaggactatattattacaaccggtataaaaatacatatggcaatttccggcaccaatccagtgacagcagcagcataagcggggatatgctgaatactttgtttgaagatagtaaaggtgtgttgtgggttggcacagaaggcaatggattatgcaggtttaacaaagcaacccaaacttttacaaggtataatatcaccaatgggttacccagtaactatatttttaaaatacaggaagatgatgaaggcaatatatgggtgagcacaagccggggagtggtgcgcatgaatgcttctgcgggaagcatccgggtatatacagcatccagcggattattaaatgaccagtttaattataattcaggttgtaaaaccagggatggcaggctatactttggaagcgttaaaggtatgatcagctttaatcccgcaacctttgttaccaacacgcaaataccttctgtatatataacaggactgcaggtaaacggccgcgaaatagaagcgggcgatcaatccgggttactttccgaatctatactgcaaacagaacagatcacactgaattacctgcaatcctccttcagtattgattttgccgcattaagttttatttctcctgaaatgacacaatatgcatacatcatgcacgggcttgataaagaatggacagcattaaaaaccaacagaaaagcgtatttcaccaatcttgctgcaggtacatatgtatttaatgtaaaagccaatacaggaaacggagcatggagcacaataccggcacagcttaccatcaaggtattacctccaccatgggaatctgcctgggcatatgctttgtatacgctaacggcaatgggcatcgctttttattttataagaagatatcactttcgccagcaggaaaaacatcagcgcagaatagaattaatgcagcatgaaaaagaaaaagaattgtataaagccaaaatagatttttttaccaatgtggctcatgaaattaaaacaccattaacgctgattaaaggaccgctcgaaaaaatagttcaacaaacagaaaatatacctgatgtgcaaaagaacattcacatcatggagagaaacaccggcaggctcgtagacctcaccaatcaactgcttgatttcaggcaaacagaagaaaatgcattcaccctcagcttcacccgttgtaacataaacgctatacttattgaaaccaataatgatttccgcctgctggcagaaaaaagaaatattacctgcatgcttgatttgcccaccccggatattatagcatgggtagatgaagatgcctttaataaaataatcactaaccttttaagcaatgccataaaatatgcagcgcgggctgttacaatacgcctgtacgcacaggaaaataattttattatggagatgaccaacgatggtaacctggttccggatgataagagcgaaaaaatttttgaaccgttttacaggctgaaagaaaccgaacggtcaaaaggaactggtatagggctggcgctctcccgctcactaacacaattgcacaagggaaggctttacctgaaaccaaggatgaatgaaaaagtaaataccttcgttttaatgctgccgttgcaccacacaaaacctatactataaaaaaatagtactgctatgctgccctctatattgttgattgatgacgatgaagaaatcctggattttctgaaagacgagctgcaggaaaaatattccattcatactgcacttaacggaataagcgccatggaaatgctaaaacatgaaaccgttcagttgattgtaagtgatgtgatgatgccacagatggacggctttgaactatgcaggttaataaaaaccaatattgatcattgccatatacctgtaatattactaacggcaagaaatacacttcaatcaaaaattgagggattggaaattggcgctgacgcatatatcgaaaagcctttttcacctgctcatctccaggcacagattgccagcctgctcaataaccgcagcagggtaaaagaatatttcgctaattctccacttgcgcatatcaacagtatagcgcactcaaaatcagatgaagcatttcttgaacaactgcacagcattattttacaatacctggaagacactatgcttgatgtagaaaagctcgcagcagccatgaatatgagccgccccacactgtatagaaagatcaaaggcatatcaaaccttacgcctcatgaattgatcaatataacccggcttaaaaaggcagcggagctactggcggaaggcaggtacagaattgcggaaatagctgacatggcaggttttcagtcgcaaaataattttgggagaaattttttgaaacaatttggcatgacgcctacgcagtatatacatatgaaacaggcagaataaaggtgaggggtatcagcagtcagccttcagctatcagcagttggtgtttcagcatagccgtcaacttaaaaaatatgagcaacaaaagaccccgaatggggttcaatttgaatagccatcggtgcaaccggtggtcgaatgaaacggtttttacattgaacccctgcggggttcaacaaaaactccgccattttaccgtgagttccactcacggctattcaaattcaagccctttgggcttgaattgacggttatggtgtttcagccacccgttttctttatacacttcaccctacgccatacaccttcctccttatcccttcctcacttcaattccagcaccttataaatcgcgtcctgtatatcagaccgtatgttcagcttcgacaatcttccattgcttcctccttccggatttacgcggttgctgagaaaaatgtagatcaggtcgtacttaggatctacccacacacaggtgccggtaaaaccggtatgcccgaaagtttggggagatgcatatttgctggggtagggttcttttcttgttgcattatctttttcaggcttatcaaaacctaaaccgcgtcggctgatcttactactatatgctgtaaataatttaattgtttcgggagagaaaaaataataaccattatatgttccaccattcagcaccatctgcattaatacggcaagatcataagcatcgctatataaacccgcatgtcctgcaacgccgccaaacattgcggcgccggggtcgtgcacatacccgcgcaacaattgcctcctgaaagcctgttcattctctgttggcgaaatacggtctgcggcaaaatgtttcaatggcagaaaaccggtagtggtcagcccgagcttccggtaaaattctttatatacatattcctctaaaggcataccgctgatggcctctactattttaccgagaaaaataaaatcgttatcactatatatatattttttccccggaggaatcacttcactttgcaggattcttttataaatggtatcaccccaatccttgcgcataaacatactatcggcaacaggtacactgtattgcagtgattgtgttttgctataaaaaccattaaaaggaatgccggttgctgtatctattgtttccctgtaaaaaggaataaacgcttttagccctgcctggtgcaacaatatatcgtcaattttcaggttagctttattcgttccccgtacagaaggaatataatatccaagtgttttgttcaggtcaagcctgccctgatcgtataaacgcataaccgacatagtggttgcgcaaattttggtaacagatgccaggtcgtacagtgtttcaagctttactttctctgtactatcataactgtaataaccatacgccttatgataaactatacgtccgctctttaccaccatcacttccatacctggtgctgcacgctgggtaatagctactgttgctattgaatcaatagctgcaaatttcaactggttattatctgcatttactgtttgtgcaaagggcaagggctttgtttcaataccagagccataaggaaaattttcacaaaccgtaaccggcaattttccctttgcaactattacacccctcaaaacatcagcggcggcagtttgtgtaatagcatcatcctggtaacaggctaccaggttttttgcatcacacatattttttaccgcgtaaggattaccgaatacaaatgttatggctttattaccggactgcacctgcttaagtaattgtacagatgatgcgctgatgccaaaattatttgccgggaaacgattaaaattatgcagcccgatcactaccacatcatatcttgtctgaagcagggaggcaagtgtggcaatgcgtgttccgtcttccttatagttaaaataaaacgcgtctgcattataatccgctcttattctccgggcaaaggcattatctgtaccaataccaattcccaggtaagccaccttataatccttatctgtttttttaattttttgaggaacaaccagcggaatgatattatcatcattctttaatgttgttatggcattctctgcgatgcttttactgatctgcggcgtttgagcatttaaatcatctgcaagccttgttatatttacgggttgtatattgcttagtccatattgatattttgcacgcaataccttctttaccctctcatctatctgtgcccaggtcaggtcttttttacggatggctttttttatttcttcaatacttccgggtatatcgccgggcaaacaaagcatatcattaccggcaatcaatgattctgccgaagcttttccatcagggaagaacttttttacgccctgcatttccagcgcgtcggtaaatgaaagtccgttataacccatttgttcccgcatcaatttggttacattattataagagatggaagttgccctgttggcggtattatctattgccggaataaacaaatgagcgatcattacactgcctacacctgccttaaacatttcgcggaaagggtatagttccagcgaatcaagttgttctgttgttttattaattaccggtaaatcataatgcgaatctacagccacatccccatgcccgggaaaatgctttgcgcaagccataacgccaacatcctgcatacccttcatatacgcaacaccatattccgctactttatatttgttctcaccaaaggaacggtcgttgatgaccgggttagcaggattattattgatatcaaccaccggcgcataattcacctgtatgcccatacgtttacattgctgccctacccatttgccatactggtaaatcaattgcgcatcctgcacagcgcccatcatcatctgtcttggcagggcttgcacactatccatgcgcatgcctaaaccattttcgccatcaatacaaaccagcaagggtgtttttgccagagcctgaaattcattcaaataatttgcctgcagcaccggccctccctggaataaacagatgccaccgatattgtaggtattgattgcctgctttacttcgtcgccataaaaagttactttaccattactgattgaagagacacgcaccaccatcagctgtgcaattttttcgttttcactgagtgttgcaaaaacactatccacccatgcctgttcgggcaaactactactgcgctgtgcaaatatggagagagactgtaacgcgaataatgtaagaaaaatatacttcataatgaagcgaatttaaagaaatacgggaatatggaaatgtgggaatgaatttgaaaatctgttgatttgaaaatttgaaaattcctcactcccggaccctctttacgagtgtagaggggtgctccaactcaaagcaggttgatgaaatgcagtacacggatggttatgaataccaaagtgtaagcaaataccagaaaacgttttatctggatatattaaaatgcggatgtggtagttatagcgtttgatattattctatagctgctgctccctttcccagtgaaagggagcagcagctcacctaccggcagccaggagcaggcagtaataggcttttatcctcaatttcacatatttttgccgcttaaactttcagcatttgtcagataagattcaattactgccggataatattgccaaccagatagctgcgggtgaagtgattcagcggccggcaagcgcggtaaaggaattgcttgaaaacgcggtggatgcaggtgcaacagagatcaaactgattgtggctgatgcaggcaaatcattgatacaggtgatagataatggcagcggcatgagcgaaaccgatgcgagaatgagttttgaacgccatgccacttccaaaataaataatatagacgacctgttccgcatacgtaccatgggctttcgcggcgaagcgcttgcttccatagccgctgtggcgcaggtggaactcaaaacacggaaaacggaagacgaaaccggcacattaatagaaatagagaacagcgttgtaaaaaaccaggagatgatcgcttttccgaaaggaacaagcattgccatgaaaaatgtttttttcaacgtgccggcaagaaggaattttttgaaaagcaatcccgtggaaatgcgccatatcgtggatgagttcatccgtgtggcaatggcctttcctgaaatatttttctcgctcactgccaacgggcaggaaatttttcatctggaaaaaggcacactcaagcagcgcattgttcatttgcttggtgcaagctataatgccaaactggtaaccgtgcaggaaaaaacggattaccttaccatatatggttttgcaggaaagcctgataccgccaagaaaacgagaggcgaccagtatttctttgtaaacaatcgttttatccgcagcgcatatctgaatcacgcggtaatgagcgcctaccaggcaatgataccggcagacagtttcccgatgtatgtgctgtttattgatcttgaccctgcgcagattgatattaatgtgcaccctaccaagcaggaaataaaatttgaagatgaaaagatcatatatgcttttgtgcaggcagccgtaaaacacgcgctggcgcaattcagcattatgcccacactaaattttgatcttgatcccggcatacaaaagctggatgccgtggaaaagccttttaccgaagaaaagaaaacaaatgccgaagcatcctcgctctacaatacgttcacgcaaaaaaaccaggcgcattttattgacagcaaaagtgagctgaagcactggaaagatttttatcctgaacccaaacaacaaagcggctttaaaagcctgcttgccgctcatactgaaccggtgtctgacaaattagaatacgaacaaacggttacggctaaccgaagcctgcagggaagcggcgatcaaaaattgcaattactggaagatgtgcccatgctgcaattgcacaatacctatatagtggcttccaccaacaccggttatatactcatacaccagcaatcagcgcatgaaagaattttgtatgagcgatatattattgcagcaaagggtaaacctattccaatacaacgaagtttgtttccattaaccgtgccgcttgctgcagcagatgcagcattattgcaggagcttttaccggatcttgccgtattaggttatgaaatagcgctttttgggaaagacacatttgtaatacacggcactcctgccgatgtggaaaccggtaatgaaaaaaccgccatcgagcaaatgctggaacagttcaagcattttaacagcgaggtaaaattttcaagaagagaaaaactgatccgcagtctttcatggcagcacgctgtaaaacccggccgctcactctcccaacaggaaatgaaaacattaggcgaagagctgtttgccaccgcgcaaccgaatatcacgccatccggtaaccccacctatattgcgtttaagaaggattatctggagaggatgtttgggaaataggattgtgccttcaatgtttgcggtttttttgattgaaagtttgtaacttaactcttcaacccgttgcttgcattacctgcaatatcatctacatgaacccttgtccgtaatttcaagtaagagagtttcggggaataaaaaaggcggcactttgatagtgccaccaataaaagcaattcacaacacttaaacaacatatttagattgtaacacgtgtataagaggagcagtcaatatataatccttgggggaaattataggcaaggcttggagacttgccctaaaaatttgcaactttttatctactgccttcacaataatatgaaaaaattaatacaaaacgaattttgttgtttaagtatgtcctcatttctttattattttgcaaataaaaaagctccaccgaggcagagctaagaatttcttcggcttatagccttattgtgaattgtctttcgactgcaaatctaaaataagtatagatatgagcaaaattttaggattggatttaggtacaaatagtgttggatggtctatcagaaatacacaattacctgataatcagatagaaaaagctggtgtaataacctacaccaaaggtgttggcaacagcaaaaccggagaatactcctatgctgcggaacgcaccaaaaagcgttcaacccgtcgcttgtaccaatcaagaaaatacaggctatgggcaacgcttgatgttttaattaaggaaggctattgcccgttgtcattagacggtttaaataaatggagacattactcaaaagaagaagcaagaaaaaataaaaatgccggaagggtttatcccaaagatcaaattctttttgagcaatggataaagatggattttgatggcgatggaattcccaactacaaaagtccttatcaattaaggagaaatttagtggaagagaaatttgatttttcgaaagaagcaaaccgatatagattaggcagggcattatatcacattgcccaacgaagagggtttaaaagtagccgaaaaggtagtgatgatgtaaaagaaaataccgaaggtgcagatattgacttgcagtattctgaaaagaaaaaaaataaagaactagtaactcagtttcaaaaatatccacaagcaaaaaccatcggttcgttgtttgcatatttggaagatgatggagtgcgtattcgggaaaatatggcgcaatatgcaattcgtgaaaattttaaagaggaaatcaacgaaattttcaagtttcaaaacatttctttagatagtgatttatataaaggattggttgaaaccggcaaaaacaaaaatgacggtgctattttttataaacgtccattgcgctcacaaaaaggattgattgggctttgtacactggaacaggaaacacgtatagacccaaaaacaaataaatcttttcaggttggtaaatatcgggcgccgataagtcacccaagttttgaattgttcagagcgtggcagtttttaaacaatataaaattcaaagaagaaaataataaaaattcgatttggaaaccgatttcattggaattaaaagtagaaatactcaatgaaaagtttttcagaaaatctaaagcctattttccgttttctgaaattgccgacttcataaaaaagaagggttataagtggattttaaattacaaatcaaaacaaacggttacagcctgtccggtttctgcaaggttgaaggatatttttggcgatgattacctggatataaaaatagaaaaagtaccatcacccaaagaaaataaaagccattacgacatttatgatatttggcatgttctgttttcgtttgaagaccaggagtttgtttcagcgtttgcattagagaaattaaaattagatgaagaaaagaccaagcaattcgtatatgcatggaacgcactgcctgttggctatggaatgctgagcattaatgctattgataaaattaatcgctttttgtttaaaggattgcaatacaccgaatcggtattgcttgctaacttaccttcactagttggtgaagaattgtggagtaaaagtgaagctttatttatacaaaacattggtgatgtcattaaagaaaatcgggacgaaaaacacattattcaaatcatcaatggccttgttgccaaatacaaaaatttggatcagaaatttggcttcaaaaatgaaggctatatacttgatgaaagcgatgtacaagacataacagatgctattattgaccattatggagaaagcgtttggctatccaaaacaaaagaagaagctgatatgacttttttaaccgtaaaagattgttatcagtcatttttcaaaacaaaggaattggagcgtgtggatattgatggagaaagatattttttgattacttcaaatggcaaaaattattacaaagcggactccggcttctacaaacaacctaagttaaaagacaccttagctgaatatgcttcaaagaccttaaaaattgacgttttaaaactaaaaaagatttatcatcattccgacattagcatttatccacctgcaatgcccgatgaaaatggtgaggtaaaaatgggtagccccaaaacgggttcgttcaagaacccaatggcaatgcgtactttgcaggaactgaaaaaattattgaactacctgattgaaaccaaccaaatagattcagatacaagagtagtggttgaagttgccagacaattaagcgattcaaataagcgttgggctatcgaggcttggcagcggcaaagagaagcagaaaatatggagtttgcagcggcgatagatgaattagtgaagcaggaaaaagtgagcgccgatagcaaaaaagaagctgatattgataaaatgcggctttggtacgaacagaacaaagaagaatccgtaccggaaatttcagaggtaaaaaaggaaattaaaggcatccgatggaatgaaaacaaaaaacaatcatacaaagatattactgcaaagaaaacagatattgaaaaatatcgcttgtggcgtgaacaaaaatgtatctgcatttataccggaaaaattatcagtataagcgatttgtttaacaccaacgtaattgactttgagcataccttacctcgcagcaagtcttttgataattcgttagcgaataaaacagttgcatttatgcagttcaaccgaacggttaagaagaataaaatcccatcacagttgcctgaaaaggactatgaattagttttagaaaatataaaaccctgggaagaaaaaattgaacgcataaaacaacaaatagatttctggcaaaccaaatcgaaaaaggcagcagacaaacaatggaaagatgaagctatcaggcaaaagcatctttggaagatggaactggaatattggagcagtaaagttgaacgatttaaagtacaggaaatcacttccggctttaaaaacagtcaattagtagatacgcaattaatctcaaaatatgctttacactatcttaaaacttatttcgaaaaagtggatgtgcaaaaaggagaagtaactgccatttttagaaaaatttatgctattcaaccacagaatttcgatgggaaaaaagacaggaacaaacattcacatcatgcaaaagatgcaaccgttttgaccttaattccgcaagcagccaagcgggaagaaatgctgaaagcgtattttgaagatttggaacaaggcagaaacttccaaacattaaaaccatttcctgcattcaatgtcagttctatttttgaaattgatgataatgtacttattaatagcctgaacaatattcagttcctttccagggcaaaaagagtgattcgcaaaagaggaaagattcaatttatagaagacaccgataaggtgaaaatagcaaccggcgatagcatccgtgggcaattgcatcaggaaacattctacggggcaatgaaacctgccaaacttgacgaaaatggaagaatgcaaaaagatgaaaacggtaattttatgcaggaagacaagttgaagtttaccatccgtgtaccatttcaatacaaatcgaaacctgatgcacctgggtttaaaacttgggaagaaatcgaaaaacaagttgttgataatggattgaaagcccaaataaaaaagcaaattgataaagctggaggtttgaaagaagcctttgaagcaggtattcatttattagataaaaacggtgatcctcatggtagcaaaattcgccatatccgtgtgtgggcaagcgtttccgaaccattgcaaatcaagaagcaaacctatctttcttcaaaagtatacaagcaacattattacgctgcaaatgcaaccaacagttattttgcattgtatcaggataaagaaaaaacgaaaaaagattttgatttcagaaacctaatggaggtagcacaggcactttcggtagagaatattgaaaccgagaatgatttatttacgccatttatttccatcaagaaaggaaaaacagagaagcaattagatttaaaatacattttaacacctggggcaagggtaatttttgtaaaagacgaagaaataagggaagatctaagccatgctgatatttttaatcgactttatgtatatactaattttgaaaaggacggaagattgaattttaaatatcacttagaagcaagaaataaaatagaggaaaagtatttagaatcagaaattgattgggaaaatccaaaaccaacattgaggtttagctatagcaaatatgattttttagttgaaggtgaagaatatgatttcgtggttaatatggacggtacaattcaatggaaatagtatgatcaaatgaactctttacttcaccaatcctgcttttcttaaaaccaataacaatccgtgattattgagatgtaggacagcggcgaaaccaaatcggcgctgactgaagatataggattattgattggtcgcataggcaatatatcaccatataaaaattcgatgaacaactaaaaaaccatctttgttatggctaaatctaaaagctcatactctaactatagaatcaaacaattttcatcttttgaagaaatggatgaggacaaagccaaacaaatggcagtaattctcccagttgagcatctaaaaaacactacgaaacttataaaaaatatatatgacgaaaagcttaaacaacccatgagcaagcgaataaaatttaagaaataatgaatattctcatagaagaacaccaggaattattattatgtttagccaaacatagggttgattttatggtggtaggtggctatgctgtcatatattatggttatgaacgaattacaggagatctggatatttggctgaaatcgagcaatgccaataaagaaagattagcaaatgcgttaattgattttggcatagagaaaacagatatagcatcactccatggtatggatttcaacaacccattatctgtattctgcattggagaaaagccacgcagaactgattttcatactttaatcgacaacctaaagtttgaggaaataataaactatgtaaattattttccgttgaagaataaaaacattcctgtaatacactataatcatttgatcctgtcaaagctaaccaccggcagaatgaaagacaaagctgatatagaagagctggaaagaatcaataaatacagaaaaaaacaataaattagaatactttgagttactgataaatatttactctccggcaataccccttagaagactgcacagctaaccccggcaatgtaaagcatacaatccatttactataaaccctgcttcccatgatcaagcgaaccctttatttcggtaacccggcctatctcaaaaccagaaatgatcaattggtgattgagatgcaggacagtggcgaaacaaaatcggcgcccattgaagatatagggttattgatactggatcatcagcaaattacccttacacaggcactgatggcaaaactgctggcaaataatacagcagtaattacctgcgatgatacacatcacccaaccggtatgatgttcaacctggatgggcacacgctgcaaagccagaaattccaggcacagatagaagcttctttacctttaaaaaagcaattgtggcagcaaaccgtaacctgcaaaatagaaaaccaggcggcgttattgcagttagaacgcgaagaacacaaactactgctcacctatgccagggatgtaaaaagcggcgacagcgacaatcatgaagccaaagccgccgcatattactggaaaaagatattcccggaatttttggaattccggcgtgaaagatatggacctccacccaacaacttactgaactacggttatgctatactgagagcattggttgcccgaagccttacagcctcaggactgttgccaacgcttggcatccatcaccgtaaccaatacaatgcctattgccttgcagatgatattatggaaccctaccggccatttgttgataagatcgtctgccagattatacgaggcaacggaaaattccttgagatgacaccctctatgaagaaagctctgcttgaaattcccgcaatggatgtgcagattgacggacagaaaagccctttaatgaatgcggtgcagcgtaccaccgccagcctggcaaaatgttacgaaggaaaggcaaggaaaatactgtacccggagatgggctgaaggctatctcaaccctataaggtttgcagcacaccctcattaccgaacccagcatacatcatttttatacttttttacgcaccgaaactatggatctgtgcgtagtagcatctctcccccttcggggagccggagcgaccgcatttattttatgtttgaacgccttaacgcatatcgcattatgtgggtacttgtattttttgatcttcccacagaaaccaaaaaggacaggaagatctatgccaaattccgtaaagaaattatggcagatggtttcaatatgttccagttcagcatttacctgcgacactgcgccagcaaggaaaatgccgatgtgcatattaaaagagtgaaaaaaatccttcctgaaaaagggcatgtaggcattatgtgcattaccgataaacaattcagcatgatggagattttcaggggaaaggaacttacggatacgccgccggtagcacagcagttggaattattttagagcgcttcaaaaaacctataaagcttgcagcctgctatacagccctgcaaaccttataggtttatcaagcagctttttggaaggccaggattgaaaaaatcgaagttaaaaccatttttcccatcccggaaatccgttgaaacagttcagaaacaagcacttaccaaatttctgttgtaaaagaactaagctacttaataatttgaaagcaattcacaacgattggtaaatggcataatcccagctcacagttgtaaaagaactaagctacttaataatttgaaagcaattcacaacggtacgccttttacattaacagatcctaagttgtaaaagaactaagctacttaataatttgaaagcaattcacaacaagtaggatattgcattctttactgattgagttgtaaaagaactaagctacttaataatttgaaagcaattcacaacggtacgcgcttatataaaacctaaacgcagttgtaaaagaactaagctacttaataatttgaaagcaattcacaacagtgagtatgacttaacggcaaccggcggcgttgtaaaagaactaagctacttaataatttgaaagcaattcacaactatgatgatgaaaacctgaatgaaacagggttgtaaaagaactaagctacttaataatttgaaagcaattcacaactggatgatagtggctcttactacttacttggttgtaaaagaactaagctacttaataatttgaaagcaattcacaacagctatccctagccatgcattactatttcagttgtaaaagaactaagctacttaataatttgaaagcaattcacaacaacgtagataatatgtttgacattaaaaaggttgtaaaagaactaagctacttaataatttgaaagcaattcacaacctgttattgtatgaatcgttaatgtcaggggttgtaaaagaactaagctacttaataatttgaaagcaattcacaactctttagctttcatctttaaaagaaaaaatgttgtaaaagaactaagctacttaataatttgaaagcaattcacaactcataggttagcattgttaaaacttgttgtgttgtaaaagaactaagctacttaataatttgaaagcaattcacaacttcacggtgacgatgcggcaacgccaaccccgttgtaaaagaactaagctacttaataatttgaaagcaattcacaacccccctgttgttgacttggagcaaaccgaagttgtaaaagaactaagctacttaataatttgaaagcaattcacaacaacaccgaagcccgcgtaatggctttccttgttgtaaaagaactaagctacttaataatttgaaagcaattcacaaccattacctgttgaacggtcgcgaagcaacggttgtaaaagaactaagctacttaataatttgaaagcaattcacaaccagattcaagacgggttaaagcgtcgatttgttgtaaaagaactaagctacttaataatttgaaagcaattcacaaccctagtgattcaagatacattaacgcgtcggttgtaaaagaactaagctacttaataatttgaaagcaattcacaacaaattgcctgatggatggttatgggctaaagttgtaaaagaactaagctacttaataatttgaaagcaattcacaacatggcagctgggaagctgctgaacatgcggttgtaaaagaactaagctacttaataatttgaaagcaattcacaactcctacggcttacagtagtgcatcatatagttgtaaaagaactaagctacttaataatttgaaagcaattcacaacttgtttcaattgggttttacaaaaacatcagttgtaaaagaactaagctacttaataatttgaaagcaattcacaacgttaacaggatagcaagtcaggcggtcgaggttgtaaaagaactaagctacttaataatttgaaagcaattcacaactatacccgcatgaatcgtaagcgagatgccgttgtaaaagaactaagctacttaataatttgaaagcaattcacaactaatgggcaagggtaagatgacgatagaatgttgtaaaagaactaagctacttaataatttgaaagcaattcacaacttccgcttctcagagttgtatattcctgcacatgctgacccactattcctgcacatgctgacccatcattcctgatcatgttgacccactctgattagggatggtcatgtattgtcaaagtacattcttgcatgttgacccac

SEQ ID NO: 2599 - DNA, 18630 bp, synthetic construct
  source 1..18630: mol_type = other DNA
  misc_feature 1..18630: note = Synthetic
ttaaacttagcatttccatcgccaatcttacctaaccaaactgcgccattttcctgatacaatactggtcgttcgttaacagtaccttcggtaccagcccggataacatagccttcactgttcactacataatcactgatagattctccacccggaagctggttggccatttcatccagggtacgcaccattttatgtccgtaaattgcaccatacgtttcgccagcggctacccggaatgctgtaacatcaccactaacaggacttaaccaatatgccggaattggcaaatcggtaattttctggcgcacccttgagaatacgatgttggatgtccatgagaaatcttgttttttcatccagttggcacttaatgtaaattctaacgtttttgattcgattgaacctgcattttgccatctgttgctatacccaccattcaggaatggaataagctgcacattgaggaactgatcggttgttgttgactgtgcatacgttccttcaaagctaaacttctttaagaagtctacattcaaaccaaactctgtctcagcagtttgagaaggcttcaacagtatgttaccatcttgtgcttttgtagcattaccttgagaaaggttaaatatctgatattgccaggagaaatcagggcgaataccggctgtaccataggctactctaaccttcatttcgtctatacccggaagggttacatcctgcgacacacgatacgcaccggataatctgtaatatgggttccatcttgcatctggaccaaaaagcgatgatccatcataacggaacataccatcaaacagatacctgtctttgtaatccaaacctaaaattgcaaaatagttttgtgctacttcgttggttttattagaacctgcattgtttatggaagcaaagttattgaatgcttcaataccggtaactctaaatacagaggcgcttacactggtatactcatagtgacgattctcgtataggtaagagagttttgatttaacaatcaggtcgccaaactgtttattgatgttaaacgtaacctgtgtgttttgtgttgtcgtttcgtcactttcatgcgagaggctacccccactgtaaacaccttgtgttgtccaggtatctttcgggttaattacttctcttctccaattttcaatttcaaaagtctgagtaagatcaagatttaaccagttggtgaattcaatattagctgtatagttacccatccatctgcgcgaatgtctgttgtccttttgtttgtaaaggccgtacagcggattggttacctcgccattaaagtgattaactcgtaagttataaggctggccatctgaattgggtgcaaataaatcaacatcatgttccattctggctacgttataaaaaataccagaaggctgttgaatttttctgttgatatacagatttgatgcacttattcttaaccaaggtgtaatttcctgatcgatattgaatctgaaattctggcgggcatacccatcgcgatactgcacaaccccttgctgaacgttgttttcgaacgaaaggaatatattgttcttatctgatttgttcgatacccctacataattggtcatcgaattacctacctgaaatacttttgccggatcgaaacgatatacaccatatggattatccatataaccatctgcatcaatagaccgcgatcctgtaatggcagaattttgtcctcctgtatacccggccgggaaagttacacctgcatattttgtaaactgacctttgaattgttcccaatcagaagccatggcatacatatgcgatttagatgtttccaaataatgttgcaggctttggaagcccacttcatttctaatggtaacctgaggcttacttgcagctccgctttttccgcgttttgtagtaattgcaataaccccattacccgcacgtgaaccatacaacgcagaagccgcagcacctttaattacttccatagactccacatcgtctacgttaaggtcggccaggctaccactcataataataccatccagtaagatcaggggtgacgcgcttacgttcaatacgttatcacttctaagcaacaagtcaacttgctgaccaggagcacctccaactgaagatgttcttaaaccagctacttttcctgttaatgcagatgcaagtgacatagccggcacagcagttagttgagcttcgccaacttttgtaactgacaccgtcatcttttctttagtagtagcacccgcaacacccgaaacgataatctcgcctaacattcttgtgtctgtagacatgatcacatctattgtgtttctggcgccaacaacctcctcaactgaggcaaacccaataaatgaaaaaacaagcgttttatcgcctgaaacattaatggaatactcgccattagagtttgtaacaacccctgtggcagtgccttttaccactacgttaacaccgggtagtggtaagccatcttccagagaagtaacctttccggaaactgtacgttcttgtgctaaggcgcttgtaaaaggcaccaccagcaacaagaaaatacctaactgtaaaatttttcgcatactttttggtttaggttaaaagtaaattttattagataacacaaacatagaatattatttagttacggtaaaataatactttgttaatgagtgaatcttaaacagaaaaaacacctttcacggagccgttaatccctttaaataatcatctataatgagcggtaggggttatttggttgatggtttcactatcttaaactcaatacgcctgttttgctgtttattttcttcggttgtattagggaatagcggctttttggagccataaccctttatttgaatttgatttttggagattgccttattattaagaaattctgctactgatttcgctcttttttcagaaagtgccaaattatatgattcggagcccgtattatcggtgtgcccgctgatttcaaccattaaaaccgggttttttaacaggaattcggccaccttttccaattctgtgtaagactcttgtcttaactcgtacttatctacatcaaaaaaaatgttgctcagcactattgtggcattttcgtgcaccggctctaatgcaatatttctttctatgggttgataggttttgtccgttgcataattaaaatgctggctgttaaataaataacccggtttatctacgtaaagggcataatctgaacctgcgggtaataccatcaaatacttacccgataccgaatctgagaatactttagaaacagattttttttcggccagattatagagttcaacctgcgcgcgtaagaacttacccgatactttatcagtaaccacaccggccaccacattacccgtataaggtgttatccatttttcgggaagtataattctgtacaatctgcttctgttctttgattcttcacgcgaataatatccctgatttcctaatgccgatacaataaacgaatattgatcgcgatgatcatttaaaggcatgcccatattaagaggcttaccccaacctgttgcgtttttttgcactctgtatatatcatacccgccataacccggtaagccattcgaaaccacatagagctctctattattaacatgaatatagggcgagatttcatcttggggtgtgtttacctccggccccaggttaaccgctttgctccatcctaaatctgttaactgcgaataccagatatcataaccaccaaagccaccatttctttccgaaacaaaatataattcacggccatcggccgatagcgagggttgggcgtcccatcgggggctattaatattgggcccaaggtttttaggtcgcgaccacattgtacctgttttacggctttcatacaaatcgcaacccgatgccccacacacggtaaaaataatatggcggccatcggctgaaatagtactggctccttctcgttgaattgtattaatattagcagaaagtgaaaccggtgctccccagcttccattgctttgttttgccgataccaccaaatcttcgctatcgtttcgcccaccaccatatcgggctgtaaaaatcaattgttccccatctgctgtaactgtaggaaagtattgcatcggaaaaatatttaccgaatcgcttaacggtgtaattacatagtcatacacggtggtgttggttaacgcataatcggcttgcataatccatacttttgctaacgctatttttctgcgatcgtcccgttcaatcaacagaaagtctgcagcgaattttttacataattcatattttgcctgccataaattaaccacagccagttcgtacaaatacatgcgtttacgcgcgtccgtttttgtaagagctattcctttttcaaatatttcggtggcctgatcatactgctcttgcgcttttaaaatagtagccagacgatagtatgcttcctcaaaattcttatcgcgggttattgcttcgtttagtaaacttacggcctgactaaactgcccccgtacacgaaagttatcggcttcggtataaagttcaagcgcctttttgttttttgagctaagcgtttgcgctaacccctgaacgcttattaacattaggaataggatgatacctctttgcatggacacaatttaaggattagaacgtaaaaccacattaacccgtatgtttaccggattgcatggattggaatttcggggctatcaaagcccagcatggcgttaatagttttgcacgactcatacttactcaaatcttcaacccggatttctgccaacttaatcttacctgtattcaataaatgggcacgcattgttccatttaataaaaacgtggttggtgtaaaccattctttgttctttttaaaaacgaggtttgcaatgctggaatccgttataaaaccatctttcacaataagaatctcatcgcaattgtcccgctgttcaaacaatgaggttaacgcttctctgtcagcatatttatgtgcatagtcaatattggcttctatcacctttaacgattctatatgcctgggttgataaagcagaaactcaattcttaacacctctttactattataaatcacccgtactttgtataaacctgttttcggatacttgaattgccttactatatcgtgaatggaccatgccggcaatactccaaataattcaaacacacttttttctattcgcacctgatgataattgaggttacgaaaagccccgtcattcaggtgtattgtttcaaacagccggcacataaattttttgaattacttcctcatactcgctctgccaaacactttgcgttgtaataccacctccgcttctgtagtaaactaagttttcttgttgctctataaaccggatgtttacgcagctgtcaagatttttaccatcaaaataaccaaatatgccggtatagtaaccccgcggctctttttctacatgttgaataacatgcaccgtcttatttttaggcgctccgcatattgaacctgccggtaacaattccattagcaaactccccatgcaatttttatacgctggcataatatctcccacaatctctgaactaacctgaattatttcgttgcgatttgtctttatcacatccagatatcgaaacttagatacccgcacattagttgctacccgcgacaaatcattacgaagtaaatctacaatggtaacatgctcggcagtttccttttcattatttaaaataatggatgctgcattcggaatagtcgcatcgattgttcccttcatcggatacgtgtagattttgtcttctgaaatttttacaaaactctcgggagaaaagaacaagaattgattgcgcaaccaacaccggtaaggagcctgcaccttaaagaacagttcttttaatgtggtattaatttctatgcgcgattttgcagtaaggttggcaagaaatgtattaccataattcagttcttgcagtactgcattaaactttatccggtattcttcttctttcaccggaaacacctgcaacgaaatatctcttttcgactttgcaggagcgggtgcattggtgaatccgtttattgaaaataataattcgtctgcattaacttcatcgggcaaccaaagtttgggtttctgcatttcgaaatcaatcagaaacagaaaggatttaccggcagtactcagcgcatttgctttgttaataaactcagttgtctgcacaacactacggaatgttcatatacttatgtacctgcaacgaaatctgccagcgtggattttgttttacataattaataagctgcggaagcatactttcttcttttgaccactcaggctgaaggtaaagtttgcaatcaggccttacctgtttggcgaaatcttcggcccagacaaaatcggttttatgaaatacaacaaccttcagttcatctgcccgttgggctacagaatcatgaggcggtttaaattttttaggcgagaaacaaacccaatcccaggtaccagtaatcggataagcacctgatgtttcaagatgcgtttttaatcctgcagctttcaatacacgggtaagcgcatcaagattatgcatagtgggttcgccacccgtaatcacacatatttctgtgccacttgcctttgccttttcagcaatagcatccatagttactttgggatggtcatcagcattccaactgtcttttacatcgcaccacacacagcgcacctcgcaaccgcctaatcgaataaagtacgcagcgcgcccctggtgaaatccttcgccctgaatggtgtagaagtcttccatcaagggtaattccgaattcaaaatttcagattcaagatttgacattatcttttctttcaattttgaattttaaatctattaaagatttcttaattcggttgcccgtaaagtgttcagtaataaagaagcaatcgtcatggggccaacgccacctggcactggagttataaaagaagttttaggtgctacttctttaaactctacatcgcctttcaggctatagccatttttgtattgagggccttccacgcgcgtagttcctacatcaatcaccacagcaccttcttttaccatgtcggctgtaattaggccgggtttgccgacagccgcaatcagaatgtctgcattgcgggtaaacatgctaatgtcttttgtgtacttatgacaaactgtaacggttgctttgccttcttccaccagcatcatgcttaggggcgcgcccactaaacgactggctcctactactacacagtttttcccttcagttgaaatctggtaacgttttaacaattccattacaccaaaaggtgtagcgggtaacagcaagggttgtttggaaacaatgcttccgaagttgcgattagtaaaaccatctacatctttatcgggccgaattttttcggtaattttttctacagaaatatgtgccggtaaaggcaactgcacaataaatccatccacatcttcatcgcggtttacctgatcgatgtgtttcatcagtttgtcttcgctgatggtatcggcaaatcgcagcatcgaataatgaaagccaacttctttacaggcctttactttatgatcgacataggtttggctagcgccatcatcgcccactaaaataatagcgaggtggggtactttttttccggcatttttgcgctccagaactttctcagaaatttctttcttgatgtcggtcgaaattttgcgaccatcgatgagtgtgtatgttgtagtggttgtcatgttcattttaccctcaccccttcccctctccacaggagtggggtggaagagaaattttactcaattttcaacacagccataaacgcttcctgcggaatttctacgttacctacctgccgcatgcgtttctttcctttcttttgtttttccaagagtttacgcttacgcgagatatcgccaccataacatttggccaatacgtttttgcgaatggcacttatgttttcgcgcgctacaattttttggccgatagcggcctggatagcaatctcgaacatctggcgcggaattaactctctcagtttctcgcataactttcttccccagtcctgcgctttgcccctatgtacaatagcacttaatgcatccactttatcgccattcaacatcacatccaacttcaccatgtccgactcgcgcatgccaatcaaatgataatcgagcgatgcatagccacgcgagatagatttcagtttatcgaagaagtcgaatacaatttcagacaagggcatttcgaacgtcatctctacccgatcggtggtaaggtaattctgatttaaaatctgcccgcgtttttcaatacacagattaataatagggccgatgtattctgctttactgatgatctgcgctttgatgtagggttcttcaatggtgttgatgcgcgttggatctggcatttcggaaggtgcgttgataaacacttcttcgccatttgtgagtgttgccttaaattgcaccgaaggtacggtggtaatcaccgtcatgtcgaactcgcgttctaaccgctcctgaataatttccatatgcaacatgcccaggaacccacaccggaaaccaaaccctaatgcagccgatgtttccagctcccacaccaacgaagcatcgtttagtttcagtttctccatagaagcgcgcaattcttcaaactcggttgtatctaccgggtaaattccggcaaacaccatcggttttactttttcaaaaccctttagcaattgcccggggttaacggctgttgtaatcgtatcgcccacatgcacctcgctggctactttaatacctgaaattaaataccccacattgccagctgtaatttcgttgcgcgggtgcttatctaatctcaacacgccaatctcatcggcaaagtattcttgcccggtgcttataaattttactttatcgcctttgcggatggtgccattgaacacacggaaataaatttcgataccccgaaatgaattaaacaccgaatcgaaaatcatggcttgcagcggggcttttgaatcgcctttaggtgccggaatgcgttttacaatttcagctaaaatttcttctattcccttaccttccttggcactggccgacagaatgtcttcgcgcttacagccaatcaggtctatgatctcatcggccaccacttcggggttggcgtggggcaaatcaattttattcattaccggaataatctccaggtcgtgctccaatgctaagtacagatttgaaatagtctgcgcttcaataccctggctggcatctacaatcaatagtgccccttcgcacgaagcaatggcgcgcgaaacttcgtacgaaaagtccacatggcctggggtatcgatcaggttgagggtatattccttaccctcaagtttataattcatctgtatggcgtgggcctttatggtaatgcccttttctttttccaggtccatattatccagtacctgggcttccatctggcgctggtttagggtgccggtaaactccagcaggcggtcggccagggtactttttccatggtcgatatgggctattatgcaaaaattccgaatgttctccattcccgtcatttccagtcgtgattttaaggctgcaaatgtagcaagaaataaggggtgggaaaatgggggataaggttaaatagggttgactggttaagcgtttcacattagttttaaaggataacaaaaggtgagggccttaaaaaaagacgaccccaacaagtcggggccgacttagatgttttcacaacggaataatccttattgtgatttgcgtaataatattaaaaggaaagaataaataaaaaagccccaccgaagcagggctaagaaatcttcggcttatagccttattgtgatttgcatagcaaaagtaatgatataaactaaaaccaaaaataatgagcaaaattttcggacttgacttgggaacaaattctatcggctgggcattgagaaatcccgctttgacggaaaaccaaattgaaaaattcggagtattgactttcaataaaggcgttggtttgggtaaaacaggcgagtattcttatgcagcagaacgaacaaagaagcgatctacaagacgtttataccaagcccgaaaatacagactttgggctacacttgaagttttgataactgaaggctattgtccgcttacaattaatgacctaaataaatggaggcattatagcaaagaagaagcgcgtaaaaacaacaatgcaggtcgcgtttatcctgtttggaacatggcatttgatgcctggataaaattggattttgataatgatggaaaaccggattattcaagtccgtaccaactgcgaaaggagttagccgaaacgaaattggatttcacacaagaagtaaatcgttacaagttgggcagagcactgtatcatattgcacagcgtagaggttttaaaagcagtcgaaaaggtgctgatgacgccaaagaaaaagaaacaaacgacagcgaagtaatggatttgcaatattccgaaaagaaaaaaaacaaagtcattgccgagttgtttgaaaaatatactgatgcaaaaacaatcggctggctttttgccttactggaaaacgacaaaatcagaatccgtgaaagtattgcacaatatgctattcgagagaactacaaagatgaaattaaatttatttttcaatttcagggattgaagtttgaccattcgctttacaccaaattagttgaaacgggcaagaacaaaaatgacggaagcattttttacaaacgtccgttgcgttcacaaaaaggattgattggactttgtacacttgaacaagaaacgagaattgataagaaaacaggcaaacaagttcaggtcggaaaataccgcgcaccaatcagccatcctgcatttgaaacatttagagcatgggcatttttgaacaatatcaaaaacaaggaaaacaatgaatggaagcaattgccacttgaattaaaacaagaaatttatgctgaattattcttcagaaaatcgaaaggttattttccattttctgaaataagtgcttttctaaaaaaaagagggaaagattggcaattgaattattcgcttaaaacaaccgtaacggcttgtcctgtttccgcacgattgaaagatatttttggtgatgattatttgaccgcacagattaagaaagaccagaaatcaaaatcgggaaaagattattacgacattgaagatatatggcacgttttgttcagctacgaagaccaggagtatgttgctgaatttgctgaatgtaaattaaaattagatgcagacaaaataaaacaatttgtcattgcttggaacgctttgcccgttggttacggaatgttgagtttgaacgctatcaacaaaattaatgtgtttttgcagaaagggttgatttacaccgaagcggttttgttggcaaatattcctgaaattattggcagggatttgtggcagcaaaaagagcggttattattgaatagcatcagcggtgtgattgtagaaaaccgtcaacaaaaaactatactcaacattgtaaacagccttgtttccaaacacaaaaatttaaaagccaacgaaaaattcgggcacaaagacaataactacaagttgattgaaagtgactttaacgacattcaaattgctattgaagaacaatttggttcaaacaaatggaacggcttttccgaagatgaaaagaaaactatttccgctacagtcaaagactgttatcaggcatatttttctaaacaaggaatagttaggaacaatgataatgaggaacgggttgtaactatccaatcggggaataaaaagtatcacaaaaccgaatcagattactatcgtctgccgaagttgattgacacactaaaagaatttttacaagacaattttgaacaccttgacgaagctaagctttcaaaaatctatcatccgtccgaaatcaacatttatccgccagcaaaagaaatagaaggagttataaaattaggcaacccaaaaacaggttcgttcaaaaatccgatggctatgcgcactctgcacgagctacgtaagctaatgaactatatgattgaaacgaatcagattgacagcgaaacaagaattgtggtagaggttgcacgtgagctgaacgatgccaacaaacgctgggcgattgaaacctggcagcgtcagcgtgaggccgagaaccaggaatttgcagaagccattaaacagcttttaagcgagaataaaaatattaaggtaagtgcagaaagtaatgaggacattgacaaaatacgattattctacgaacaaaacacggaacaaactcttccgcctgttatagaagataaagaagatgaaaacgaggatggaaaaaagaaaagcaagaagaaaaagaaagaagacatcgccaaagataaagctgaaagatggagcggacacggcaaaaaactcattgataaatatcgtttatggaaagagcaaggttatcaatgtttatacacaggcaaatacattacattaacagatttgtttgacgaaaacaaaattgattttgaacacactgttccaagaagcaaatcgtttgataactcattggcaaaccttacagtttgttatcacgactacaaccgaacagtaaagaaaaatcagattccgacacaacttctcaactatgacaaagaatatgactttggaggaaacattggaaaatgttctaccattacctcacgcttagaagcatggaaagacaaagtgggacgcataaaacagcaaattgatttttggaaaacgaaatccaaaaaagcagccgataaaagctggaaagacgatgccattcgtcaacgtcatttgtggcaaatggaattggattattggcaaaacaagttggacagatttaccattatcgaaatcacaaccggttttaaaaacagccaaaaagtagatacgcagttgatttcaaaatatgcgtttcattatctgaaaacctattttgataaagttgatgtgcagaaaggaagcattacggcagagttcagaaaaatttaccaattgcaagttctcgatgaaaagaaagaccgaagcaagcattcgcaccatgccaaagatgcggcagtattaacacttattcctgtggctgcaaagcgtgatgctattttggaaaaatattacgaggccaaagaaaacagaatagattttaaagttgaaccgccatttactggtttcaaacgtgaatttgtctggagcatagatgagagcgttctgattaacaacatcaacaacaaccaggcgcttacacttgccaggcggaaggttcgcaaacgtggcaaagaagtgtttattgaaaagtctgacggagctaagattaataagtgggcaacaggcgatagtattcgcggacaattacaccaagaaactttttatggagccattaaacctgcacaaaaaggtgaaaacggaaatctgttgaaagatgaaaacggaaagtttaaacaggaagaaaaagtgaaatatgtagtaagaatcccgtttcaatacaagaaagatacgaatacgcccggttttaaaaccattgatgagatcaaaaaacaagttgttgatgaaggcctgaaagcgcaaatagaaaaacaggtgaatgaagcaggcggaataaaagaagcttttgaaaaaggaatgtatttattggataaagaaggcaagccacatggaaataaaattcgacatattagagtgtgggctagcgtttcagagcctttggcaattaaaaagcaaaccaatctttcggataaagaatacaaacaaagctattgggcagctaatggtgaaaacatcatttgtgcctactatgaaaacgacactaccggcaaaactggaaaaatcaaaaaagacagagagttggaaatcgtcaatctttttgatgctgcgaatttgaaaaaattcggtttagtgaatggtaaaggagcgcttcaactattcagaaaagataaaagcaaccaagtgataattgatgataagggaaataaacaaacgccccacgctattctgaaagcaggaatgaaagttattttctatgacgaaaaagttgaagaactaaaaaagcaagaaaatgaaaaggatagcgattacaataagcgcataagctacagaacgtataagattgtgaagtttaccggtggccgattaacatttcaacaccaccttgaagcaagaaatgataaagagttagaaaaagcatatcctgaaaacaccccttttaaaactgatgaaaagaacaaagaagttacttatggcggcagaggaacgagtggatttacagaaaaagtaagcgatgctttaaaatttaatagccacaataattttgaaccttttccaaaattgctttattcagtcaattggctagactttgctgttgagggctatgattttgaaataaaaatggatggaacaataagatggattaaatgatactctttgtgtaatttcgttcggcagactcaaccgtgaaaatcgaaaatgccatttttgattttcacggtttcattttatagctttacggcatggttgcccgtgctattaccggttatgcagatacgctgttgaaggaatttcctgcggtggtgctgttaggcccaaggcaagtgggcaaaaccacgctggctaaaaccctgttaaaaaagcacaaaaagaaaactctgtatttcgatttagaaagcgatgccgacctggcgcggcttaaagaccctgcctttgtgtttgaccagtaccccgaccattgcattgtgattgacgaagtgcagcgtatgcctgcgctgtttgccaaactacgtccggtaattgataaaaaccgaaaaccggggcgattcatcctcacaggttcggcctcgcccgatttggttaaaggcgtatccgaatcattggccgggcggattgcctttgccgaacttgcgcccattaatttaatggaggccaaaagcagtcgcatcggccagcaacggcactggtttcgcgggggctttccgttggcgctcacggcaggcaacgatgctgccgccacgcgctggatggaaaacttcatccgcacgtatatcgaacgcgatttatcgttgctgtttggcgtatcgctttccgaaaagattatgcgcagcttttggtacatgctagccgcacacaatggctctatctggaatggagaaacgtttgcccggtcgctgggtgttaccagtcctaccataaaacgttaccttgattttctggaaggtgcgtttctggtgcggcaacttccggcctggtatgtgaatgccggcaaacggttagtgaaagcacccaaagtgtacttgcgcgacagcgggttgttgcacgtattaaaccgtattcgttcggccgatgatcttccgttgcatttaagcgtgggcagttcgtgggaggggtacgtgattgaacaaatctatcaatgtaaacccagacatatcgatctgtattattaccgtacgcaccatggcgctgaatgcgatttattgctggtggatggcataaaacctgtgatggccgttgagatcaaacactcgtccacgccttcggtaccgaaaggtttttatacggtaatggacgatttgaaaataaaacgtgggcatattattacgcccaagaacacaccctttcagcaggataaacgtgtgcaatcgggcagcctggcacaattcctgcaagaagttgttccggtattgtaaagcctgaaccgtgaaaatcgaaaatgccatttttgattttcacggttcaatttctgttcgttgtattttaataaaaatctttaatacacaacgtcatgataaaacgcaccctgtactttggcaacccggcttacttaagtacgcatttagagcaactggttgttcgtttgcccgaagtggagaaaaacgatacactgcctgatatttttaaaaaagaagccacagccaccatacctattgaagatattggagtagtaattctcgatcataagcgcgtaacgatatcgcaagcattactggctaaactactggccaacaatgccgcggtaatcacatgcgatagcacccaccaccctaccgggttgcttttaaatttagatggccactcgctgcaaagccaacggtttaaggcacaaatggacgcgagcgaaccattaaaaaaacaattgtggcagcaaaccatcaaagttaaaatccaaaaccaggcggctgtactcaaaatgcaaggctatgaaattgaaaacatgctgcattgggccgataccgttcggtcgggcgaccctgataatctggagggccgggcatccgcctggtattggtcaaaagtttttaaacctgaactggattttattcgggatccttccggtgaacctccgaataaccttctcaattatgcctatgctattttacgggcctgcattgcgcgcgccctggtggggtctggcttgttgccaacactgggcatttttcatcgcaaccaatacaatgcctattgcttagccgatgatataatggaaccttaccggccttttgccgatagactggttctttcgctcataaaggaatttggtacacaagcagagctgacacctgaagtaaagaagaaactgctgaccttgcctgcactggatgtagtactgcaaaatgaaaccagcccgatgatgattgccatgcagcgtacttcggcttcgctggcgaaatgttttttgggcgaaacacgaaaattagcctacccggaattgcaatgaaaaccgagcgactaaacgcttaccgcattatgtggataatggttctttttgatttacctaccgaaaccaagacggacaggaagaactataccgatttcagaaagaggatgatgaaagacgggtttaacatgtttcagtttagcgcttacctgcgccattgtgccagccgcgaaaacatggaagtacacctgaaacggattaaaaaaagcctgccccccagggggcacgtaggtattttaaccgttaccgacaagcaatttggcatgatgcaggttttttacggtaaggaagaaaaaccaaaagccccgatgccagaacagttggaactgttttagcccggggcttttcaatagattgcataccgtaatttttaatcctgattttgcggctaagttgttgatttagaaagcatttacgaggggtactctgtatgcaatctatcaaagaacacaatctgaaagcaaatcacaaccttcttgtttacggaatttcttttcttggtctgtatgcaatctatcaaagaacacaatctgaaagcaaatcacaacaattgatagtcgtagtactcttttttatcttctgtatgcaatctatcaaagaacacaatctgaaagcaaatcacaacttgcctgccgaggcattggccggtacctcatctgtatgcaatctatcaaagaacacaatctgaaagcaaatcacaactgaaaatttcaccagtttcagggtccacgttctgtatgcaatctatcaaagaacacaatctgaaagcaaatcacaacccttcgttgtaatacgtaccgattccaaattctgtatgcaatctatcaaagaacacaatctgaaagcaaatcacaactttgtgctataatagatacgaatattcagtctgtatgcaatctatcaaagaacacaatctgaaagcaaatcacaacccattaacttccatcctaacggtgttggaatctgtatgcaatctatcaaagaacacaatctgaaagcaaatcacaactaattgtattcgctcccgttaatgtgccatctgtatgcaatctatcaaagaacacaatctgaaagcaaatcacaacctttggcgactcttattattgtgtcttgtgtctgtatgcaatctatcaaagaacacaatctgaaagcaaatcacaacttttaacaccaacaatcacaattccatacttctgtatgcaatctatcaaagaacacaatctgaaagcaaatcacaacgtattactcgctgctgctgttcccgttgcatctgtatgcaatctatcaaagaacacaatctgaaagcaaatcacaacttagccggaatagttataagtatagggctatctgtatgcaatctatcaaagaacacaatctgaaagcaaatcacaacaataaaagattgctggaaggagatcaaaactctgtatgcaatctatcaaagaacacaatctgaaagcaaatcacaacaatgctgggggaatggggttgtcagtttatctgtatgcaatctatcaaagaacacaatctgaaagcaaatcacaacaaaatcatagattaattaatttagttgttgtctgtatgcaatctatcaaagaacacaatctgaaagcaaatcacaaccgcagcttgcttcttatcctgagcggcttttctgtatgcaatctatcaaagaacacaatctgaaagcaaatcacaactatcggtatctatattatttacgttgccaatctgtatgcaatctatcaaagaacacaatctgaaagcaaatcacaactatcgg

SEQ ID NO: 2600 - DNA, 18125 bp, synthetic construct
  source 1..18125: mol_type = other DNA
  misc_feature 1..18125: note = Synthetic
tgtggtcatcaactcattgatgtccttttttacggctgctaaatcaagtgatttaaattcttctgcatagttaaactgctcatccatcggattagatagagaagaacgttgacgcagaatgttcagcttcaattgattaggccaccaatctcggtttgtggtaccattacctgcactttgctttagcgcacctccatgaaaagggcatttaccctcaccattcatgttgtaggatgttgtgcttgcgtgtggattgttttccatttttggttgatttacaagttgttacttatgaaagattaataatatactttattgatgttatttccgctgattaatgtcatgcaccctgtttacaaatttcattttaagcatacaaggttaaggggttatgcttaataaatcaaattgattatctttataaacatatagttaatatctatgactttaacacaactggagtatattgtagcactagacacctatcgtcatttcgtactggcctcggagaaatgctttgtaacgcagcccaccttgagcatgcagattcaaaaactggaagaggagttggatgtgaaaatatttgaccgtacaaaacagcctgtaattcctacagaaattggtgccagtattattgcacaagcgcgcattaccttgcgcgaggccagcgtaatcaggcaagttattgctgagcaaaaagataatatgaccggtgaaattcgcattggcattattcctacacttgccccttacctcctgccccaactgtttaaaaatatccgtgaaaaatatccacagattaatcttgtgatcaaggaaacaattacagaggagatcgtacaagagttaaaatataatcgcctggattgtggaatagtggtgacaccactaaaagataattccattaaggaagatattctattctacgaagagctattcgtctatgtatctaaaaaaaatgcactccacgataaaaaatatgtgatacccagcgaaattgatcctaatcaactttggttattggaagaaggccattgtttcaggtcgcaggtgctgaacttatgtgaattacgaaaatattcgaatgttaattttaagtatgaaacgggcagcatagaaacattaaaaagaatggtggataaaagtgatggcataaccattctacctgaattagcggtaatggaatttagtcaggcgcagatgaaacatgtaaaacgcctgaaagacccgagccccgcacgtgaagtaagcctggttactcatcgcgatcacgtaaagatgaggttgattaattcgctaaaagaagaaatacttagtgttataccaaagcccatgcataagttacaaaagaaaaaagtggtggagataaactgaatctagaactgttattgtcaaaatcacaccattaagcttaatccatccacaaataattattcttctcaaattacgccttgctctctcagacaaaacaagggatacacttatactccttagcgaattctaattaccaaatttttgaaacaatctattcaaaaaattgaattttcaagttgttgattcttagcaaggccctgcattaaatggactaaattggataaaaaaaggtcttccttctctcaaaaatagatcgttaattgagctatccaattaaccataaaatatatattatgaagaagaaaaaaattgtttcaatactttttcttctggccattacactcacttcattaaaggtacatagtcagaatgagcgaaaggttgtgttgcaagccttttggtggaattactataacaataattaccctgaaggttggtctaattatttaattgctttagcaccccgacttcaagcgcttggtattgatgcgatttggattcctccagcaacaaaaggtaacaccggaactgagagtgttggatacgatgtgtttgatcattacgatttgggggataaataccagaaaggaactacaccaacaagaatgggcacaaaggatgaattactgcgccttgttgcagtgatgcatgcctacggtattgaagtaattgcagacgttgttcctaatcacgtaacaggtgcaggctcaagtaccggagctggtggaattgatcccatggcttggggtgatcaatacaagaattttagatacacttgttttcaaacaccttccattgatgaaagtgctggagactatctgtcaaggcaaggaaggttttcaaaaaactggcaaaacttcaatccaaatccagcacaaccttcagaaaattatcccttttataatcaaatgtttggacctgatgtctcatatgaagcagggtcgtatggtcaaagttcaaacgcaatcttcaatccattacaaggagaaaaccacatgcgcaatggtatgcgtgattggctaagatggtattataaacaagttggttttgacggagttcgcttagatgcagccaagcactatcccgcctatgtaacagaagatctactctggaatcttcagaataatgtaaattgggcttcaccacacccaccctcatggaatacacaaggagatgatttatttgctgtatctgaatacgttcaagaacccgggtatgacatggatgccttttgtgatgcatcacaaaacagaacaggaacgtttgactttaacttgagagatggtttatatgaaatgtctcaggcaggaggctttttcgatatgagtactttaccttctcgccaacaaaataacagaaacagaacagtgccttttgttaataatcacgacaccttccggccaatgcttgatggtagtggaaactacattggctggaatgttggtgatgaattacgcccacatcttgatccatttaaccctagaatgattaccgcctacgccatggccttagctgttgatggttcacctcaaattttctttgaagaccttttcaatattggtggaactggcatgcgctggagtcatgatcctgccaacctgactgagttgccagtaaggccacgtttagagaacttactctggtgcagaaaagcacttaacttttctgatggaaactatattgtaagtacagttagtggagctccgagttacagtcttggttctaccccacaagatttacttgtaattgaacgtgatcctgctggagataataatagtttagcacttatcgggattaacgataatggagcaaattggcaacaagtttgggttactacagattttccagtgggtactacacttattgattattccggtgcgaatggagcatggtcgtatgttgtgcctaatgataaacgtgttcctgtaaatgttccgccagccaatcaacaatatggtggctattgtgtaattgccccaaaaggacaacaaggagaatcagttgcttctacacctgagtggacttggcaagaatgggaaatggcaaatgatcttggcgatagtcatccgcaatcactagaacaaggtggtgcccttcctgcttttgacaacactacatggagaaccgttggaaatatatacttaggagtaggaaggccagtaaacgtactcgcgtatcaggaaagagtgttagaactaggtttacctgctattcctgtagatgttgaaatagtgcgaacttcagacggtacagttgtggattcctattcgggacttgtaaacggatggtgcatgacctacttagctagcactgagggctactatactttacgtgtaaaaaatgctaatgctggtaatgccagtcagcgactttgggtaagggctacctacgcactcacaactaacttgcccgatttgtttgcatctattggcaaacctggtagtttaacaattaaaacctcctcagctaccaaagttgaggaatcaaaaacaacattgtcactttcaacttcacccaatccattagctgccaaaagcaccatttattttactatacctaatactacctcagttaagttgacacttttggacaaagatggtaaaacccttagcgaattaataaattgcaccatggataaaggttctcataaaatagaaattgacttatcaagctacagtacaggaacctacatttgcagacttgaaactgcagagggtactttaaatgatagattaattatagaaagataaaatacttatacattaagggacaggttatatctgttccttaatgtattcaaataggagatctatttatcaaaagaattattttggaaccttactactcatctcaaataccaaattcccgccttctattaagtctgcgtgcttaataaaattacctgtcaatttttctccattaagcattacacttttcacataaacatttttatctgactggttaagtgctttaatatttaatgtctttccattttcaaggttaagcgtggcttccttaaccaacggactccctagcgcatactgatcagaacccggtgctaccggataaaaacccaaggctgaaaacaaataccaggcgctcatttgcccggcatcatcattaccccccaaaccagctgaaccattgtgatactgatgtcgcaaaatcatacgtacacgctcttgtgttttccagcccttacttgtccagttatataaatacgccacgtggtgagcaggctcattaccatgtacataattaccgatgatgccctcacgtgtaatgtcttctgtatgtgcaaaaaaagcatccggtaaatccatggtaaagagtgaatccagatgttcggtaaatcttttttcgccacccattaatgcaatcatagccgctgggttgtgtggtacatacaaactgaagttccaggcgttgccttcaatgaagccctgtccctcggtattcaatacatcaaagtcttttttaaatgtaccatcgcttaaacgcggacgcatgaagccaatgcgcttatcgtatacattacgccagttttccgcacgtttactaaattcttgataaatgtcctcgcgtttcagatgtttagccagttgtgcaatacaccaatcatcataggcatattctaaggtagaagatacagacgttccgtttttgtcacctggtatgtaaccgagatctatgtaataaccaatcccctcataacttctttttcgggctgtggcaacgcaggcgtctaatgcatattgtgcattaatgtttgcattgcctttgataatagcatcagcaattaccgaaacactatgatagccactcatgcaccagttatcgttcgcataatgcgaccagataggcaacatacctaaggcgctttgatcgtaatgtgctaacatggatttaacaatatcaccattgcgtttgggattgatcaaattgaggtaaggatgaaaagcgcggtaggtgtcccaaagcgaaagtgacgtatagttaacaaaatctttagcctggtgtacattctgatctaaacccttatactcaccattaacatccatgtacaaggttggcattaatgccgcgtgatacatcgctgtatagaagttgattttatcttcttcgttaatggtttgtacctgaatcttatttagctctttgttccaggctgcttgcgcttcagtcttggcttgttcgaaattccaatgtggaatttctgcctgcatgttctccaaggcatttctagtactcaccggagacaaggccagtttcatttttactttttcgctagcctctgtttcaaaatcaaagtataacctcaattgtttacccgctaagtcagggtgatttttagtttgatcgaacttgcgccagaaacctttgtacacttgcttttttgaatagtcatttgcaccatactgtttaaatggttttgaaaacgataaggcaaaataaaccgtgcgggtacgcgaccagccgttagtttgtctgtaacctgtaaccaatgtgtcattttcaatacgcacgaatgtccacacgtttttgtcttcgtaattataaataccagccatcaagtccaatataatatgtgcctcttctgaagccgggaaagtatactgatggaaacctgttcgctgcgaagtagtaagttcagctacaatattatggtcttccaactttactttgtaataaccaggctcagctacttctgtggcatgtgaaaatctggatctgtaacctgtctccggtttttcttccgtacccggattaagttgcaatgcaccagcagtaggcatcaccaaaaaatcacccagatcagaatggcctgtaccgctaaagtgcgtatggctaaaaccaacaattgttttatcatcatactgatagcctgcacaatatttatacacatctttattatagcggttgtttacttcataggggatagtgtcagtatccggactgagttgtacagcgccaaaaggaacggttgctccgggaaaggtatgccccattttttctgtacctatgatgggtttggcaaagggaatcaggttttgctgcgctgatactgatgttgcaagcacaaccaaaaacaataagctaagtaagttacttttcattggacaagtaaatgaattattcaacacgttattaaaagtaaaaaaatcaacgcttctcattcgaaaaagaataaggataagcatcagctgtagtgcctctttttatattaggtttcgctgacatggagaaattcaatacagcacccttcatcagttcagcatgactcaaccagtttttcgtgtaggttttaccattcaacttcaattcatctacaaatctgttttgttctccattattagctgcattaacaataatctgctttccattttctaacgtcagcgtagcctttttaaataaaggtgcgcctaacacatattgatcgctggccggacatacaggataaaaacccagagccgagaaaatataccaggcagaagtttgcccgttatcttcatcaccacaataaccatcgggcgtagcggcatacattctattcatcgtttctcttgcccaatattgtgtcatccagggagcaccagcataattatacaaatagatcatatgttgtatcggttgattaccgtgtgcgtattgtcccatatttgcgatttgcatttcacgtatttcatgaattacaccaccatagtaggtatcatcaaattttggcggcaacgtgaatacagaatccagcttgcttacaaatttgttctccccacccatcaagtctatcaaaccctgcacatcatgaaaaacagaccaggtgtagtgccagctgtttccttccgtaaatgcatcgccccatttaaaagggttgaatggagattgaaaacttccgtctttatttttaccgcgcattaaacctgtttttttgtcaaataagtttttgtaattcatgctgcgttttgcatacacctcaatttcagttttcggtttgttaagtgccttacctaattgataaattgcaaagtcatcgtaagcgtattcaagtgtacgcgctgcattctcattaatctttacatcgtagggaacataacccagctcattataatactgaacgcctttacgacccacagcagatacaggtccttcatgattagcaccatgaacaagggcttcatacaatttttcaatatcataaccccgtgcccctttcagataagcttcagccaccacggaggcagagttattgccaatcataatgtcggcataaccaggactcgaccactcaggaagaaaaccaccttcgagataagcattcaataaaccttcctgcatttctttgttaatagcaggatacatcagatttaagaaaggatacaaggcgcgaaaagtatcccagaagccagtgccgccaaacatataccctgggagtattttaccattgtaaggactgtagtgcataatcttaccagctgcatctacctcatacaatttttgtgggaagaataaagttctgtatagacaagaataaaaagtacgcaactgcgcatcacttccgtcttctacttgtattttacccagtgttttattccaaattgctttacctttagttttaaccgtttcaaaatcatctttacccaactcgcgttgcaaattcaattcggcttgttcaaagctgataaaagatgaagccacacgcatttgtatcttctctcctcttgttgttttaaatccgacaacaccaccggcatgattggcatacaactccaaagaatccttcaccaatacattgccacgccaggtatgcgccatggtaaaagctttactcaggtagatcacaaaataatttttaaaattggtcaagcttcctcttctgtagcgggtagagtagccgataattttattctcttcaggaatcactttaacatacgatcccttatctatggcatcaatcactataaaagaagaatcgctttcaggaaaagtaaactgaaagatggcggctcgctcggatggtgctaactctgtggttacatccgcatcggccaggtaaacactatagtaatagggctttgcaacttccgatttatgcgaaaaccaactcgcgcgatcgtcctggttaattttgattttgccaacggtgggcataatggcaaactgaccgtagtcgttcatccatggactgggctgatgggtttgtttaaaaccacggatcttgtccgcatcataagtgtacatccagccatcgcccattttaccggtttgtggcgaccacaagttcatgccccagggtaaaccaatggcagggtaagtattaccgttggatagtgacactttagagagtgtgcccatcaagggattaacaagttcttctggctcagcaatttgagcaaacagcagatgactgattagaaacagacaaagtgtaaaaattcttttcatggttaagtcttggttacttaaaactaaaaaataagtacatggaaaagaagtttcttatcgccactcatcataaaatcaacaacaatcgttttgaccttacacctcatcctatcatcaacgattgcctttaacttgcattacttaacttttgttaagttgtcatgctgttttaaagtgatacatttacttacagtagtgtacaactaaaataaactcatctttaactacttgaggttatcaaatttcagttggacaatagcaatttacttacgctaataattaatacctatgcgcgcttttcccttcttatcattacacactacacttatactgctaagaatagcaggtgctttaattttcattacgcatgcggtagtgagagtagccaatggaaccgtagaacgtttcggatcctttttggaaagcaaaggattgccgttggggatagcaacggtgtggtgcctgagtgcttttgaaattgtaggtggtgtattgctggccttgggctattataaaaaatggctatccgcaggtttcattttaatcttacttgttggcattatacttattcatgcctcaatcggttggtttgtgggcgaacacggatcaggcggcagtgagtatagctttattctgattgtggctttgttggtaattgctgctggagatgaaaaagggaaaacaaagtaactgaaccaaacagttttacccataaatgactcttaaaccggaggtaaatccctttggttgagtagctactcttctgtataagctttttaggcatttttacagagatcaaataagcctgacacattcgatttagtactacaacagttcagttaaattgggttaccctcactaagcagaaaaatcggcacttgccaattggctgttacaagacaactatactcctgttcagattttaactttttacacgaatttcctatatttatttaacagtaactagtcttctcgtttgtagcctagcccacctcaatagagaaacaggaagcagtccgtgaaaatgacattaattgtcgttggttgattttattttagtgatagtagagagaaagtagagggcataaaaaagccccaccgaagcagggctgagaaaatcttcggcttatagccttattgtgatttgcgctactaaattattaaaataataacaaaaaacaagacgatgaataaaatatttgcacttgacttaggtacaaattctattggatgggcactccgtaatcctgatttaccgacaaaccagattgaaaaattcggggtattaacatttaataaaggagtcgggatcggtaaaaccggagaatactcctatgccgctgaacggacaacgaagcgttcaacacgaagattatatcaagcaagaaagtacaagttatggaccacccttgaacacctgataaatgaaaactattgccctctgagtattgccaatctcaacaaatggagattatacgataaggaagaagccagaaagaacaacaatggtggccgggtttacccggttgatgatatggctttcgatgcatggattaagttagattttaatggtgatggtaagcctgattataccagtccctatcaattaaggaaagagttggcagaagtaaaactagacttcgccaaagaagagaatcgctttaaactggggcgagcattgtatcacatcgcgcaacgaaggggttttaaaagcagtcgcaaaggtacggatgatgcaaaagaaaaagaatcaaatgacgagagcgaaatagccgatctgcaatattcagagaaaaagaaaaacaaagttatattagaattacttgaaaagtatcccaacgcaaaaacaattgggatgttgtttgcccatcttgaagataatggaataaggattcgtgaaagcatagttcagtatgctatacgagagaattttaaagaggagattaaatacatctttcaatttcaagatttatcattaacaaactccatttattgcaagctggctgaaaccggaaagaacaaaaatgatggaagtatcttttataaacgacctttacgttctcaaaaaggattaattggcaagtgtacgctggagccaagcaaatacagagcaccaattagtcatcccagttttgaaattttcagggcttggtcatttctgaataatattaaatacaaacccatcgatgataacgatgggcaatggaaaccgctgagtcttgaactaaagaacaaagtctacaataaactattcttccgtaagaaaccttattttcctttttctgatatagctgatctgttagaaaaagaagggaggaaactacatctcaattacaaacataaaacaaccgtaactggctgccctgtatcagcaaggctaaaagatattttcggtgacgattacctgaacatcaaaatacctaaagtaccatctgcaaaatcaaagaagaattactataacatagaagatatctggcacgtgctcttttcttacgaagaccaggagtatgtaatcgaatttgctgagaataaattaaaactgaatgcagaacagaccaagcagtttgtaaccacatggaacgctacccctgtaggctatgccatgcttagcttaaatgcaattaataaaatcaacatcttcttacagaaaggattgatatatacagaagctgttttactcgcaaacattccagagatattaggcaaaggcctatggatgaaaaatgaaacgctattaattggtgagattggaaaagtgatagatgaaaacagggagcagaagacagtacttactattgtaaacagtcttgtttcaaagcataaaaacttagagaataatgaaaaatttggatacaaagacaacaactataaactggataaatcagactttgatacgattgaagaaaccataaatgagcaatttggcgcaaaaagatggaccgaaaaaacggaaacagaaaggaataaaatatccactgctataaaagattgctatcaagcctacttcataaccactggacttgagcgaaaagacattcacaatgaacgccacttcttagtaaaatctagcaacaacatttattacaaaagcgattccggctattatcgcttaccaaaactgatagacacattaggtgagtttttgcaattgaactttaatgtgaacgatgatacgctaaacaagatctatcatccttcagagataagcatttatccatctgccaaagcagataaagatggtgtgctgaaactagggagtcctaaaacaggatcgtttaaaaaccctatggccatgcgagccttacatgagctacgcaagcttatcaattacatgattgagacaacccagattgatagcgatacacgaattgttgtagaagtagctagagagctaaatgatgctaataagcgctgggctattgaagcctggcaacgtcaacgtgaagcggaaaatcaagaatttgccgaagctataaaacaacttttgcaagatcatgaaggcattaaagccaatccagaacgtttggatgatatagacaaaatccgcctattctacgagcaaaataatgaacaacttcttcctgccttggaagaaaataatgaggatgataaggatagaaagaagcgtaaaaatagaattgaaaaagacgaggcgataagatggagtggacatgggaaaaagcttattgacaaatatcgcctttggaaagaacagggttatcaatgtttatacacgggtaagtttatcaaactcacagacttgtttgacgaaaacgtaattgattttgagcatactatcccaaggagtatttcatttgacaattcgttagccaatcttacagtgtgttacgctgactataacagaaacataaagaagaatcaaattccattcaacctcaacaattatggtaaagattatgatggatattcggccatattgccacgtttagaaaaatggcaagagaaagtcgatcggataaaacaacaaatagatttctgggcaactaaatcgaagaaagcagcggataaaaattggaaagatgacgccattcgtcagcgacatttatggcaaatggaactcgactattggaaaaataaagtagatcgatttactatgcaagaagtaacgagtggtttcaagaatagccagaaagtagatacccaattgatttctaaatacgcttttcactatctgaaatcttactttgaaaaagtagatgtacaaaagggaagcatcacttcagaatttagaaaaatttatgggctacagatacccgatttaaaaaaagacagaagcaaacattcacaccatgcaaaggatgcagcagtacttaccctgatacctgcggctgctaaaagagatgagctacttaaaacctattatgagcatcaggaaaaaagacaatcatttacagccgagccttttaaagggtttaagcgtgaatttgtttgggggatagatgatagcattctgatcaataatattacaaacaatcaagcactcacacccgctaaacgcattattcgtaaacgcggtaaagtgcagttcattgaaggcactcaaaatcccaaaatcgccactggagattgcataagaggacagcttcacgatgagacattctttggtgccattaaaccagccaagagaggtgaaaaaggaaatatcattagggatgaagaaggtaaaataattcaagaagatattcgatatgtagtgcgagttccatttcaatttaaaaaggacactaattctcctggatttaaaactcttgaagaaatagaaaagcaaattgtagatgaaggactgaaaaagcagataagagtgcaagtagaaaaggcaggaggcctaaaagaggctttcgagcaaggcatttacatgttggggaaaaaaggagaaaagatcaataaaataaggcacattcgggtttttaaatctgcaactaagccattggaaatcaaaagacatacctacttatcaaagcactcttataaacaaaactattatgcaaacaatgcatcaaatagttacttcgcaatttatcaaggggcagataagaaggattgtgattttagaaatcttttcgaaacagcaagaataacttccacaaatacaattgcctccaaagaggacctgttcgaaaaattcgttcatcttaaaaagggcaagactcagatagaattaagattaaaatgtatccttgaaacaggcctaaaaattgtatttatcaaaagtaaagaggaagattttaaaagcatgccacttgatgagttatctaaaagattttatgtcttcaccaacttcgaaagcgatggtcgtctaaatttcaagtatcacttggaggcaagagagagtaaagaagtaaccgaagactataaagattcagaggtagattttgataatccaaaaccgacacttcgttttgcttactctaagtatgatttttttgtagagggatatgacttcaaaataaaaatggacggaagcattcaatggaaataatacacgatcatcccctgctgctaatcaaatgcgaggtgtagctggtggtgttttataaaagtaaagtaaagtaaaaataaaaccagacctgacaggtctcgatagcgaattaataaagacctgtcaggtctggttttatcagcaagataattaatacttgtcaggcttttaattaataaatggaacctgaaaaatcatatcacctctacacgcacgccaatggctcagaaaatctctttcgtaatgacgagaattttcgttatttcttaaaacggtatgaagcatttataccaggcgttgccgataccttagcctactgtctgatgcctaaccacctgcacctgttggtgaggattaaaagtgaggctgaattaaagacgttttttaaaagtaaactaaaaataaagtcagaagcgacaggcctcgagagcgaaagtaataaagacctgtcaggtctggttatattacaattcagccacctcctcaacgcgtacacgaaagcatataataaagtttataatcgtagaggctctcttttcacgagagctttcaggcgaaaagaaattgttaacgacagttattttaccaacatcattcattacatacaccataatcctttacaccatggttttgtaaaacaactcacagactggcactggagttcataccacgattttctcctgccggaattaacgcctgttcagcagcaagtcatcaactggtttggcaatagtcagcagtccgtccagtttcatcaacaagtactgaaacctttacccgaaattattccacatgattaagcgcacactttattttggtaatcctgcctacctgagtcgcaaagacgaacaacttgttgtacgtctgccagaggttgagaaaaatgacaccttgcccgaaacatttaaaaaagaggcgcaggcgcttatacccattgaagacataggtgtagtcatactggatcatacacgccttaccattacacaatacctcattgacggactacttgaaaataatgtggcgctcatcacctgtaacagcctccatcatccgaccggactgatgcttaacctggctggccataccctacagtcggctaaatttaaagtccaggttgaggctagtgcgccattaaccaagcaattgtggcagcaaaccattaaagcaaaagttagcaaccagggcttgttgttgaaaaggtatggcatagaagctggtaatctgatgaagtgggcaggcgatgtgaaatcgggtgatgccgataatacagaggcacgagcggctgcttattactggaaaaatattttccctgaaatagagggcttcaggcgcgagcgcgaaggcataccgcctaataatctattgaactatacttatgcgattttgcgtgccatcattgcgcgcagccttgtcgggtcgggcctgctacccacgctgggcatttaccaccgtaaccagtacaaccattattgcctggccgatgacatcatggaaccctatcgcccctttgccgatgcgttggtgtgtggcattatccggaatggtgaagtgtatgatgaattgaatacatccattaaaaaacaactattgagtattgcctcggttgatgtgctgatggatggtgagcgtagcccgctgatggtggcagcgcaacgcactactgcctcactggcaaagtgctttgaagggaaagctaagcggataatatacccggagttgtccgattaagatgcgcctcaatgaatatcgcattatgtgggtaatggtatttttcgacctgccggtagaaaccaaaaaggacaggaagaactatgccgaattccgaaaaagtatgctgaaggacggtttcaccatgtttcagttcagtgcctacatgcgccattgcccaagtcgggagaatgccgatgttcatgttaagcgagtgctcaaaaacctgccacccaaagggcacgtgggtattttaaccattaccgataaacagtttgggatgatgcagattttttacggcagggaggaaaaagaaaagcctccagtaccccaacaacttgaattgttctaggtaaaggaggcttatttttgacaacacatccactaacaggcaagcatctaacccatttttaacacactaaaaggcttgtaacacactgatttacagtggaaattcgccaaattagttgtcaaagatcgtttgttgaaagcaaatcacaacacatacaatgtttcaagcttgaccactacagttgtcaaagatcgtttgttgaaagcaaatcacaactcatcatcttaatgctactattccttacggttgtcaaagatcgtttgttgaaagcaaatcacaactgcacagtttcaaatgaaattcaatggccagttgtcaaagatcgtttgttgaaagcaaatcacaacgcactatcctcaatacttcccatcatcatggttgtcaaagatcgtttgttgaaagcaaatcacaacagcagtagctgcaactgaaaaagttgtattgttgtcaaagatcgtttgttgaaagcaaatcacaacatggattggcctcgccatcggtgcggtcggttgtcaaagatcgtttgttgaaagcaaatcacaacaaaatctatattcattcaaaggcctttcttgttgtcaaagatcgtttgttgaaagcaaatcacaactaataagcttaacatggcgaagctttcaggttgtcaaagatcgtttgttgaaagcaaatcacaactttctttcatttgagcctaaaacaaaaaacgttgtcaaagatcgtttgttgaaagcaaatcacaacttagagctgtataacgaaactttgcctgtgttgtcaaagatcgtttgttgaaagcaaatcacaactatcatgagcggctacttctatccgataccgttgtcaaagatcgtttgttgaaagcaaatcacaactatggtggtgcgattagatctaatttggaggttgtcaaagatcgtttgttgaaagcaaatcacaacatggccacttcaaagccatgttgtaccagcgttgtcaaagatcgtttgttgaaagcaaatcacaactcattattgagggggttaataagacaatgagttgtcaaagatcgtttgttgaaagcaaatcacaactaacgataaggataacggccgaccagttgggttgtcaaagatcgtttgttgaaagcaaatcacaacaccgctgcctggcaagccccaaaacatcatgttgtcaaagatcgtttgttgaaagcaaatcacaactgcgttggatgtgtactgataaaaaggcgagttgtcaaagatcgtttgttgaaagcaaatcacaacagcaatggtgtattgtctgcctttttcttggttgtcaaagatcgtttgttgaaagcaaatcacaacaacattcagtgtttcaatttacgtttggtggttgtcaaagatcgtttgttgaaagcaaatcacaacataagagcgacagcgaaaaagtagggctgtgttgtcaaagatcgtttgttgaaagcaaatcacaaccacacccctgacgatgtcgcgagcaccttggttgtcaaagatcgtttgttgaaagcaaatcacaacacctcattatcacttttggcacaggtatccgttgtcaaagatcgtttgttgaaagcaaatcacaacaaaccagcgttgacaaattgcaaaaggttgtactaaccccctataagactggacaagaatctgaaaacagatttataacagttaaattagggaaatatgccaagaggaaaaagaacattcacaccagaagagcgattaagccttttacaggaag

SEQ ID NO: 2601 - DNA, 17085 bp, synthetic construct
  misc_feature 1..17085: note = Synthetic
  variation 7867..7868: note = n is a, c, g, or t
  variation 4292..4293: note = n is a, c, g, or t
  source 1..17085: mol_type = other DNA
acatacctacgttccaataagctgcggctttcttctggccatccggaacatcggtcatatcctgtattttacttatgttattgaatgccagacgctggttattactgttgtacacatctccaccgtttttccaatctaacaatacatacaaggtaaggcctttataattaaaggtgtttgcaagccccatgttaaacttagcatttccatcgccaatcttacctaaccaaactgcgccattttcctgatacaatactggtcgttcgttaacagtaccttcggtaccagcccggataacatagccttcactgttcactacataatcactgatagattctccacccggaagctggttggccatttcatccagggtacgcaccattttatgtccgtaaattgcaccatacgtttcgccagcggctacccggaatgctgtaacatcaccactaacaggacttaaccaatatgccggaattggcaaatcggtaattttctggcgcacccttgagaatacgatgttggatgtccatgagaaatcttgttttttcatccagttggcacttaatgtaaattctaacgtttttgattcgattgaacctgcattttgccatctgttgctatacccaccattcaggaatggaataagctgcacattgaggaactgatcggttgttgttgactgtgcatacgttccttcaaagctaaacttctttaagaagtctacattcaaaccaaactctgtctcagcagtttgagaaggcttcaacagtctgttaccatcttgtgcttttgtagcattaccttgagaaaggttaaatatctgatattgccaggagaaatcagggcgaataccggctgtaccataggctactctaaccttcatttcgtctatacccggaagggttacatcctgcgacacacgatacgcaccggataatctgtaatatgggttccatcttgcatctggaccaaaaagcgatgatccatcataacggaacataccatcaaacagatacctgtctttgtaatccaaacctaaaattgcaaaatagttttgtgctacttcgttggttttattagaacctgcattgtttatggaagcaaagttattgaatgcttcaataccggtaactctaaatacagaggcgcttacactggtatactcatagtgacgattctcgtataggtaagagagttttgatttaacaatcaggtcgccaaactgtttattgatgttaaacgtaacctgtgtgttttgtgttgtcgtttcgtcactttcatgcgagaggctacccccactgtaaacaccttgtgttgtccaggtatctttcgggttaattacttctcttctccaattttcaatttcaaaagtctgagtaagatcaagatttaaccagttggtgaattcaatattagctgtatagttacccatccatctgcgcgaatgtctgttgtccttttgtttgtaaaggccgtacagcggattggttacctcgccattaaagtgattaactcgtaagttataaggctggccatctgaattgggtgcaaataaatcaacatcatgttccattctggctacgttataaaaaataccagaaggctgttgaatttttctgttgatatacagatttgatgcacttattcttaaccaaggtgtaatttcctgatcgatattgaatctgaaattctggcgggcatacccatcgcgatactgcacaaccccttgctgaacgttgttttcgaacgaaaggaatatattgttcttatctgatttgttcgatacccctacataattggtcatcgaattacctacctgaaatacttttgccggatcgaaacgatatacaccatatggattatccatataaccatctgcatcaatagaccgcgatcctgtaatggcagaattttgtcctcctgtatacccggccgggaaagttacacctgcatattttgtaaactgacctttgaattgttcccaatcagaagccatggcatacatatgcgatttagatgtttccaaataatgttgcaggctttggaagcccacttcatttctaatggtaacctgaggcttacttgcagcaccgctttttccgcgttttgtagtaattgcaataaccccattacccgcacgtgaaccatacaacgcagaagccgcagcacctttaattacttccatagactccacatcgtctacgttaaggtcggccaggctaccactcataataataccatccagtaagatcaggggtgacgcgcttacgttcaatacgttatcacctctaagcaacaagtcaacttgctgaccaggagcacctccaactgaagatgttcttaaaccagctacttttcctgttaatgcagatgcaagtgacatagccggcacagcagttagttgagcttcgccaacttttgtaactgacaccgtcatcttttctttagtagtagcacccgcaacacccgaaacgataatctcgcctaacattcttgtgtctgtagacatgatcacatctattgtgtttctggcgccaacaacctcctcaactgaggcaaacccaataaatgaaaaaacaagcgttttatcgcctgaaacattaatggaatactcgccattagagtttgtaacaacccctgtggcagtgccttttaccactacgttaacaccgggtagtggtaagccatcttccagagaagtaacctttccggaaactgtacgttcttgtgctaaggcgcttgtaaaaggcaccaccagcaacaagaaaatacctaactgtaaaatttttcgcatactttttggtttaggttaaaagtaaattttattagataacacaaacatagaatattatttagttacggtaaaataatactttgttaatgagtgaatcttaaacagaaaaaacacctttcacggagccgttaatccctttaaataatcatctataatgagcggtaggggttatttggttgatggtttcactatcttaaactcaatacgcctgttttgctgtttattttcttcggttgtattagggaatagcggctttttggagccataaccctttatttgaatttgatttttggagattgccttattattaagaaattctgctactgatttcgctcttttttcagaaagtgccaaattatatgattcggagcccgtattatcggtgtgcccgctgatttcaaccattaaaaccgggttttttaacaggaattcggccaccttttccaattctgtgtaagactcttgtcttaactcgtacttatctacatcaaaaaaaatgttgctcagcactattgtggcattttcgtgcaccggctctaatgcaatatttctttctatgggttgataggttttgtccgttgcataattaaaatgctggctgttaaataaataacccggtttatctacgtaaagggcataatctgaacctgcgggtaataccatcaaatacttacccgataccgaatctgagaatactttagaaacagattttttttcggccagattatagagttcaacctgcgcgcgtaagaacttacccgatactttatcagtaaccacaccggccaccacattacccgtataaggtgttatccatttttcgggaagtataattctgtacaatctgcttctgttctttgattcttcacgcgaataatatccctgatttcctaatgccgatacaataaacgaatattgatcgcgatgatcatttaaaggcatgcccatattaagaggcttaccccaacctgttgcgtttttttgcactctgtatatatcatacccgccataacccggtaagccattcgaaaccacatagagctctctattattaacatgaatatagggcgagatttcatcttggggtgtgtttacctccggccccaggttaaccgctttgctccatcctaaatctgttaactgcgaataccagatatcataaccaccaaagccaccatttctttccgaaacaaaatataattcacggccatcggccgatagcgagggttgggcgtcccatcgggggctattaatattgggcccaaggtttttaggtcgcgaccacattgtacctgttttacggctttcatacaaatcgcaacccgatgccccacacacggtaaaaataatatggcggccatcggctgaaatagtactggctccttctcgttgaattgtattaatattagcagaaagtgaaaccggtgctccccagcttccattgctttgttttgccgataccaccaaatcttcgctatcgtttcgcccaccaccatanntcatacacggtggtgttggttaacgcataatcggcttgcataatccatacttttgctaacgctatttttctgcgatcgtcccgttcaatcaacagaaagtctgcagcgaattttttacataattcatattttgcctgccataaattaaccacagccagttcgtacaaatacatgcgtttacgcgcgtccgtttttgtaagagctattcctttttcaaatatttcggtggcctgatcatactgctcttgcgcttttaaaatagtagccagacgatagtatgcttcctcaaaattcttatcgcgggttattgcttcgtttagtaaacttacggcctgactaaactgcccccgtacacgaaagttatcggcttcggtataaagttcaagcgcctttttgttttttgagctaagcgtttgcgctaacccctgaacgcttattaacattaggaataggatgatacctctttgcatggacacaatttaaggattagaacgtaaaaccacattaacccgtatgtttaccggattgcatggattggaatttcggggctatcaaagcccagcatggcgttaatagttttgcacgactcatacttactcaaatcttcaacccggatttctgccagcttaatcttacctgtattcaataaatgggcacgcattgttccatttaataaaaacgtggttggtgtaaaccattctttgttctttttaaaaacgaggtttgcaatgctggaatccgttataaaaccatctttcacaataagaatctcatcgcaattgtcccgctgttcaaacaatgaggttaacgcttctctgtcagcatatttatgtgcatagtcaatattggcttctatcacctttaacgattctatatgcctgggttgataaagcagaaactcaattcttaacacctctttactattataaatcacccgtactttgtataaacctgttttcggatacttgaattgccttactatatcgtgaatggaccatgccggcaatactccaaataattcaaacacacttttttctattcgcacctgatgataattgaggttacgaaaagccccgtcattcaggtgtattgtttcaaacagccggcacataaattttttgaattacttcctcatactcgctctgccaaacactttgcgttgtaataccacctccgcttctgtagtaaactaagttttcttgttgctctataaaccggatgtttacgcagctgtcaagatttttaccatcaaaataaccaaatatgccggtatagtaaccccgcggctctttttctacatgttgaataacatgcaccgtcttatttttaggcgctccgcatattgaacctgccggtaacaattccattagcaaactccccatgcaatttttatacgctggcataatatctcccacaatctctgaactaacctgaattatttcgttgcgatttgtctttatcacatccagatatcgaaacttagatacccgcacattagttgctacccgcgacaaatcattacgaagtaaatctacaatggtaacatgctcggcagtttccttttcattatttaaaataatggatgctgcattcggaatagtcgcatcgattgttcccttcatcggatacgtgtagattttgtcttctgaaatttttacaaaactctcgggagaaaagaacaagaattgattgcgcaaccaacaccggtaaggagcctgcaccttaaagaacagttcttttaatgtggtattaatttctatgcgcgattttgcagtaaggttggcaagaaatgtattaccataattcagttcttgcagtactgcattaaactttatccggtattcttcttctttcaccggaaacacctgcaacgaaatatctcttttcgactttgcaggagcgggtgcattggtgaatccgtttattgaaaataataattcgtctgcattaacttcatcgggcaaccaaagtttgggtttctgcatttcgaaatcaatcagaaacagaaaggatttaccggcagtactcagcgcatttgctttgttaataaactcagttgtctgcacaacactacggaatgttcatatacttatgtacctgcaacgaaatctgccagcgtggattttgttttacataattaataagctgcggaagcatactttcttcttttgaccactcaggctgaaggtaaagtttgcaatcaggccttacctgtttggcgaaatcttcggcccagacaaaatcggttttatgaaatacaacaaccttcagttcatctgcccgttgggctacagaatcatgaggcggtttaaattttttaggcgagaaacaaacccaatcccaggtaccagtaatcggataagcacctgatgtttcaagatgcgtttttaatcctgcagctttcaatacacgggtaagcgcatcaagattatgcatagtgggttcgccacccgtaatcacacatatttctgtgccacttgcctttgccttttcagcaatagcatccatagttactttgggatggtcatcagcattccaactgtcttttacatcgcaccacacacagcgcacctcgcaaccgcctaatcgaataaagtacgcagcgcgcccctggtgaaatccttcgccctgaatggtgtagaagtcttccatcaagggtaattccgaattcaaaatttcagattcaagatttaacattatcttttctttcaattttgaattttaaatctattaaagatttcttaattcggttgcccgtaaagtgttcagtaataaagaagcaatcgtcatggggccaacgccacctggcactggagttataaaagaagttttaggtgctacttctttaaactctacatcgcctttcaggctatagccatttttgtattgagggccttccacgcgcgtagttcctacatcaatcaccacagcaccatcttttaccatgtcggctgtaattaggccgggtttgccgacagccgcaatcagaatgtctgcattgcgggtaaacatgctaatgtcttttgtgtacttatgacaaactgtaacggttgctttgccttcttccaccagcatcatgcttaggggcgcgcccactaaacgactggctcctactactacacagtttttcccttcagttgaaatctggtaacgtttcaacaattccattacaccaaaaggtgtagcgggtaacagcaagggttgtttggaaacaatgcttccgaagttgcgattagtaaaaccatctacatctttatcgggccgaattttttctgtaattttttctacagaaatatgtgccggtaaaggcaactgcacaataaatccatccacatcttcatcgcggtttacctgatcgatgtgtttcatcagtttgtcttcgctgatggtatcggcaaatcgcagcatcgaataatgaaaaccaacttccttacaggcttttactttatgatcgacataggtttgactggcgccatcatcgcccactaaaataatagcgaggtggggtactttttttccggcatttttgcgctccagaactttctcagaaatttctttcttgatgtcggtcganntcaattttcaacacagccataaacgcttcctgcggaatttctacgttacctacctgccgcatgcgtttctttcctttcttttgtttttccaagagtttacgcttacgcgagatatcgccaccataacatttggccaatacgtttttgcgaatggcacttatgttttcgcgcgctacaattttttggccgatagcggcctggatagcaatctcgaacatctggcgcggaattaactctctcagtttctcgcacaactttcttccccagtcctgcgctttgcccctatgtacaatagcacttaatgcatccactttatcgccattcaacatcacatccaacttcaccatgtccgactcgcgcatgccaatcaaatgataatcgagcgatgcatagccacgcgagatagatttcagtttatcgaagaagtcgaatacaatttcagacaagggcatttcgaacgtcatctctacccgatcggtggtaaggtaattctgatttaaaatctgcccgcgtttttcaatacacagattaataatagggccgatgtattctgctttactgatgatctgcgctttgatgtagggttcttcaatggtgttgatgcgcgttggatctggcatttcggaaggtgcgttgataaacacttcttcgccatttgtgagtgttgccttaaattgcaccgaaggtacggtggtaatcaccgtcatgtcgaactcgcgttctaaccgctcctgaataatttccatatgcaacatgcctaggaacccacaccggaaaccaaaccctaatgcagccgatgtttccagctcccacaccaacgaagcatcgtttagtttcagtttctccatagaagcgcgcaattcttcaaactcggttgtatctaccgggtaaattccggcaaacaccatcggttttactttttcaaaaccctttagcaattgcccggggttaacggctgttgtaatcgtatcgcccacatgcacctcgctggctactttaatacctgaaattaaataccccacattgccagctgtaatttcgttgcgcgggtgcttatctaatctcaacacgccaatctcatcggcaaagtattcttgcccggtgcttataaattttactttatcgcctttgcggatagtaccgttaaatacacggaaataaatttcgataccacgaaatgaattaaacaccgaatcaaaaatcatggcttgaagcggggcttttgaatcgcctttaggtgctggtatgcgttttactatttcttctaaaatttctgcaatgcctttcccttcttttgcgctggccgaaagaatgtcttcgcgcttacacccaatcaggtctatgatttcatcggccaccacttcggggttggcatggggcaaatcgattttgttcataaccggaataatttccaggtcgtgttctaacgccaggtacaggttagaaatagtttgtgcttcaataccctggctggcatccacaatcaacaacgcgccttcgcaagaagcaatagcacgcgatacttcgtacgaaaaatcgacatggccgggtgtatcaatcaggttaagggtatattccttgccctcaagtttatagttcatctggatggcatgggccttaatggtaatgcccttttccttttccaggtccatattatcgagtacctgggcttccatctggcgctggttaagggtgccggtaaactccagcaggcggtcggccagggtgctttttccgtggtcgatgtgcgctataatgcaaaaattccgaatattctccattcccgtcattccggtcgtgattttaaggctgcaaatgtagcaagaaataagggtaggaaaacgggttaatgcctgtagaattaagagaaattgggttggctggttaggcgttgggtattagatttaaggattaggggattgggtgcggtgtgaaaaaagacgaccccgacaagtcggggccgccttacatgttttcacaacggaataatccttattgtgatttgagtaataatttataaagaggaaagaataaaaaaagccccaccgaagcagggccaagaaatcttcggcttatagccttattgtgatttgcgatataaatgtaatgatataaactaaaaccaaaagacaatgagtaaaatcttcgggcttgatttaggtacaaattcgatcggttgggcattgagaaatccggttttgacggaaaaccaaattgaaaaatttggagtattaaccttcaacaaaggcgttggtttaggaaaaacaggcgagtattcatacgcagccgaacgaactaaaaaacgttcgacacgcagattatatcaggcacgtaaatacaggctttgggctacgcttgaggttttgataaccgaaggttattgtccactcacgattgaagacttaaacaaatggcggcattataataaagaagaagcacgtaaaaacaacaacgcagggcgtgtgtatccggtttggaacactgcatttgatgcatggataaaattagattttgataatgatggaaaaccggattattcaagtccttatcaactacgcaaagagttggcggaaaccaaaatggattttacacaagaaaccaaccgtttcaaactaggcagagccttgtatcatattgcacaacgcagaggttttaaaagcagtcgtaagggcgcagatgataatgataccaaagaaaaaaatgcggacgagaacgaagtaatggatttacaatattccgaaaagaagaaaaacaaagtcattgccgagttgtttgaaaaatatcctgatgcaaaaacaatcggtaggctttttgccttactggaaaacgacaaaatcagaatccgagaaagcattgctcaatacgccattcgtgaaaactataaagacgaaattaaattcatttttcaatttcaaggacttgagtttaaccattccctttacaccaaattagttgaaacaggtaagaacaagaatgacggaagtattttttacaaacgtccgttgcgttcccaaaaagggttggttggtaaatgtacgttagagccaaacaaataccgtgcaccaatcagccatcctgcatttgaaacatttcgtgggtgggcatttttgaataatatcaaatacaaagaaaacaatgagtggaagcaattaccacttgaattaaaacaagaaatttattctgaattatttttcaggaaatcgaaagcctattttccgttttctgaaataagtgcttttctaaagaaaggaggaaaagactggcaactgaattattcgcctaaaacaactgtaacggcttgccctgtttctgcaaggctgaaagatatttttggtgatgaatatttgaatataaagattgggaaagccaaagcagcaaagtcagataaagcattttatgatactgaagatatatggcacgttttgtttagttacgaagaccaggaatttgttgccgagtttgcagagcaaaagctaaaacttgaacccgaaaaagtaaagcaattcattattgcgtggaatgccttacccattgggtatggaatgttaagcctgaatgctatcaataaaatcaatgtgtttttacaaaaaggattgatttataccgaagcagttttgttggcaaacattcccgaaataattggtaaagaattgtggcaacaaaaagaacagtttctgcttgatagtatcagtggagttattaacgaaaacagaaatcaaaagacgatactcaacattgtaaacaatcttgtttctaaacacaaaaacttagagatcaacgaaaaattcgggtataaagacaacaattacaagttagctgaaagtgattttaacgacattcaagctgccatcgaagaacaatttggcgcaaacaaatggagcggtctttccgaagatgaaaagaaaactatttccgatacagtcaaagactgttatcaggcatatttctctacaagcggaatagttagaaataatggcaatgaagaacgaatcgtaactatccaatcaggaaataagaattactacaaaaccgaatcaggttattatcaattaccaaagctgattgacacactgagtgaatttttgcagctgaattttaatgtcaataataagcaaatcaaaaaaatctatcacccatccgaaatcaacatttatccaccagcaaaagaaatagacggagttttgaaattaggcagcccgaaaacaggctcattcaaaaacccgatggcaatgcgtaccctgtacgagttacgcaagctgatgaactatatgattgaaacaaatcagatagacagcgaaacaagagttgtcgtagaggttgcacgcgagttgaacgatgccaacaagcgttgggcaattgaggcttggcaacgtcagcgtgaggccgagaatcaagaatttgcggaagctattaagcagcttttaaacgaagacaaaaatgttaaagcaagtgcaaaaagtaatgatgatatagataaaatccgactattttacgaacaaaacgcagagcaaacactacccgaagtagtagaaacggaagaagatgaaaaaggaaagaagacaaagaaaaaatcaactaaaaaagacgaagccattcgttggggaggacacgggaaaaaacttattgataaataccgcttgtggaaagaacaaggttatcaatgtctgtacacaggcaagtatatcaaactaaccgatttgtttaatgaaaacgtgattgactttgaacacacgcttccaagaagcaaatcatttgataactcattggcaaatcttacggtttgctatcacgactacaaccgaacaataaagaaaaatcagattccaacacaacttttcaactacgacaaagaacacgattttggtggaagtattggaaggtgctctgccattcttccacgtttagatacatggaaagaaaaagtaaaacgcattaatcagcagattgatttttggaaaactaaatccaaaaaagcagccgataaaagctggaaagacgatgccattcgccagcgtcatttatggcaaatggaattggactattggcgaaataagttagacagatttactataaccgaaattaccagcggttttaaaaatagccaaaaagtagatacgcaactgatctcaaaatatgcgcttcattatttaaaaacctattttgataaagtggatgttcaaaaaggaagcattacagcagagtttagaaaaatttaccaactgcaaattgccgatgaaaagaaagaccgaagcaaacattcgcaccatgccaaagatgccgcagtattaacgcttattcctgtggccgcaaagcgtgatgagattcgtgaaaaagctttcattctttatgaaacgacaagaaaacaatatcatgaggaaccatacaaaggctttaagcgtgaatttgtttggagtattgacgacaacgttctagtcaacaacattaccaataatcaggaattaacaccagccaaacggaaagtgcgcaagcgtggcaaagaagtaattgttgacggcaaaaacagatgggcaacaggcgatgcaataagagggcaactgcaccaagaaactttttatggtgcaataaaacctgcaaaacgtggcgagaaaggcaacattgaaaaagatgagaatggtaatttcattcaggaggagaatctaaaatttgtattacgagttccgtttaatgctgactttacaggtgaagataagattgttgatgaaggactgaaaagacaaatacaggaacacataaaaagagcaggaaatttcaaaaaggcgtttgaagaaggaatttatttgttggacaaaactggcaaaccacacggaaataaaatccgacatattcgcgttttcaaagatggcgaggtaaaagaaccattgccaattaaaaaacagactaatctttcggataaagaatacaagcaacattattgggctgcgaatgccaccaatagtttctttgccatttatataggtcagggtaagaaagattttgattatcggaatttatttgatacagcaaaagtaaaatctgtaaatcctgtgaaaaaaccagaagatttgtttgaacaaaaattaactattaccaaaaaaaagagcacatctgaattaaaccttgcttacattttggggacaggtaagaaggttctttttaaaaacaaagcagatgaggatttaaaatctttatcacaaaatgaaattctgaaacggctttatgtgtacacaaattttgaaaaagacggtcgattaaattttcaataccatttggaagcaaggaataagatagaagaatcgtattccgaatcagaaattgatttttcaaaccctaagcctacactacgttttggctactctaaatatgatttctatgttgaagattatgattttgaaataaaaatggatggaacaataagatggattaaatgaaccacgtaaacttcataaaatcactcgactcccattctgaaagtccagaaaagaacaaaatcaatgaacctgttgtaagctactccggctccaaaaaaatcaccacacccaattcatttgaagcagccgaggatttcaaaatctggtattgggcggggcttacacccgaacaacgttttgccgatttttatgaattaatgagccgtttttacagtttcggaaagcctgactggtcaaggaagaaaataatcattgacttatgaattttgtacgccctgcacacaaagaaatacaacagaaacgtaacccatgagcgaaatcatcatctaccaaaccaaagacaataaaactcagattgatgtaaagtttgagggtgacacggtgtggcttacgcaggctcaattggttgaactctatcaaacaagcaaagctaatgtaagtgagcacattaaacacatatttgaagaaggagagttgaacaaagaagcagttgttcggaaattccgaacaactgcttctgatggtaaaaactacaacgtagagcattataatctggatatgattatttcactgggttatcgtattaaatcaagtgtagcaacttctttccgcatttgggcaacccaacgtttaaaagaatatctcatcaaagggtttaccatagacaacaaccgtttgaaaaatctcggaggcggcaattactggaaagaactgttagacaccattcgcgacattcgcagcagcgaaaaagtaatgtatcgccaggtgctggatttatatgccactgcaatggactacaatcctgaagccgaagaaaccattgcgttttttaaaattgtgcaaaacaaattgcattttgccgcgcatggaaaaacggctgccgaaacagtgtatttcagagtagattctgaaaaaccatttgcaggcttaacccattttaaaggcacacagccaacccaggccgaagccctgattgccaaaaattatttacaggtagaagaactcaaagtgttgaacaatctggtatcggcttattttgatctggcagaaatcaacgccatagaagaaaagcccatgaaaatggccgattatgttcaggggcttgacaatattttaaaatcggcaggaagaaaattactaccgggcgcaggaaaagtaagccatgcacaagcggaagaaaaagccaaaacggagttcagaaaataccaggccaaaacattgagcgaagtggagaaagcatacgtagacagcttgaaacaaatagaacaccaggtgaaaacaaaatggaagaagcaataaaaacctgcttacctatcaaattaccaaccgtgaaaatcgaaaatggcatttttgattttcacggttcaatttctgttcgttgtatcttattcatgttctttaatacgcaacgccatgataaaacgcaccttgtactttggcaacccggcttatttaagtacgcatttagagcaactggttgttcgcttgcccgaagtggagaaaaacgatacgctgcctgatatttttaaaaaagaagctacagccaccatcccaatagaagatattggtgtagtgattcttgatcatcagcgcgtaacgatatcacaggctttgctggcaaaactgctggccaacaatgctgcggtaatcacgtgcaacagcacgcaccatcctaccggcttgctcttaaatctcgatggccactctttacaaagccagcgctttaaagcccagctggaagccagcgaacccttaaaaaaacaattatggcaacaaaccattaaagttaaaatccaaaatcaggcagctatactcaacctgcaaggctataaaattgaaaacatgctgcattgggccgattccgttcgatcgggtgataccgataacctggagggtcgggcatctgcctggtattggtcaaaaatttttaaacccgaactaaattttattcgggatcctgccggtgaacctccgaataatctactcaactatgcctatgctattttacgggcctgcattgcacgcgccctggtgggttcgggcttgttgcccacgctgggtatttttcatcgcaatcaatacaatgcttattgcttagccgatgatattatggaaccctaccgcccctttgccgatagattggttctttcgctcatacaggaatttggtacacaggcagaactgacacctgaagtaaagaagaagctgctgactttaccagcgctggatgtagtactgcaaggcgaaaccagcccgatgatgattgccatgcagcgtacttcggcatcgctggcaaaatgctttttgggcgaaacacgaaaattggcctacccggaattgcaatgaaaaccgagcggctaaacgcttaccgcattatgtggataatggttctttttgatttgcccaccgaaactaagaaagaccggaagaactataccgatttcagaaagagaatgatgaaagacgggtttaacatgtttcagtttagtgcttacctgcgccattgcgccagccgcgaaaatatggaagtacatttaaagcgaattaaaaaaagtctgccccccagagggcatataggtattttaaccattaccgacaaacaatttggcatgatgcagattttttatggcaaggaggaaaaaccaaaaaccccgatgccagaacagttggaactgttttagcccggggcttttcagtggattgcataccgtaatttttaatcctgatttcggccgtaactcattggtttttaatgtttttgatagaggtactctgtatgcaatctatca

SEQ ID NO: 2602 - DNA, 15819 bp, synthetic construct
  source 1..15819: mol_type = other DNA
  misc_feature 1..15819: note = Synthetic
ggcagccgcattaaactcgatggtatccttgcgcacaataaccggcggacgttcggccgtgatcaccacttcctccagcgattcagggtcttcgatcataggcagggttcccaaatcaaggttaggatgatcgctgtccagttcaaactcctttcttatcgtgcggtatccggcaaaactgacgatcactcttgcttttacctggtgcggaatattaggcaccctgaaggtccccttaggatcgctcaaacgataggaaacgatagaagtatcaaaagcattaaaaaccgtaatggtagcgagagatagcggttgattagaagacgagtcgaccagcttacccgttatagcgcccttatcctgcgccatcgaaaccaggcttcccaggaataaaaatatcaataaagccagtcttttcatagaccatatcttcaatatcataaatctaatcattgcgcggcgaaatgaagcttaatgtcttcaaagtacagattcgcctggtattccgcattttttcccataaattcaccatccaggatacatacaaaatcgtaataccttttcttctctgccgctatcacttccatgagccaatagctatcttttacccgatgtggctcgctggcatacagctcaaactggtagtcattgtttcggccgcgcggtttatattttagcgtatccggcgtgaaagattcttcactaattaaaacaatagtataaagcggagggctgttggggtgagagaaacgaacatcttttttattcaccggtacaaatcccgcaaccgaatacttttttcggttaggctcaaatgacgaaaacaaaacagccccatgttgcctggcaataggagccagtattcttttcggcgttttgggaagaaacgaggcctgggggatcgcccttgaacttccccaataaaattcgccttctatcttcagggtatcattcctaaaatgaagttggggttgttccagcgtggacgaaaacgaattataatcggcatagcgactttcttttatagagctacaggaaaagatcgatcctgatagtaaaacaaaaaggagaaaatataatttccatttcataagcaaggttagtcattcatttgttatgccccatacgtattccgtactaacatgaatatctcctggggttatgctctttagatatctgaattctctttatgatgcaagtttgattgatttccataaatttatttcttagaacatactccttttactttccgaatggcatattatttattgttgacctttttgatattatggcattataaagaccgcataatctcagccctgcaaatagttacgaagggcattaccacaaaattcaggtatccatttttggcatacctggctttgctcccgatcggatttggtttagatttaatttggtccggcccacacgccgtaatcgatctgatcgggcggatttttagataggtttagatcgggtgagattttcattttatttccaaaatgcagtatttttgctgcaaaacagaaataaaacacatgaatttcctggaatttaaggaaaagatgttcccgctcgcctgctttacaattcaccaggtatatgcctggaagcctagctttgacaggaacaatcttacccgctggctaaagaagggctacctcgtccggctgcggcaggggtattttgcgtttccggaatacaagggaaagaatgattacacgctttattttgccaatcgtatatatcggccttcttatataagtctacatacagcattagctttttacggaataatacccgaagctgtggtacaaatcaccagcgtaacatcgctcaaaacaacttcatttgccaatgattttggagaatactcctacctgaatgtgaaagagcggctgatgttcggctacgaattaaaacctgtagctgaccaactcgccattcagtttgcatctgcggaaaaggcgttgctcgatttattgtacctgtacccgttttataagactatgcaggacgtagcggcattgcggttggatgaggattttctgcataatgatttaaaaaaagatctgttgctggaatacgcaacagtattccaaagcaaagcgctcgaccgcagggtaaagctgcttttaaaaacatacggattatgataagcatagcgcaaataaaaaattatttccctgcacagatacgggacaacgctattttttacaagtacatgctcaaagaatatttacaactgctgatactggattacctttcgtccacccattacgtgcagaaaatcgtttttatcggcggcacgaaccttcgcctggtgaaaggaattgatcgcttttctgaagacctggattttgattgtaaaaacttctctgaacaggaattcaaagaaatgacagatagcattattctattcctggaacgttcgggctggcgggtgaaaacgagagataacaacaatccaaagctcaccgctttcaggacgagcatttattttcccgaattgttgtttgatatgggattgagcgggcataaggaagaacgtttcctggtgaaagtggaaagccaggaccagggaataacctatgaacctgttattgtaaacataagcggctgcgggtttttcttcccgttccctgtgtcctcagatgctgtattgtgcagcatgaagatcaacgccatgttagcccgatccaaaggacgtgatttttacgacctgatgtttttgctggcccagaccaagccagattatgattttttgacaaaatgctgcggcatcagtaacctgaaacaattgaagcacgctactcaggagcggcttaccacgatagaccttaaggtaaagcaaagagattttgaacacctgcttttcaataaaacgaatagtgagaaagtattgcgctttggcagttttatgaatgctttaaaagaataaatcggcttttattgagaggtcttgtcaatccattctgccatgtatgccagcgcctcgggcgatatcgtttcctcgatttgatgatactctgctgggagacctgtatctgcatgttgaaacagatggttgagatccggaaataccctcgtcgtcacattcttatttcccccctctttcaacgccgtctgtatcgccgtaatattcttttccgcaggaacctggagatccttagcgccattcagcgcaagaaccgggcattttacttttttcaaatcctcttccgggttcttttttaggaaatattgcatccagggagacatcaactgctccacctgcgcatttgccatattctccttttgtttttccgttagattttgaggaagatggagcataagctccctgatgatttcctgttttgtgaaaggatctctattgggcgacatagcatattcatagatcctcttattcagctcgcctgcagttttcaattgctcctctgtcatgcctgaagcttttccgatcgcattggcttgcatcaacaaaatatcggctccgctatatccgggcgcagccagtagtacgataaagccaatgctcttgtccttcgctgcgaccataggagcaattatgccgccgtcgctatggccaatcaatccgatctttctggtgtcaatctcttttctgctctttaaaaattgaacggccgcctccacatcagtagcaaaatcggctgaggtcgcgccctgaaaatctcctcctgatttggccgttcccctgtcgtcaaaacgaagaacagctatacctctgcgggtaagatgatctgcaatcaccaggaaaggcttatgttccattatggtctcatccctgtcctgcggaccacttcctgagatcaaaacaacagcaggaaagtttttccctttttcaggaaacgttaacgtccctgccagttgaattctatttgctttgtgatttacaaattccacctcttcgcttctatacggaaacggcggcttcggttcctgaggacggttaactttattattttgcatttcagtcctgcgaagaacgaggggaaatagctgcccgttttgtttaaagttcccctgcaccgaatcagacgctacagtcccatcgtacacgatagcgccattagccacttccatatgcaggtcgggagcattaaaaccaatctttgaaaccgggatgccgaaagcatgctgatcaggactatccatctttccggtttgcatacctgcagagtcctttagatgaaatacaatagtcaggtacccggtcggcaagtccagcttcccggtccatgtacccgaaatattttgggcatctgtaaaattaaacacagacaaaaaacaaaccagcaataaaattgatcttttcatgtaaaagagtttggtcggatatgggcatcaactggggttaaggatcgcatgttgcgcgtctctgctttaatactcgtttaagagtcgcgaacttagaattctatgcaccttacctctttcgcctataatgcagttgagttagtcccgtatcgaatgtttttgtattcaaaagttcaagttgttgttcgggtcttccgtccttgaaaagcctcttcccgtcgccaaccaaaatcgctatgacggaaataatgaattcgtcaactaggtcattctttagtagttcatttattatttccgaaccgccgtcgcaatagatgccttttccattttcagatcttaatcgttgaaccaactcagctaagtttccagtataaaaaattgttctacctgagttcggtctctgagttcttgttatgacataaacatctctttgtccgttatcgtaatgagaggagccgatctcattgagcacatggtcataggtttttctcccaatgatcagcgtgtctattgtatctgtgaattccgcataaccataatcttcgccttctttttccactaatttcaaaaaactaagatcgtcattcggctgggcaatatagccgtccaaactcattgctataaaaactgataattttcgcattggatatttattttaatatgctctttgacgcctcgctttatcaaatcacttataatcttttcaaaatgaagggccaaacatatgtaaataacataaaggtagcatcgccaatgtagataaattaaccatattcccttgtagtggaattccgatccttcaacccctgatcaatttacaaataatgcttattctattgaaaaatttaagaaatggttaaacgctgccagattaaaggtttctcaattgtaatagaatttaaatgccctaacgcctgcttatacttactaaatccaggctgcaatatttaaaacagcccgccatcggttgatgaacgggctgtttgcctttccggctcccttagctttcaacagtcacctggctcacggctgtggccacgcttccagctaccgctacataaccagctatggttgttacgatagcaggcagcgatacaggcgccgtcagtatgacgccgcttattgtagccagcgctaatcctatggttcgcaacagtcggaaaaactttggcgtgggcgatgctgcacgctccaggacagacatctggtctatctttttctgattggtcttcataacttcattgattaaattgttttacaatattatttccagcgaatcctcattcagcggcaggtcaaaagccgtagcttttatgccagctccgctaaattgatccagtattgaggttgccgtataagcccaatccaaaccggtgggcagcataacggcattgccctcttcgagaagatctccggcggctgtgcgaagggataccttcacgccggttaccttaaaatcgtctgtcgcccgcactacgatcctgttgccaggcaacccggcatagccggaggcatcgatcgagtgcacaacaggcgcttttatagcatccctgagcgccagattatatgcagtctggtcgcctgtcgtcgcgtcggcatatattttcttgttctcaggatcggccataactgctttcgcatatatgctcccaaccttgaagcgttcgcgggcctgcaactggccctccgttggggggatactgcttggaccgcggcgtttgctgacgatgactttgccagacctgcgtctcgaaaaggtcatattcccacctaccgttcctctgaaaccttcggtgaatagattatctgaattctttgccatgagatttgtttttgtttaaaaactaccgatagcgcttgttctgcctgatatcagcgcttcatttacccggcatcactcagaagcctatcgacgtttttataattaaaaaatggttttctttcatcgatcattcttcgggtggagcgagggcgtctctcctcttctccggacgcagccccttgtaatgatcgaccatgcaagaatacgcatacccatgcctccgctttaaaaaattgagcgaacgacaaaaatccgggtgtgaacgaccattatgaggttgtgaacgacaatttccgtgagcgggaatattgctattttaaaaaacaaaaatggtccaggaggcgatcccggtagctgcggccaacgggcaaccaggcattgttactcatacaaacgcgagtcttattaaggttaaacttttttacatggcagatggaaataagatactggcgatggatccggcagaataggtcggcgggcaggcggcgggccgccatatcaagacttagcggcaacaggcaaaaagaagggagaggctggcaatatagacgtaggtactggttagccgattccatatagtatatgtcttccgcaaacaccacccggatctcctcttcctgcaggatacatatccgggaatattccaggcgatagccgatggatgattggacaggagacaatacatgaagggtttaaggccacaaattaagcctctggccatgccgaaggcattaacagttgttaataaacgcgctttgaacgtgctcccacaaacgaaataaaaaaagcgactggcagcataaatttttgatacaaaaacggttttttgcacaataattcaataaattactcatcaattaaagttcccgcccttttaaaccattcctcagatgtttttattgtgagatatttctatgagagatcaatagcaggctgattcccgtggccgaatgaatatctgcaatgcataaaagggattatcgacctgcgcgtttttttacggctatctcgacctgataggcgattgtcgaatcttgtttgagccgttttaatgccgtatacaaatatcctggagtgatgagcgtaaaaataccgaggcgcaccttttcagtctttaatggattgctgcgaacggccgtgttgtagatatcgatagcgaaatccgtgcagttgtggttttgcaaatcatattctttcgtggccgggtttgacccgacaaaagcaagtgtgcggatcaggtcttccctggtaatttttcttttgatcgacgcgttgtattcgtgcccttcgttatcgaccaggattgccggaacagactgctgcgccaccaccgcctcccaggggtattgggggtaaaggccgaaggttcgccgcagggtatcgccgttggcgcaacttgagagctggacaaagctatgccctgcataaggcttagatggatcaatcaattgaaattcatcgttatcgatagggatatccgtaaatagttcaatgaagtattcgctatcggcagttattgacccggtaagcgcctgcaagaaatcgtccgaccgaataatgcgtatactttgttcagcgtgaccggcggattcgggatcaaaaaccagccagcggttggctttctcccgcaatcttataacagcagtatcggtaatcatttcggaaatatcatatttcgttttgatataaggatcggggaagaggagggagatgatattcaaagcgccaggaggttgcaacataccggaataggtaaccgaatagtctttgtcaacggaagaagatcgcttccatttgtgatctaccgaaaaaaattcatgatcaatgataaaccgaccgatctgatccctacagatgaataagacggcagacaacgcaatgatcagaaaacggagcatatatcaatcatttggtatgttaatatatttcatttatagctgaaaaacattaacaggtatcaataaattactggccgcaggttaaaaaggtttccggaaattggcataactattcattgcagggaagtcaatccgtgataaacaaccgaaaacaaaatttgacaataaggtcgatggtaatcgataagcggcggaagagaaatatgcgatacctgttttatcagcgtcaattgttattcatggaacagatcatttcgctattgaatggtatctatcctcttgagcaggagaacgtagactatctatgcaatatcctggaaaacagaaagaccccgcgaaaaaccctgttactgaagcggggacaggtatgcaggcacgtatactttatcaaaaaggggttgatccgggcctattatctcaggggcaataatgaggtctgcacctggttcatgaaggaaggcgatgttgttctttccgtaggcagcttttatacgcagcagccaagcagggaaaccatagagacgctggaagaaacggaactgtattatataagcaataccgaattgcagcagatgtaccagttattcccggggttcaattttatcgggagggtgttaacggagaagtactatttacaggcggaagagcggcagatcgcgcttcagctaccctgggccaggcagcgatatgcctatttcatggagcatcacagcgagttggtaaggcgggttccgggtaaatatattgcctcttatctgggcaccacccaggaaaacctgagcaggacaagaagcaagagacaatagatcacaaacaacagatcataatcggggttatgaacttattgcaagaaccggcgcccagaccgaggaactggatattagaatcgatgctgataacctgtttttggtgcttaccattagggataacagcttttgttttcgcgatccggggcaggcagaaatggaaggccggagatcttgcggacgcgatcagggatatcgcaaaggcgaagcgttataccattcttggtttctggatagggattgcatggatggccgttataatgatcatattgttactgatggccaggatatgaaaccttattttatcacctaaattatttcctatggcttatactacctggatcacgcactggatcactttattgatattattgcacttgtattttttcttcgtggtatgggtactgtatagaaagaagaccgccggacggaagaaaaagagggacgagccggaggctctctccaaaaaacgttagctctcttatccgcaacaatgatgaaaagtactgttacaatattgaatcattagtatcccgtttaaactaaagattttcaattaatttatataaagttctttgccactccgatggctttgctttttaagaaactgatttattggcgttttactgagtaatattttagaatttgcaggacctcataaacgctatgttttgttttcagttgttgtcttataatggcaacaagagcgtatataaatctttatgaaatcataagcggccagagaaactttctttgaatgcttcaagagccaactattaacaaaaagtcaggcctaagtcgagcagcggatcggttggaagtaatttgctttaattagtaatgacgagccgaaatcgcaaaaaaatgccctaccagaagcagggcttagataatcttcggcttatagccttattgtgatttgcgataccaaagatataacttatattcaaatcacaacatatactgaaaatagaacaggtttatgaacaaagctaggtatcggttttggaagccgataccgataaagaggacgcctcaatatttatttagctcttttgttaaaattagtatatttacattttattcagtatatgacccctcatattaatttttaattatattataatatattgataatgaacaaaacactaggtcttgatttgggtacaaattctattggatgggcgttgcgcaatccggatttaaagtcgaatcaaatagaaaagtttggcgtagtgaccttcaataagggcgttggggtaggaaaaaccggagaatactcctatgctgccgaacgcactaaaaagcgctcaattaggcgcctgtaccaatctagaaaatatagactttgggcgactcttgaagatttgataaatgaaggatattgtccactcagcatagaagatctgaataaatggcggcattacaataaagaagaagctgctaaaaataataatagtggcaggatatatcccatcaacaatttagcatttgatgcatggattaaactggatttcaataatgacggaaaacctgactacactagcccatatcagttaagaaaggaattaatagaaaaaaaattagaatttactaacgaaatcgatcgcttcaaactgggtagggcattatatcatatagcgcaacgtagggggtttaaaagcagccgtaaagggtcggatgatttaagagtaaaagaagacagcgatgatgatgaggtagtagatctgcaatattctgaaagaaagaggaacaaaataattacggatctttttgataaatatcctcaagcaaaaactattggttcacttttcgcgatattggaaaatgccaacatcagaattcgcgaaaacgttgctcaatatgctatcagagaaaactataaagatgaaatcaaaaatgtcttccaattccaggggttaggttttgagcatcctttatataccaaattagtagagactggtaaaaacaaaaacgatggaagcattttttataaacgtcctcttcgttcacaaaaaggattggttggtaaatgtactttagaaccccaaaaatacaggattccaattagtcatccatcttttgaggcatttagagcatggtcctttttgaacaatataaaatacaagccatttaatgaaaaagatgctcattggcaatctttacctctgaatctaaagcaaaacatttatcacgataaatttttcagaaaatcaaagagttattttccattctctgaaattgctgatttcataaaagcaaagggcaacaattgggagttgaattataaactcaaaactactgtatctgggtgtcccatatcagcgcgattaaaagacatatttggagaagactatttacaaataagaatagcaaaaaagaaggcacccaaatcagaaaaggcatactatgatattgatgacatttggcatgtgttattcagctatgaagaccaagagtttgtgtctgaatttgcagagcaaaaattaaatctaagtaccgaaaaagtaaagcaatttgttattgcatggaatacactacctgtgggttatggaatgttaagtcttcatgctatcaacaaaataaacaaatttctagaaaagggtcttccttatacagaagcggttttgctggctaatattccaaaaattattggcgtgaaattatgggccgccaatgaagaaatttttttaagctctataagtggcctcataaatgaaaacagacagcaaaaagcgatattgaatgttgtaaatagtcttgtttccaaacacaaaaacctagaggcaaatgaaaagttcggttataaagacagcaactacaatctcgttgattctgacatgaaagatatatcccttgccgtacaagaacaattcggcataaaaagatgggaacaaaagtcaaaagacgaaaagcaagaaatctattcatctgttagagactgctatcaggcctattttatcacatctggtttaactagaaggaacattaatggtgaacgtcattttatcattcaatcgtccaataaacgttattacaaaactgattcgggctatttccgtttgccaagactaattgatacgatgggagaatttttacaagtgaatttcaacgtacccgaaaaattgcttcaaaaaatttatcatccctctgaaatcaatatttaccctccagcccaacctgataataatggtattctgaaattaagtagtccgaaaacaggctctttcaaaaacccaatggcaatgcgcgctctgcacgaactgcgtaagctgattaaccatatgattgaaaccagtcaaattgataatgacacgcgaatagtagtagaggttgccagagagcttaatgatgcgaataggcgttgggctatcgaaacctggcagagacatcgtgaagccgaaaatcaggaatttgaatatgccattaatcaggtcatagcaaaggtatctaatgttaagacggattataccagtgagaacgatatcgataaaatgcgactatggtacgagcaaaatgatgaagaaacgctacctccgattgcggaagaaaaaaaagagattaaagggataaaatggtctgaaaatataaaaaattcttataggcaaattctcactcaaaaatctttgattgacaagtacagactttggcaagagcaggaatgccaatgtatttatacgggtagagttattaatatcactaatttatttgatggtaatataatagattttgaacataccataccaagaagcaagtcctttgataactcattgtcgaacctcactgtgtgctactccgattataatcgaagtataaaaaaaaatcaattgcctacacaattagccaattacagcgaggattttggagaatattctgcgatattaccaagacttaaaaaatggcaggaaagggttgagcgtataaaacagcaaattgatttttggaaaacaaaatcaaaaaaagcagccgacaaaagttggaaagacgatgccatccgccaacgccatttgtggcaaatggaattggattattggcaaaataaattagaccgttttactattaccgaaatcacaagtggatttaaaaacagtcaaaaagtagatacacagctaatttcaaaatatgcctttcattatttgaaaacctattttgacaaagttgatgtgcaaaaaggaagtatcacggcagagtttagaaaaatttacggtttgcaagcctttgatgaaaagaaagaccgaagcaaacattcgcaccatgccaaagatgcagcagtattaacacttattcccgtagccgccaaacgcgatgctattcttgaaaaatattacgaagcgaaagaaaacaaaacaacttttaatgcagagccacctttcaaaggtttcaaacgagaatttgttttcggcattgacgataatgttttaataaacaacatttccaacaaccaagccctcacgcctgccaaacgtaaagtgcgcaagcgtgggaaagaggtttttattgagaaagcagatggatcaaaagtcaataaaatagcaaccggcgatgcgattagaggtgaattgcacggagacactttttatggagcaataaaacctgcaaaaaaaggtgataaaggtaatttattgaaagatgaaaaaggcaaattcattcaagaagaaaaagtgaaatatgtagttcgtgttccgtttcaatacaagaaagacgctaacacaaagggtattaaagaaataagccaaattgttgatgaagggattaaaaggcaaatccaaaaaattatggataccaaaaaatgttcttttaaagacgttttcaataatgatatttatttattggataagaccggaaaaccacacggaaatagaattcgtcatattcgtgtgtgggcaagtgtttccgaaccattgaagattaagaaacaaaccaatctttctgacaaagaatataagcaacattattgggcaggaaatgctactaatagctattttgccttataccaaggagagggcaaaaaatattttgaatttagaaatctattcgacacggcaaaatctttagcatttagtacattgaggtacccaacagaattatttgaaccagcaataaccatttccaaaggaaagaaatcaactcaaataccgcttttttatattttagagaacggggctaaagttatctttaagaaagaaatggaagaagatttgaaagtactatcgagaagcgaactattgaagaggctatacgtatatacaaattttgaaaagaatggaaattccgctcgcttaaactttaagtatcacttagaagcaagaaataaaattagtgaggcttatgtagaatcagaaattgactttgaaaatccgaaaccgaccttacgatttgggtttgctaaatatgattttttagttgagggttatgactttaccgttgaaatggacgggacattaaaatggaaatgaataatctgtctattttcatatagcttatttcctgggtcaaattattaagtaatccaatccgggctcaatcaatgtccagatagattaatactaaacggatcattaattcgttttacaaatggcaagccctaattatctatgataaagcgaactctttatttcggcaatcctgcttaccttaaaacgcggaacgagcagcttgtaatagagatgcatgacagcggagaaactaaaactattcctatagaagacattggacttttgatactggatcaccaacaaatcacgattacacattccctaattgcgaacctcctcgaaagaaatgtagcattaattacttgtaataatgcacaccaccccaccggtcttatgctgaaccttgatgggcattcactccagagccagaaattcaaggcgcagcttgatgctacgattcccctcaaaaagcaattatggcagcagaccgtggtgtgcaagatcagtaaccaatcggcgttgcttcggaaaaataacaaaaaatatcagttgcttgacaattatgctaaagaggtgaagagcggtgacagtgagaatcatgaagcgagagctgccgctcactattggaaaaatgtatttcctgattttgtgcaatttcgcagggatagatatggattaccaccaaacaattttttgaattacggatacgcgattctaagagctttggtagcaagaagtctagtggggtcaggcttattgccaacattgggcatccatcaccagaaccaatacaatgcttattgcctagctgatgatattatggagccttaccgaccttttgttgatatggtggtttgtgatatgatcaatgtagatgagccgacgtttgaaattagtgtagctgcaaaacgacaattactgagcttgccggcgatggatgtttatgtcgaaaatcagaagagtccgttaatgaatgccgtacagagaaccactgcatcattggctaaatgcttcgaaggaaaagcaagaaagataattttcccccttttgcaatataaagccaatgtatgatcgacttaatgcttaccggatcatgtgggtgctagtacattttgatctacctaccgacaccaaaagagatcggaaaagttattcactgttccgaaaaaggatcatggcaaacggattttcaatgtttcaattcagtatgtatatacgtcattgcagcagccgggaaaatgcagatgttcacataaaaagggtaaagggtattctacctccgaaggggcacgttggaataatgtgcattactgacaaacaattcggaatgatggagattttccgaggccgagaacctgtggacccgcctgaaacttctcagcagctagaacttttctgaaaaaactgccctgtagaaatgaaaaaatgggtttttgaacccattttttcattgtagatctagcttaagtaaaacaaaatcagcaccttgcccatttcgagatgtgaaagagctaagctac

SEQ ID NO: 2603 - DNA, 15586 bp, synthetic construct
  misc_feature 1..15586: note = Synthetic
  source 1..15586: mol_type = other DNA
tgttcagctccaggatggcagacttagtaatctgtgaaggattatcaccaattttcatctgtgcgtttgccgcagtagctgccagggtgataccaccagccaataaaagtttgcgtgaaacgttgtgtaaaactgttttcatattagtatagggatagatagattttaaaatttatttatttatccgatttcctttgattaataatttagtctacctggcacaacactatttattccgctgcacagattgggagcttgtcaggcattctaaaggttttcaattaaaaagtggttaaaagaggtaaaatgtaatgtccactgttattgtactgttcacgaacctaaatgtaaaaggctttactatttcctatggcgcaaatatctaatattagtaatattagttaaatgacatgaacgtatcattttattcataaagacatttcatataaacaattgattatcattataaaaaatataaatataaatataacctgcaaaaacacgcaggtggatgcgcctgaataggggtaaatagggcaaagcaagcgcaaccaaataacattaatgtgttatgcccacttcgattttcgttcatttgggctaattttaatgatattttaagacaaaataatatcaatatccgataaggcataccacttttgtagaaatactactacaggaattttcatatatgatgtgaggggcaaataggaacagcgttttttgagtatgcttcatttttaagccggtttcaggtcaatattctaacttagaaatatcgttcccaggaacattcattttgctcatccttcagcctgcaaatgatcttacctacttcaacattatcatgaattagtaactgtattagaattgcaatccgtaccttgcaggaataattttataaccccaaaatttgttaacatgccaaaatttgtcatcgaacgggagattcccggggcgggagacctcacccctgagcaattacagggtatttcacaaacatcatgtagtgtattgagagagctgggtccacagattcagtgggtacagagttatgtgactggagataagattttctgtatttacatttcaccggatgaggagacgatcagggagcatgcgcgaagaggaggattcccggcaaatgcgattcacaaaattgtgacggtgattgatcccaccacggcggaatgatttaaaataacaaaggcagcttcggggaagctgcctttgttattttatagaatcaatgagttgttgaaatggaacatcgctcattgtataagagacccaattcctgccgctctcaatttctatcagtaaattagtttgcggagtctcacaaataatcatcctttaacactaaagggggggaatatagatcattcacccataaaaaaactcccgggatggtatcccgggagcacttattggaaaacattactatcaactatggcttcatttattaagcctctgatttctcagatttgttacttctttctgagtttttcaaagtaaaaatcagtttctgattttccttatccagatcagcaatcaatacatctccgttgtgaatattcatattcaggatctcttctgctaaaggatcttccaggtatttctggatagccctgtgcagcggacgggcaccgaactgctgatcgtagcctttttctgccaggaatccttttgcttcttccgtcagttccaggctaaagcccaggttttccagacgtttcagcacgctctgcatagtgatatctatgatagtatagatatgctctttgctcagtgagttgaagatgatcacatcatcaatacggttgaggaactcaggagagaaggtacgtttcagtgctttttcaattactgattttgtattctcttcttcactgttggatttggcgttggtagagaaacctacacctgcaccgaaatctttcagctgacgtaccccaatgttagaggtcataatgatcaaagtattcttgaaatctaccttacggccaaggccatcggtgaggataccatcatccagcacctgcagcaggatattgtaaatatccgggtgtgctttttcgatttcatccagcaggatcacagagtaaggtttgcggcgaactttttcagtcagctgaccaccttcttcataacctacatatcccggaggcgcacctatcaggcggcttactgagaatttctccatgtattcactcatatctatacggatcagagaatcctctgaatcgaacatatagcgtgcaagtgatttagccagctcggttttaccaacccctgtaggacccaggaagatgaaggtaccaattggtttcttcggatctttcagacctacgcggttacgctgaatagctttggtgactttgctgatggcttcgtcctgacctactactgcacccttcaggtcttcgcccatacgacgcagtttttcggtttcggcctgtaccatacgttttaccgggatccctgtcatcatactcactacttcagcgatggcttcttcatcgattgggtagcgtttatgtttcacttcttcttcccacacggctttcgcacgttccaggtcttctcccagtttcttttcagtatcgcgcagggcagcagcttcttcgaaacgctggctcttcacgactttatttttttcctgcttgatatcttcgatctgtttttccagatccaggatattctgcggaacgttgatgttcttaaggtgtacacgggctcctacttcatccagtacgtcgattgccttgtctggcagcaaacggtctgtcatgtagcggtcgctcagttttacgcaggcctgaattgcatcgtcagaataacttacgttgtgatactcttcatatcttggtttgatattgttgaggatctgaatagtttcctccacggttggtggatctaccattactttctggaaacgacggtcaagcgcgccatctttctcgatgtacatacggtactcatccaaagtggaagcaccaatgcactggagttcaccacgagccagggcaggtttgaagatattggaagcatccagagaacctgaagcaccaccagcacctacgatcgtgtggatttcatcaatgaacaggatcacatctctgtttttctccaattcattcatgatggctttcatcctttcctcgaactggccacggtatttagtaccagctaccagtgcggcgaggtcgaggctaacaacgcgtttgtcgaacaatacgcgggataccttacgctgcacgatgcgcagtgcgaggccctctacgatagcggttttacccactcccggttccccgatcaggatcggattattctttttacggcgggataatatctgcgatacacgctcaatttccgcttcgcgacctacaattgggtcaaggctgccactctcggccagcttagtaatatcccggccgaaattatccagcacaggagtttttgacttcgtattagtctgtttggccttagaggcaaaacttttacgctcatcttcaaattcttcctctcccggatcatcaaattctgccttagggtcagcagactttacgaagcccagctcgtttttaaaagtgtcgtaatccacgtcaaactgttgtaagatttgtgtacaaacgttttctttattcttgaggatagaaagcattaagtgctccgtttccactgtgggagatttcagtgcctttgcttcaagcaccgtaacacggattactttctctgcctgccttgttagcgggaggctattgatattggcgatattctttccagtcttatcttttacggccaactcaacctccttacgtagttcataaaggtctacattcaaggcctgcagaattttaacagctgtcccttccccctctcggataatgccaagcagcaggtgttctgtgccgatgaaatcattccctaagcgtagagcttcctctctgctaaacgaaatgatctcctttacttgcggtgaaaaattctggtccattgtgagaatattaaattattaaaacccttaccgggacttgcttatacaatattagcaaataattttgatttacctttaccctaacactttaatagtataaagttcattgtggaggggtaatgaagtaagaagaaggctgttattgggcaggattccgattacttatttactaaatctaataaaacaaaaccttaagggatggaattcaaaattgataccaaagaaaaaattctcgttgtacagccgcaaataagtttgctggatgctaatttggcagatgcctttgtaaaagaagtatcagatctacccgggttagaaggccgcaatcttatactggacctggcattggtgtcaaatacggacgaagcgggtacgcaagccattttaacagtttataaccagcagtatgacagcagtttgtcctgcgccctcaccgggcttaacaatgaccttttagcaaaaattaaggcggctgatgaaaatgttgtaaaccttgcccctactatgttagaagcgattgacctcgtcatgatggaggaccttgaaagagaattattaggcgaagatgaataatttttgtgcatttgcctcagtgccgctatttggttccggaatgtggaaaatggttccatattccggaattttacattttataaatgcgtattttcgggcatgtttgcggtaaccatattaggtaataattcggctcttcccacgttagacaggcatccaacggcacaggtagtcacatgtaacgatagtttgctactcgtagactgcggcgaaggcacccaggtacagattgcacggtacaaaatccggcgcagtcggcttaagtacatatttatcagtcacttacatggagatcattattttggtctcatcggccttatcaatactctgagtctgctggggcgccaggatcctctttatttatttgggcccccggaactggaacagatcctcaaactccagatggaaagtgctgctactacgctacaattcgagatgcatttcaccgctttactaccggaaaatcaaggcattattgtgaatgacaaggacctgcaggtgagcttttttgccaccaggcaccgcattccctgctatggatttgtgtttgatatgcagaaacggaagagaagaattgtacccgaacaggcaagggcatatgaaattcccgccgcctatttctcccaattggccgaaggagctgactaccagcgaaaggatggggtacttgtaaaaaatgactgggtgaccctgcctcctgccccgggtaagaaatatgtgtattgtgcagatacgatgtatacggaggaattattgccacacgtccaccaggcagacctggtgtaccacgaaacaacttatttacataacctggcagagagagccgctgaaagatatcatagcaccagcgtgcaggcagcgacattagctgcaaaaggagccgctaaaagactgattatcgggcatttttcttcgaaatatacagagctggcagctttcctggaggaatgcaggccagtgtttccaaatactgatctggcactggaaggagctacttatatcatttaaaaaactaagggctgccttctggcagcccttagtttttatttaaaacgctttacgaaagcggcaattcttgcctgcaatccatcactcaccggcacaaccggtaaacggaatacattttcgatcaaaccaccctcctgtaaaaacgctttcacgcccgcagggttgttttcttcaaacatgagatcaaaagcttcctgcaatttataatgtaaagttcttgctgtcgggaaatcgttcttcaatgcagcacgcaccatatcagcggtgtcttttgcaaaataattcgctgctacagagatcaaaccatccataccggtagccatctgcggcatagccagggcatcatccccactcaccacgataaaatctttcggtttatcacgaatgatctgcatacactgcaccatatcaccactggcttctttcattgccacgatgttttccacttcatgcgccaggcgcagggtggtctgagccgtcatattacggcctgtacgtccaggtacattgtagagaataactggctttggcgctgctgccgctaccgccttatagtgctggaaaatgccttcctgacttggtttgctgtaataaggagctacgctaagtatggcaacggcttcatcgagcggacaggtttcgagacgcttgactacatcacgggtgttgtaatctccaatacccaccaccacaggcacgcgtttggcaactttttcgaaggtgaacttcatgatgtccaacttctcttctgcgctcagtgtaggtgtttcaccggtggttcccagggatactacatagtcaaccccgccggcaatcacatgatcgatgactctctctaaagcattccagtcgatgctttcgtcttttttaaagggcgtaaccagcgcaacaccggtgcctcttaattgttccataatgcgtaaaaattccggataagaaatttcaaatagcctcccggcatctcccttcaagggaaattcctgaaaggaggtgcaaagatgccaatttgaaatggtttatgtcaaattatttttaacgttcgtcaaaaaagcccatgttgctgtatttgtcaatacgctgttcgattctggtatcggcatctatctttttcagttctgccagctcttctttaattttttgcttcaggatcaccgccatctcatcagggtttacgtgcgcgccacccagcggttcattgattacaccatctaccaggccaaagttcttcatgtgatcagaagtcagtttcagctcctcggcagccttctctttgaagttccagctacgccagaggatggtagaacagttttcaggagaaattacagtataccagctattttccagcatcagcacacggtctccgataccaatgcccagggcaccaccggaagcaccttcaccgataatgacacaaataacaggcacacgcagcttcaccatttcaaatatattacgggcaattgcctcaccctgcccacgctcttcagcttccagcccagggtaagcacccggtgtatctatcagcgttacaataggcttgttgaacttttcagccagtttcatgagacgcaatgccttgcgatagccttcaggatttgccataccgaaattacggatctgccgcattttggtgtttacacccttctgctgaccgataaacatcaccgtttcgccatccaggtcggcgaaaccgcctaccatcgccttatcgtcctttacattcctgtcgccatgcagctccacaaagttagtacacatcttctcaatgtacgccagggtatagggcctatccgggtgcctgctcagcagtaccttttggtaactggtcagatgatcatagatttcctgacgggtatgagcgatcttagactcatattccaccacggtagctgtcacgtcaacaccagacttggcgccgttttctttcagtttttccagctgatcatacaagtccgcaataggtttttcgaattccaggaattgcatatttatgttataaattggttaaagtacggtgtaaagataacgggtaaaatattttttaaaaaagatttgcaaaattgattgctttgttgctatctttgcaatcccaaaacgggaaagcggtagcgctggaacgaagggcaaggatcagtagttcagttggttagaatgccgccctgtcacggcggaggtcgcgggttcgagtcccgtctggtccgcaaatatttttgaaaccccgcgctaagcgcggggttttgtattttagtcgagtgatcccctttgtataccctccaattttataagcgttagaaaaacgtcaatgaattatttattgaaaccaggttcaaaccaaatctcattcaaagatttgctgctttttagtccatatttcccaatacttttcttttttttccctactcaaaaaggagctattaattaaagtgtgcacctttgaattaaaagacttaaatcttttataagtattatgtcttactttttcaggaatgtttaagacaatgcctaacgcttcaaaatctctcaattttatattcttctttttgccgttgagcaataatgccatttcttcctggtccttggggaaaacaaggttaacattcaatagatcataagcgggactcagtgctatactgttctcaagatgaagtaaggaaaagtttttaagatgcatatcattatttcctgtcagaaaacagaaaagcaataattcgaaatatttcagtacatcaagccctgaattagtacaatactgaagtattagttttccagctttctcgtaggatcctttgtacttattttctgttaaaaaaccagaaagctgacagaagtcttcaacatgaatcttttcccttttttccctatcaaaacgtctggcaatataaacaaggtttccatcagtagatctgagcaaggtatgatgacatgtcagaataccaaatattgcggcaagatgcatggtaaggtcttccgtttctggcatggctaccattatttcatgttgaggtttcaatatgtattctccccacagccccacgattgtaagtctgccattacttttaatcctctccaacgtaactgataacttaggttgcacacctgttaaggctatatgactgctaatcgtcttttctgccagatcttttaataattgtttgtccaggttcagctctggcatagtttcggtaccaaaaaaacgttttgcacatttactgtggtattccttgtccccagcatctttatagcagaataaacaattggacatattattcaatttcattttcgggttctatacttaccgcaccaatagtatctctgcatgtaagtaataataattcaaagcgatcattacctttaactttccagtgatctttagctatgtctaatagccagccttcaggaatcagtccatcaaagaaagcaaacaatgtaaaactatgataaacctctttttgtaatggtaaggttaaacttattggtttagccgattcatcaaccaaataatcttcgtgatataaaaacttatagccgccatcatattctgttagtgaaccagcaagtatgctattataatacacttttgcagttttactcattatatgttgttttaggtgctggtataagttccatcccaaataattgaagtaactgattcactttatccatacgcatggatgttttaccctgttcaatttcccggatgagccgtaatcccagcccagattttaaggatagttcttcttgtgtcaacccgttttctttacgcttagctttaattgttttggacaaaagagtcattttataccttttagggtataaaaatacgaaatatctactttttataccctaaaaggtataaaaaagctaagtactaatagatttataccctaaagggtataaataaataaagaggagtagaagaattgggaagctttgtaaattatccaattcgttctttatttagcaaaacacagctacctattaccaatagcatgtttcggcgatgatttttaaatgggtaggttttagataaatcccttgcaaacaggttcctttaaataaaagctaaaatattttgtcatagtagtcaatcttttttcattaatttcaagttgaaaatcaataatttctgcacgaatttcatataccacgtttaaccttgaaaaatgagccaaaagaatgcaataactatcccaaataaaaaaggcatattcagaagtacaatttatacagggatttatttgaaaaataaaatagccccaccagaagcagggcttagaaattcttcggcttatagccttattgtgatttgctaatcaaatatagcaaatcaattaattcaaccacactcttattcaatattttccggaaacaaaatttattagttcgactttatacccacgtataactaaatctgcaattatgaataatactttgggaattgacttaggcacacattctattggatgggccataagaaatccagatttacagggaaatcagactgaaaaagttggtgttattagattcaacgaaggagtaggatcaggaaaagccggggaatattcgtatgcagggcagcgaacaactaaacgcgcagccagaagattaaatcaggcaagaaaatataggatctggacgaccctggaccatctgatttcggaaggctattgtcctctttcaaaagaagatctgaataattggaggcattataacaaaggagaagtccacacaaataaaaatgctggaagagtttatcccattgacaattttgaatttgctaactgggtaaaactcgatttcgatcaagataacgcaccggattataaaagcccctaccaattaagaaaagaactggtaacaataaagttatctttcagtgaggagaaaaatcgtcataaactcggtagagcattataccatattgcgcaacgaagaggttttaagagtagcaggaaagaaaccatcgaaagcatagaggagctggctgcagatgaaaaagaaatagatctgcaggtctctgagaaaaaaaagaatagggtaatcagcgaactttttgagaagtatcctgcagcaaagaccattggacatctttacgccttattggaagatgataatgtcagaatcagggaaaatatttctcaatatgctattcgtgaaaactataaggacgagattaagcacatctttgaatttcaggaactgggtcttgagcatcctttatacaagcaattagtagaagagaaaaaaaataaaaacgatggcagtatcttttataaacgtccgttacgctctcaaaaaggtctcattggtaaatgtacattggaagccaataaatacagggtaccggttagccatccggcatttgagaaatacagagcctggtcgttcttaaataatattcaatacaggacacaaggacaaggatggcaaaatttacccttagccttgaaagaaatgattttcaaagaaaagttctttagaaaatcgaaagtatatttccccttttctgagattattgaacttcttctcaaaaaagggtatcactggacatacaactattctcctaaaacaaccgtaaccggttgtccagtttcagcaaggttaaaagagatttttggagaaaattataataacatagaaatcgaaaaaactccgtcgtctaaaacatccaaaaactattacaacctggaagatatctggcatgtgttattttcctatgaggaccaggaatgtgtagtagactttgccgaacaacggttacaactccctcctgataaagcaaaattatttgttgctgcatggaatgccatgccagttggatatggaatgttgagtttaaacgccatcaacaaaattaatcacttcctgataaaaggactaatatatactgaagccgttttattagcgaatattccatatgttattggaccagagttatgggaaggtaatgaaacgctatttcttaatgctatcagtacaattattgagacaaatagagagcaaaagcttattgtcaacattgtcaataaccttgtatcgaaacataaaagtctggatcaaaaattcggatacaaaaataatgactataaacttgacgatcaggatcattccaatatcttgggcactattatcgaagtattagggcaaagcaaatgggatgagttacctgaagaaaaacgatcatttgttcgtgaaatggtgacaggttgctatcaggcatatttcagaaccactggccttgtaaggaaagacatcagggggcaaagacattttgaggtaaaaacaagtaatcatacattttataaatcagattccgggtattatacaatgccgaaactgatcaactcacttacaacatttattcaggacaatttcattgtatctgaaaaaaaattatcgaaggtttaccatccatctgaaattaacatttacccagcagccaaaccaggaaaagatcaggtaactgtattagggtctccgaagacggatgcctttagaaatcccatggcgatgcgagccttgcatgaactgagaaaactaatcaattacctgattaccaccgggcaaattgatagtgaaaccagagtcgttgtagaggtagcaagggaattaaatgatgcaaataaacgctgggctatagaaacatggcaaaaacaacgggaggctgaaaatgaagaattccggcggatcattgaagaattagttcagaaggatggaattcaggcaaatagtcaaagtgaaaaggatatagataagatcaggttatggtatgagcagaacggggaagagacggtacctccccttaccgatgagcgtagggaaattaaaggtatacgctggaccgaaaacaaaaaggattcctataagcaaatatccctgcaaaaatccatgatcgaaaaatatagactgtggaaagagcaggaatgtcagtgtatctatacagggaaagttattcctattgctgaattatttaatagcaacgttgtggattttgaacatactattccaagaagtatctcctttgataattcactggcgaatcaaacggtatgttatgcctattacaaccggactataaagaaaaatttgcttccttttcacctccctgattatgagggcatattatcaagattagagaaatgggaagaaaaggttaatcgtataaaacagcaactcgatttctggagaagcaaatcaaaaaaagcaattgataaaacaagaaaagacgaagccatacggcaacgccatttatggcaaatggaacttgactattggcaaaataaagtaaatagatttacgataaaagaagttacaacaggatttaaaaatagacagaaaatagacactcaactgatttcgaaatatgcgtttcattatttaaaaagctatttcgaaaaagtggaagttcaaaaaggaagtattacggccgaatttcggaaaatttacagtgtgcagtcgtttgatgaaaagaaagatcgaagtaaacattctcaccacgccaaagatgctgccatactgacgttaatacctgtggcaggaaagagagatgaaatactacgtgaatattatgaatgtaaggaaagacatcagccttttagcaatacaccataccccggattccgccgtgaatatgtcatggatattgatgataatatcttgattaacaatgtaaaaaacaatcaaatgctttccattgctaagaaaaaaataagaaaaagggggaaagaagtatttataccgggaacgaataccccaatgtgggctaccggagattgcattcggggccaattgcatcaggagacattttatggtgcaataaagcctgctaaaagagatgagaagggaatcctgattaaggatgaagaaggaaaatttgttcaggaaaatgagatacagtatgtattaagagtaccatttgaatataaaaaggatgctggctccgtcggatttaaaacacttgaggaggttgaaaagaaaatagtagatgttgggttaaaagagcagataaggaaacaggtaaatgaggcaggtagtcttaaggaggcatttgaaaagggtatttatatgcttgataaggaaggaaataaggtaaataaaatacggcacataaggatttgggtcaccgttgtagaaccccttaaaattaaaaagcatactcatccatccaggtttccttacaaacaggattattacgcagcaaatgcaacgaatagttattttgctatttataaaggggaaggaagaaaaggttatgatgtaagaagtctttttcagacggcaaatatactatccctaaataagactagaaggcgagatgaactatttgagtcctcaaaatctattattaaaggaaagaagacacatacattacatctatcctgtgttcttgaaagaggtactaaggtcatttttagtaaaggagaaaatgatgatctggcatctcttgaacatcgggaaatattaaagagattatatgtattgacgaaattcgagaaggatggaaggttaaatttcaggtatcacctggaggcaagaaatgatataaaggatgtatatacagaatcggaactggattttaccacacccaaacccactttgcgtttctcttattcgaagtatgatttttgggtagaaggatatgatttcaatattaatatggatggtagtataacttttaatacttctaaaccatgattaaacgtactttatattttggcaatcctgcatatttaaggacaagtaatgaacaactggtgatagaattgccagaaacaggtgaaattaaaacagcagttattgaggatattggtattttaatattagatcatcagcaggtgacagttacgcaagctttaatctctaaattgctttcaaataatattgcgttgattacgtgcgatagcagccggcatcctaccggtcttatgttaaatttggatggtcatacactacaaagtcaaaaattccaatatcaaattagtgcgtctgtacccttgaaaaaacagctatggcaacaaacggttgaggcaaagctatgcaaccaggcagcgatgctcaaacaagaacattctgacaataagtatattttacatctaatttcaaagataaagagtggggatagtgataactgtgaagcacaggcagctgcttattactggaaatggatattccccgatttcctttcatttaaaagagaacgtgatggcgctcctcctaataatttacttaactatgggtatgctattttaagggctcttgtggcaaggagtttggtaggcagtggattattgccaactttagggatcttccacaggaatcaatataacgcatactgtcttgctgatgatattatggagccctacagaccatttgtcgataaagtggtatgccagattgtaagaggaaatggaagatttcttgagatgactccgtctatgaagaaggcattgttggaaatacctgtaatggatgtagaaatggatggtcaaaaaagccctttgatgaatgcagtgcagcgcacaacagcaagtcttgctaaatgttttgaagggaagacaaggagaatattatatcctaattttatttagcgataaaatgtttaacagcctaaatgcttatcgaattatgtgggtactcgttttttttgatttgcccactgaaacaaagaaggataaaaaaagctatgctttattcaggaagaaagtattggctgacggttttcagatgtttcagtttagtatgtatataaggcattgtaatagtaaggaaaatgctgatgtacatgttaagcgggtgaaagcggcattgccatcaaaagggcatgttggaattatgtgtgttactgataagcaatttgggatgatggagatatttaggggccatagtcaaacggaggttccgggaacggtacagcagttggagttgttttgaaacaggaatgaaaaaatgcttgcgggaagtgttttttcattcctgttttatccacaattgattgtatttcaatta

SEQ ID NO: 2604 - DNA, 15403 bp, synthetic construct
  misc_feature 1..15403: note = Synthetic
  source 1..15403: mol_type = other DNA
acttcattatccatttctgattgtgaaagtttgccaattgcttttcgcattcctaaatggtgcaaagtggcttctacaataattactgcaccgtccacaattaaaccaaagtcaattgctcctaaactcattaggttggcacttacgccaaatacattcattaagcccaaagcaaacaacattgataaaggaatggcagaagccacaattaatcctgcacgaagatttccaagaaacagaactaaaacgaagattacaattaatgctccttcaatcagatttttttctacggttgaaatagcacgatttaccaaatcggttctatctaaatagggttctattactacatcttttggcaatgatttttgaattgttgccattttatctttaatacggcttactacatcggcactatttgcaccttttagcatcattactacaccgccaactgcatctacttcaccgttataagtcattgcaccataacgaaccgcactacctaaatgcacttcggcaacatcttttattaaaataggaatgccgtttggattggtttttaccacaatgtttttgatgtcgtcaaacgaacctatcaagccaacaccacgaataaaataagcgtttggttttttgtcaatgtatgctccgcctgtgttttcgttgttcttttctaaagcaacaaaaatttcgggaatggttatccccattgcaataagcctgtcaggatttaccgcaacttcatattgtttcatttgtccgccaaagctgtttacttctgcaattcctgctgttccgtaaagctgtcgggctacaatccaatcttgcattgttcgcaaatccattgcggtgtatttgctttcgctgccttttttggggtgaataatgtattgatacacttcgcccaaacctgtgctaacaggtgctaattcgggtgtgccaacacctttggggattttggtttctgcttcctttagcctttcatttataagttgtcgggcaaagtagatgtccactttgtcgtcaaacacaacggtaattaccgaaagtccgaaacgtgaaatgcttcgcaactcttctaagtcggggaggtttgcaatactttgttcgatggggtaagttaccaactgttcaacctcctgcccagcaagggttgggcaaaccgtaatgatttgcacttggttgttggtgatgtcgggaactgcgtcaatcggcagttttgtagcactccacactccccaaacagtgagtgcaagtgtcatcaatgcgatgatgaatttattttttatgctgaacgcaattattttgtctaacatttttttaatcagtttaatgaatgaatacacgattacttgcggtgcgttagcactgcaagtagttttgttttgttccgcgttagcggaacatcagaaattcattaactgagttttggcggttgccaaatagacaaatacacctctgaagcaaatgaggcgttgtaaagcgggaatttttctactgaaactggaatgtgaatagctaaactgtaagaagcaaacgaactactgaaagtttgtccgcagcaagcacacatacaaaaaggagagcaattctcggtgtcgctttcgtggtcggaatggtcggttgtggtgtatgtggattggtcggcactcatatatttacagtcttccttgtcgctgcacggcataactgccagagccaacaagtaaaaactaaataatagtgtcaaaacttttttcacggggcaaatgtagggaaaaaaactgtcggtttagcacaatattgtcgggtggtggtggtgcggttgggcaaaataaaatgtgctgcaaaagtggctcggcttgtgggtggctttgcagctctttttattttgcgaagggatagccaaacggctttgccgaaaattgcattgtctgtcgggtttcgtctgtcggttgatggttgcacggtcgggttttagggttgctgataacttacttatctgtgccactgattagctcctttatggcacaatattgtgccatgtggggtattatgtgccataacacttgttattcttatcgcacaatattttttcgagatttcaactaaatggaagtcggcttggttgggtgtaaattttgttaagggtttactcatacggttatacattggtaaatcgaaagtaacatttggcaaagaaaattacaaatgggagcgggatgtaaaacatcaaacccaaaaacattcaacccttgcagagttggtgcatggtcttccatcatcatcctcgaattacattcgaggctattcacattcaacccttgcagggttgcggtaatcaataaaattttagaagtcctaccaagtccgtaggacttgaatatgaatagcctcgggtgaaacccgtggctcgaatgaataatctaagaacaacgctgaatgtgttgaatgtgttattaaacagcatttaaaagtcaacataaggttgcgataatcacacaaaaaaatcaaaacccttaagagagtccaagaaaggaaaaatcaaaccaactcttttttagctctgctgaactttgtttctatactcgcagtcctgcacaacccaaacaacaaacgctacggtctgtgcctgctcgaataggctgtaactttgcgaagcaaactcttttacctcagaagcggtagacttttacctctaaaaactctgcgagatcctctgcgaaactctgcggtaaaagagaaaacgcagaggtgggtgaatagtcttgcgaagatgcgagcactgtcgcacacaaaattgagagtacgcagaccattggtgcagaccgaagcgtctgttagcaacgcctttggcattggggagggtttatcctaaaattagtaattcacttttaaaaaatatttgcgaagcaaactcttttactcagaagcggaagaccatgaactctaaacaactctgcgaaaaactcctttacctctgcggtaaaaataaaacgaagagactctttgcaatgtctttagaagatttgagcattttgaatttaaggttttgaggttcaaagcgcaacgcctttggcattggggagacaaaactaaccaatcaactcatcaaccagccaactaattaaccgaaactatctcgcaaaaggcgcagtttcctgcgtagcaaaatctccggcaaggtatttaaagtgcgcagccatggcaatcattccggcattatctgtacaatattgaaaatcggggataaaggttttccatccccgttttttaccttctgtttccaaagccaaacgtaaagcactgttggcggaaacacctccggctaaagcaatttgtttaatgtgggtttgtttggccgcaacaatcaactttttcatcaactgtttaataattgcatgttgtatgctggcacaaatgtcattcaggttttggctaataaaatcagggttttgtgctacctgtttttgtataaaatataaaaacgatgtttttaacccactgaaactgtaatccaaatcgggcatgttcgaaacagggaattcaaacgccaaaggatttccatcttttgcatacttatcaattaatggtccaccggggtagggtaaacccaatatttttgccgctttatcaaaggcttctccggctgcatcatcaatggttttgccaattacttcgtgttcaaaatagttggttagtttcaccaattgtgtatgtccaccactaacagtaaggcacaaaaatggaaattcgggtttaggatcatcaataaaatgcgctaaaatatgggcctgcatgtggtgcaccgtaattaaaggaacatttaaacttagtgccaaaccctttgcaaacgagcaacctaccattaacgaaccaattaatcccggtccggcagtgaaggcaacagcacttaattgtgtaggggttatacccgcttttttaatggccacatctaccaatggtactatgttttgttggtgtgcgcgcgaggccaactcgggcacaacaccaccgtattgttcgtgtacttgctgtcctgcaacaaggttgcttaatacttttccgttatttattacagcaactgacgtatcatcgcatgacgactcaatggctaatatggtaatatttgtttggttcaaaatttgtaatccttatttttgctaacgtacctttttgcgcactttaaaatacatatctgttaccctgctgcttgtgcttatgcttttgctaggcacagcctatgctttatttcaaagtaattctttccaaaactggttaaccgataaattaggcaattatttaagtgcgcaatttaaaactaaaattagtattggacacattaactataaacctttacaaacttttgagttggaagaggttttattcggtgatcataaaaacgatacattgttttatgtgggtaagctcaactttacactggcaggttttaaattggattcatcgcaatttaggttgagcaatgtaaaagttaccgatgcatactgtcacctaaagttttacgaagacagcagttttaatattgatgtgttgtttaacatactcgatcctaacgataccataccaagcacaggtccgccttttaccttacactttgataaagttactttagaaaatgcccgattcaggctggaaaataaactggatacctcgagttggggcaacgcttttgcaccaaataaccagtatttttataacatcaatgcaaaggccgaagatttttacatcataaaagattccctacattttatcctgagtcaccttgatttgagagaacgcagtggttttaaagccaaccatattcaagccattaccaccatttcgcccagttgtatgttgtttgatagtttattgctacgtacaccatacaccacagcgggtaactcttttgggatgaggtataagagttacaaagcgttcagtagtttttatgatgatgtaaaactggatgttaacctcagttcatctgtggttgatttaaaagatgttgctttttttgccgaagcactaaccgattttccatataagtttaaagtgaaaggtaaggccgatggaaccatcagcaaccttagtttaaaagatttagatgtgcgttttggccaaacaggtatgtttagtggttcggctgatttaaacggcatacctgatatggacaatacttttattgatgccaaggtaaaacaagtattggtaaccaaagccgacattgagtatttggcgcaaatgcccatggccaacgaattggttaaattgggactcatcaaatttaaaggacaatacaccggattttttaaagattttgtggcttacggtaagtttaacacggccttgggtgatgtggttacggatttaaacatgaaaattgccgatgagcaagaagattatgaatactcgggtaaggtagatttacgtgactttaatttaggttcattaattgatcaaaaattaataggtaaactcagcgcggtttctaatatttcgggtaaagggtttgattttaaaaccatgatggccgagtttaatgcggatgtagcctatattgatttttatggctatcaataccaaaatgtaaccgtagccggtaaattaaataaccgcttaattaatgccgagttgttggttgatgatgccaacttaaaccttcgttttaatggaggaattgacctgtctaaggacatgaatcaatataactttaatgcaaaaatacgccatgccaacctgcttcctttgggttttgatacagccgatttaatgctaaatgcagatgcagatattaactttgcgtttaaagatttagaccgtaacaaaggtcaaataaccataaccgatttaagtatttccaaatacgaagaattgtataccattaaacaggtgtatgtaaattccattaacaataatggtaaccgcaccttgcagcttaaaacagataatattgatgccgaaataaaaggggagtttaatttactagagcttggtgaagcggcagatttagcgttacatcaacttatcccagagtactttaaaaaaccggcctataaaatcaggcaaaagcaagattttgaagtatcgatacaagtaaaaacattgtatccatttaacgaactttatttcccggatattgaggttcgcaacgcacaatttaaaggtgcatttaacgaaaataaccaacaatggtatgccaatgcatacttaggagggttacgttatggtaaaacaagtgttcgtggcattaccgtaaaacacaccaaaaacagtggcgaaggagcagaattgctcacctcatttaaccgcctattggtaaatgatacactgtatgcgaaagatgcagccattaaaatagttcaacataaaaatacggcagcggttaatttaatggtaaaagacagcaacagtttatttaccaccaacacattggcaaacgttacttttacagcaggtaaaataaataccgttttcgattttagtcagtttaagttccgttcaggcgattttgaattacgcaaaggaagctcgttgtgttacaccggtacagggttagattttaccaacttttaccttacacgcaataccacggaaaccatattggtaaatggtgtatatggttttaattcaaaccataacatgttggttgatgcatcaaatattcgccttaatttaattaacgatttggtgccacagcttaccatattaaccgatgggatactaaacggaaacatcaccgtatcaaccaaaaataatggtttagtgattggtggagacgccacacttaccgagctttcgttagacaaagatacccttggcgacttcaggttattaagcagttatgccaatgaccagaaccgattgatggcatttattaaatcggttaaagggaaattgcgtaacctcgaaattggtggatactatgatttgagtcgtaagagtgatgcattaaattttaccattaattttgacgaatctgatatcacctcttttcaggcgtttgtaaaagattacatcaaattattaagcggaaatgtacgtgcaagcggccaactatcgggtagttttgataaacctgagtttaattgtaatgttgattttatgggggttacacttatggtagattacctcaaaaccatttattctttcagcacatcaataaatattaatgagcaacaatttaccatcaacccaaccgaaatacgcgatataaacgatcaccgaggaactttatcgggtgtaattacgcacaatagtttttcaaattttaaaaccaatttaaagtttaacgatttaaaagattttcaattactaaataccggaccaaaagacaatgatttgttttatggtagggcatatgctgatggtgctttaactttaaccggatcatttaccgatttgttgcttgatgcaaagtttacaggcaaagaaggaactgtaattaacattccgcttagtaccagttatggcgatggagaggatggattgattcattttataagtaaagattctactcctgctaaatcaaattataaacgttcgggaacacttagcggttttgccattaattgtatgttgcacgtaactaaagaggcagaaattaatattgttttagacgaacaacaaggcgataagattagaggaagaggtaatggtgatatcaaacttgaactcactagaagcggacagtttaatatgtatggtgaagtagaggtggatgaaggtgattataagtttacagctatgaatttgtttaccaaaaaattcatacttaaaccgggcggtaaaattagttggacaggcgaccccgttggtggacaaatgaatattgttggagtttacaatgtgcgtacaaccgttgctgatattgttgcaggagctaccaacgaagaacgcgaatcgttaaaacaacaacgtgttccggtggagtgtttgttgtatgtaaaagggagtttgttaaacccggatattaaatttgatatgaacatatctgatgtaaatggctcgctgccgggtaacaccgtatccgagttacaaaatacattaagggtgtggcgtaacgaaaatgaattaatgacccaacaggtaattagcttaatgttgtttgggcgatttaccccaacaaacgttcaaaactctacaggtccaaccaatttatcagcaggtgttaataatacattaagtggatttgtatcggcacaagcaactaacttcatacaacaacttattccggggttggatgttaacgtggattaccacaccggaacagaaagtgtgcgtgggcgtactatcgtatcggcatcaaaacgtatattagataaccgtttagaaatacaagccagtatagaccctattaatacctatcaaaacttcttaacccaatataaccttacgcgaagtggaaatataaaggctaaggcattctcacgcgcacagcttgatcctatttacaaccgcaatatcaataccaatggggtaggtttatactaccgcaaggagtttgataaattcagcgatttgttttccaataaaaacaaaaaggtaaataatttatcacagtaaaattattggctaattttagtaaacttgtagctttattagccttaaatctgttaaataaaatcaataattatatgagtaacgcaggaattccatcggtaaacttagccgactttattaatggcgatgcccaacaaaaagaggcgtttgtgcaacaattgggtaaagcatacgaagacattggatttgttgccgttcgtggccattttttaagtgatgagttaagcaataatttatacgaacaagtaaaacagttttacgctttaagtacagagcagaaagaagcatatgaaatacctggattggccggtcagcgtggatatacaagctttggtaaagaacatgccaaaggcagaacagaaggcgatttaaaagagttttggcaatttgggcaatgggttgaagatggcgatgccattaaagccgaataccccgataatgtaggtgttaatgaattacctcagtttaatattttaggtaaagaagcctacaaacgcttggaagaaacaggtaaacacatgttacgtgccattgctttgtatttaggtttagatgaattttattttgatgataaaatacacaatggcaacagtattttacgtgccatacattacccgcctataaccaacgaacctaaaagtgctgtgcgtgcagccgagcatgaagatattaacctaattactttgttaatgggtgcatctgccgaaggtttagaggtattaaacaaacaaaaccaatgggtggccattactgctttgccagatcagttggtggtaaatgttggcgacatgttgcaacgtttaaccaataataaattaaaatcaacaacgcaccgtgtagttaatccaccacgcgaaaaatggggaacctcacgctacagcattccgtttttcttgcatccaaaaagtagtatgaagctagattgtttaacaaactgtgtaaccaccgaaaatagattgcaatacacacccatcactgcaggtgagtatttggatgaacgtttaagagaaatagggttgaagaaataaattcaatacatgtaaaaatacacctccggttgatcatcaatcggaggttttttgttttaagcttattggtatggttgcactaacatattaattagtatggttttaactaaaaagcaattttatagggcataaaaaaacgaccccaattgcacagggccgccttaaatgttttcatcccgagtactcgggaaaaaatccttgtagtgatttgctttgaataaaaatatttgttatttatgtagtgacaagaataatttttgtcaattgtataactaaaataccctaatcaacattaaaaacaaacctaacacgctaatctagatacttcttgctataaaaaagccccaccaaagcagggccaagaaatcttcggcttatagccttattgtgatttgcaatacgatattaaacaaaaaaccattaaaaacaatattatgaataaaatttttggacttgacttaggtacaaactctattggatgggctttaagaaatcctgatttaatagggaatcaaatggaaaaatatggtgtactgacatttaacaaaggagttggtattggtaaaaccggggagtattcatatgcggcagagcggacaaaaaaacgatcgacaagacgactttatcaatctcgaaaatatagattgtgggctaccttagagcatttaataatagagggatattgcccgctgaatattgacgatttaaataagtggagacactttgataagcaggaagccagaaaaaacaataacggtggacgtctatatcctacatggaatttagcctttgatgcttggattaaattagattttaacagagatgggctacctgattactcaagcccataccagctaagaaaagacttggctgaagtgaaacttgattttacaaaagaagaaaaccgctttagattgggcagagcgctttatcatatagctcagcgcagagggtttaaaagtagtagaaaaggggcagatgatattaaagaaaaagatactgatgaaaacgaagtaatggatttgcaatactctgaaaagaaaaaaaataaagttatagcagagttatttgaaaggcactcagaagcaaaaacaattggatggttatttgctttgctcgaaaatgaaaaagttcgaattcgagaaaatatttctcaacatgccatcagagaaaattacaaagatgaaataaaatacatcttccattttcaagggtttaatattgacagctcactttataaaaagctagttgaaacaggtaagaacaagaatgatggaagcatattcttcaaaagaccattacgttcacaaaaggggcttattggtaaatgcactatagaaccaaacaagtatcgtgcacctatcagtcatccttcatttgagaagtttcgtgcatgggcatttctaaacaacattaaatacaaagaaaacaacgaatggaatcaattatctcttaatttaaaacaagatatttataacgagttatttttcaggaaatcaaaagcatatttcccgttttccgagatcataacttttttggttaaaaaagataaaagcaaaaattggcagttaaacttttctgctaaaacaacggtaacagcttgtcctgtatctgcaagattgaaagacatatttggtgatgactttttgaatatcaaaataaataaagaacaaaaatctaaatcagggaaagacttttacgacattgaagatatttggcatgttttgtttagttatgaagaccaagaatatgtctcggaatttgctgaaagcaaactaaagcttgatactgaaaaactaaagcagtttgtgatagcatggaacgcatgtcctgttggttatggaatgcttagtataaatgccatcaataaaatcaatgtgtttttagaaaaaggattgatttatactgaggccgtattgttggccaacattccgaatgttttaggaaaggagttatggcaaaagaatgagcaattattattggattgcataggaagtctaattgataaaaaccgccaacaaaagtcaatactaaacattgtaaataccttaatttctaagcataaaaatttagaggctagcgaaaagtttggttttaagaataaagattataaactaaacgatagtgactttaaagatattcaaaatgttattttagaatattttgggtcaaataaatgggctggttttttagacgctgaaaaagatagaatattaaatagtattaaagattgttaccaagcatattttgctaaacaaggaattgtcagagaccaaggtagtttggagcgattggtaaccattcagtcaaatggtgaaaattactacagaacagaaacaggttattatcaactaccaaagttgattgatacactaaaagactttttaaaggataattttgaacatttagacgatgaaaaactttcaaaaatttatcatccatctgaaatcaatatttatccttcagcaaaaacggacaaggatggaattgtaaaactaggaagccccaaaactgggtcgtttaaaaatccaatggctatgcgaacattacacgaacttcgtaagctattgaattatatgattgaaaccaaccagatcgataatgaaacaagggttgttgtagaggtagcccgagagctaaatgatgccaataaacgttgggcaatagaagcttggcagcgtcaacgagagtctgaaaaccaagaatttgcggaggctatcaagcgattgttgcaagaggataatactatcaaagcaagcgctgaaagtaacaatgatattgataaattgaggttgttttacgaacaaggtgacgagcaagcgctaccaccagtaattgaatttgaagatgatgaaaatggtaataagaaaaagaaaaaagcgaatgctaaagatgatgtaatacgttggaacggttatggtaaaaagcttattgaaaagtaccaattatggaaggagcaggggtatcaatgtttatacacaggaaaactcataaggttaacagacttgtttgacgataatgtgattgattttgaacatacactacctaggagcaaatcttttgataattcattggctaatattaccgtatgctatcatgattataataggaccgtcaaaaagaataaaataccagcggagttgcagaattatgataaggattatgactttggaggagtaataggtaaatgcactgcaataaagcctagattggaggcatgggaagaaaaagtaaaacgaattaagcaacaaatcgatttttggaagacaaaggctaaaaaggcatctgacaaaacatggaaagatgatgcaatacgccaacgacatttgtggcaaatggaattggattattggcaaaataaattaaaccgatttaaaattactgaaataacaagcggctttaaaaatagtcagaaagtagacacacaattgatttccaaatacgctttccactatttaaaaacatattttgataaagttgatgttcaaaaaggaactattacctcagatttcaggaagatttatcaattgcaagttgctgatgagaagaaagaccgtagtaaacattcgcatcatgcaaaagatgcagctgtactaacacttattcctttggcagttaaacgcgatgcaattcttgagaagtattttgagtctcaagagaataggacaaagtttctagacactgagccatataaaggttttaaacgagagtttatattgaatatcgatgatggtattttaataaacaatatcaccaataatcaagaactaacaccatcaaaaagaaagattagaaagaggggaaaggaagttttcattgataagccagatgggacaaaagtgaacaaatgggcaacaggtgattcaattcgtggacaacttcaccaagaaaccttttatggtgcaataaaaccggctaagcgaggtgagaatggaaacttattgaaagatgaaaacggtaagtttattcaagatgaacaagtgaaatatgtattgagagtaccttttaactcagaattcaatggtatagaaaagattgttgatgagggattgaaaaaacaaattaaagagcattctaagagagcaggtagttttaaaaaggcctatgaagaaggaatatatttacttgataaatatgggaaccctcacggaaacaaaattagacacatccgagtttgggctagcgtatccgaacctttaccaatcaaaaaacaaacaaatctttctgataaggattataaacaaacctattgggctgccaatggagagaatactgtatgtgcttattacaaaaatgactacatagataaaactggaaaaatcaagaaagatagagagctcgaaatcattaacttgttcggagttgctcagttaaaaagtctcaatatgcttgagaatgggcatttacaaatctttagaaaagataaaaacaatcaagtcataattgataataatggtaaaaagtatgagccatacgcgataattagggccggaatgaaagttgttttctatgatgagaagatagaagagttaaaaaggcaagatggagaaagtataactgattataatgaacgtatcagctacagaacctacaaagttttaaagtttgcgggtgcccaggttacttttttacatcatttagattctcgagatgaaaaacaacaaatggaagattatccagagaatggcgttttcaaagaaagcacttatggaaaaagaggtaagaacggttttactgaaagaataactgatagtattaaatacaacaatggtaaaccttggcataaacttttgtatactaaagattatttggattttgctgttgagggtaagcagtttaccataaaaatggacgggatgattgagtggaaagacaatatttgatttaatctgtcaatgttatttatataacattttgatattgtagattattcaaacaatcagaatgattttaaatacaattcgttttgtgtttcaatgtgaaacagcactgttgtgatttgctttattgatgtttgtttatgttttcagcggcatcaatgaattacgctgtgcttcgtttcaggttttaaaacgatctttgatatacactccgactgttgaacagccatataaacttcatgttgtgatttgctttcagatttttaaaaacgatctttgatatacactgtggtcaggacaggattcgaacctgtacaagttgtgatttgctttcagatttttaaaaacgatctttgatatacacttacgtttgttttcttcggctacagttaatagttgtgatttgctttcagatttttaaaaacgatctttgatatacactcaaaggcgtaatactatgacagaaaactccgttgtgatttgctttcagatttttaaaaacgatctttgatatacactctgatactgttatttctacaatatcattaagttgtgatttgctttcagatttttaaaaacgatctttgatatacactgtaggattagaaacatatacagcgtaagcagttgtgatttgctttcagatttttaaaaacgatctttgatatacactcctgagccttgaagttggcaagcaatatatgttgtgatttgctttcagatttttaaaaacgatctttgatatacactttatttacaggaaactttagggcaacacctgttgtgatttgctttcagatttttaaaaacgatctttgatatacactttaaagtatggagcgaaatcacttgattgtgttgtgatttgctttcagatttttaaaaacgatctttgatatacacttgaacaaccgaattgatgattgttctagtagttgtgatttgctttcagatttt

SEQ ID NO: 2605 - DNA, 23390 bp, synthetic construct
  source 1..23390: mol_type = other DNA
  misc_feature 1..23390: note = Synthetic
tctcactgccgggtacaccagcttgctgcacaagtttcactgtcatttttacctcaccgtctcaggttacttaagcgattaatgcggctgccgcagctgccgcatcagctggggtgtcaatcttgtggcacggcacgcccttcaaaccgcggcgtgccaggccagcgagagccccactcggggtgacctcaaccagagcagtgacatggccggcagcaaatgcttccatgcacaaatcccagcgtaccgggcttgcaacctggcgcaccaaaaggtcaaggtactcggccccgctgctcactgtgctgccatcagcgttggtgtaaattttgtgggccggatctttgaccgtaaactcactgtgtatagcctgcagctgctgctgagcagcagccattgctgcagtgtggaaagcgcctgcaacctgtagctgaatgacacgagttctcgctggcgggttagcgaccagctcagcaacggcagcgctggatccaccgaccacaatctggccgccaccgttatagtttgccggggttaagccgaggtccgataattgcggctcaatctccgctagctcaccgccgagcaccgccgccattgaagtgtcatgcgtctgtgcgcactcctgcattgcgcgggagcgtgcagccacaaaacgcatcgcagttgccgcatcgaaaatgcctgcaccgtaggcagcagtgatttcaccaacggagtgaccagcgaattgcaagtccgcaaccatttctgcagcgcctgcagcagtcaagtttgagcgcaaggcatcaatcgcgagaattccagaggcaacaattaaaggctgcgcgactgcagtgtctttaatggtttcggcatcgctctcggtgccatggcgcagcaaatcgacaccgattgccgcagacatctccgccagccgcgcgcgatactcaggaacctcagcccatgggctaagaaatcctggtttctgagacccctgaccggggcaggtaataacaatcacaacactagtttgccagatgtatcatactaacttcggaatttaacggctatattttgcagagttttttgtacagttcatacaagcggcagtgattagtcattttccttggcactataaaggtctccaagcaccaaagcagtgcgcagcatgaaagcatcgcgaggctttgcggggttgcattcgataagctcgctgatacgctttaaccggtagcgcacggtgttagtgtgcacatataaatcacgtgaggtttgctccaatgagctgccattcaacagatagctgcgcaaagtcgccagcagttcaccattcgctcggtgcagtggcaggtagatcgtttccaacagggtttcacgcgccaactcatccccagagattgctcgctccggcagcagcgcgtcagcagctgcagggtagctcacatcgcgcaccgcggcagctactgccagtgccgcaagtgctgcttttgcggagtactgtgcgtgcacaatcgaagaaacagttgggccaagaatcaatggatcagcggtaaagtggtgtttaacccgctgcgttagcgcattaaaaacctcgctagcttcagcaaggctctgttgctgcagctgcccgaaaaccaaaagcaatctgttgccctgcaccccaaccagcacatcacaaccgtatttacgagtggctcggcgcagctgctccagatttgcttgtggtgcaatggtgcccgctagcactgccaccgcaccgtttcctttccagcccagcgcagcgctacgactacgcacatctccaactgcggtgccggtgatgattgaatctacgattagcgcttccaggcgggtatcccacaggccgcgaatctccgccaccttagcgtaaaccttggcagctgcgaacgccagttcgcgagagaattgcagtgtagcttctttgagttcggggctgcgctccgcaacagcttcctctacggttgccaccaccacctgagtgagctgtagggtttgaaacaagctcagcgcctgtgacagttcgcgtggtgcggaggcaaaaatttcagcgattagcgattgccggccagccggatcctcacaccaattaacgtaggcctgcaggcctcggcgcaccacatcaccaatgatttggtggcgtttttccggcatattcgccagccacggaaactccgcgtcacaacgctgtagtgacagtgcggtgacctcatgcatgacggttttaagccatttcaaatctgccgcaactgtttcatttatttgattagttgtcacagtttttcctgtgttcatttttctttgagggggattatttggggggatatggttacagggcggactcagcccgccctgtaacctgtattttactaggaatcaccgccagcgccgccagttgaaccggcagcaatatcgtcgaggcggtacttctgataggcagtgcgaggaatatcgtagctaatttgccccgctgctgccagccgctccagcaccttcacaaccacatactcgcggtcaataccgaaatagcgccgggccgctgcccgggtgtcactgaagccgaaaccgtcagcaccaagcaccgagtagtcgcccggaacgtacttccgaatttgttccggcacaccggtctcgaaatcgctaaccgcaacgaatggccccgtggcatctgccagcttttcagtgacgtatgcctggcggttttgctcaccgatattcttaaaggcaacggcatctgcggcgaggccatcacggtacagctctgaccagctggtaacgctccacacatcggcgctcacaccccagtcttcgtgcaacagctgggcggcctctcgtgcccatggcacggcaacaccggaagctagaatctgtgcttttagctccgcatctgggccaacctcaacacggtgaatacccttcacaatgccttcaacatcaacatcggccggctctgccggatgcacaatcggttcgttgtagacagtgaggtagtagaacacgttcgggtcgggatgcttgccaccgtacatccgctccataccggcgcggataatatgtccaatctcgtacccgtatgctgggtcatagctgatagctgcagggttggttgaagccagcagcggagagtggccatcggcatgctgcagcccctcaccggtgagcgtggtacgcccggctgttgcgccaattacgaaaccacgcaccatttggtcgcccgccgcccagaaagcgtcgcccgtacgctggaacccgaacattgagtagaagatgtaaaccggaatcatcggctcgccgtgagttgagtatgaggtgccaaccgcggtgaacgccgctgcagcgcccgcctcgttaatacccacgtgcaaaatcgcgccctctgagctctccttgtaggcgagcaataggttgcggtcaaccgaggtgtaggtttgcccgtttgggttgtagatcttggatgtagggaagtagctatccatcccgaaggtgcgtgcctcgtcaggaataatcggcacgatccgcttaccgtaattcggatctcgcatcagatctttcagcagtcgcacaaacaccatagtggttgcagcctgctggttaccggagcctttcttcgcgatgtcgtagcgtttagcctcgggcagcgcgagatccacatattttgcactgcggctcgggaggtagccgccgagttcacgacgccgctctttgatgtactggattacatcgctgtcttctgctgggcggtagtaaggtgcctcgtatggatttgcctccagctcagcgtcagaaaccggaatatccatggtgtcgcggaagagtttgaggtcttcaagcgacattttcttcatctggtgggttgcgttacgggcctcaaagtgcggtcccagaccgtaacccttaatggtgtgcgccaggataaccgttgggcggcctttatgctcggttgcggccttgaacgctgcgtaaactttgcggtagtcgtgaccgccacgctgcagcccccaaatctggtcgtcgctgtaattttcaacgagttgcagagcgcgtggatcgcgaccgaagaagttctgccgcacatatgcaccgttttctgccttgtaggtctgaaagtcaccgtctggggtgacgttcatcagcttcagcagggcaccgtctttgtcacgtgccagcaggtcatcccactgccggccccagataactttgatgacgttccaaccggcaccgcggaagaagctctccagctcctggatgattttgccgttaccgcgcaccgggccgtctagccgctgcaggttgcagttgattacgaaggtgaggttatcaagcccctcgtttgcggcaacctgcaactgtccgcggctctctacctcgtcaagctcaccgtcgccgaggaaggcccacacgtgctgatcagagcagtctttaatgccgcggttggttagatacttgttgaactgtgcctgatagatggcgttgattgggcctagacccatcgatacagtcgggaactgccagaagtctggcatcaatcgcgggtgcgggtagcttggcaaaccgccgcccggatgtgacacctcctgccggaaaccatcaagatcagccgcgctgagacgaccctccaggaaagcgcgagcgtagatacctggggaggcgtggccctgcacgaaaatctgatcaccgccgccgggatgctcttgcccgcggaagaagtggttaaacccaacttcataaagcgcagcagccgaagcatacgtggaaatatggccgccgacctcaataccgggacgctgcgcccgatgcaccagcatcgccgcattccagcgaatatatttgcggtatttgcgctctagcgcttcgtcacctggaaactctggttcattctgtgacgcgatggtgttcacgtagtccgtggttgggatctgtggcacgttcaggtgcagctcgcgagagcgcgccaaaagactgctcataacctcccgagcacggccaggaccgcgctgcgctaccaggtcgtcaagcgattcacgccagtcttgggtttcttccggatctgagtcgggacggtcaggtgcatatggatcttcagtgttaactgccatcttcatcctctgctgatacgcgcaatgcgctacggacactctgcttttgcagacacgttactatcctactaggtgacaggcggagggggtgcgagttttgcacaatacctctaaaatatcctcagcatgcattttttacacaagaccatggctaaaatccgcgggcgcgttacagcggcacgctcggcgactggatccaccgccccagatttctcactccctgacatcaaaggagagctttatcacctgcggacagctacagcgcaacagccgcagtttctcgttttcatcccgaacgcattcactccggtgtgcaatgcggaggtgacagaactgctgcaactcgcaccaagcttggaggcgcagctggtgattattacctgcgacagtaagcatactttgcgatcatggctgcaaacccagcaagatattcccgccaatgttgtggtggtcagtgatttctggccgcacggtaaaatttcgcgccgctacggtgcatttaacgcacagaccggcagcagcctgcgcaaaactttgcttgtcgatcagcgggggcggatcagcgcagtctttagcgccatcccggggcagcaacgggataccgcgagctacgaaaacagcctcgcagccttgcgacacgccgaggccggggagccatttgcgagggcttaaaaaatgttgttatagttattgagttgtcaccgacaacaacagaaaagtcgcaagacaagcgcctgtagctcagttggttagagcacttggtttacacccagggggtcgggagttcgagtctctccgggcgcacagataaaacccgccgcaagcgggttttttgctattcccgggcatctgctgttagcaacggtgccgcccgctgcgctgacagctgccaggccgcccgcctgccgtaatccatcggacacgaaatagcttcaggcagggcactccggcatgcgatgcacggcgcaaggccccgtgtgtgacacaacgcaagtgcggcacgactatcaaaatagccgcaccgcactcggtcgcttgatgcgtgtcagcgctgctggtcgctgctgcctagttcagcccgcggcggcgcagcaccgctgccggctccggatcacgtccaagcacggcccgcacagaatccatctctgggcgagaggaaccccggccaagcaactcacgacgtaccttctcaccggcgacgcggttcagaccgccgtcaccgttctcggcgcccacagtgcggaaccagtgttcgatctctgcagccacaacctctgcccacacgtatgagtagtagccagcgtcgtaaccgccgccgaaagtgtgggtgaagtaagcagagcgataccgcggaggaatcagctcgtaatccatcccaacctggcgcagcgcatgcgcttcaaactctgcaacgtcgtctggcacttcagtcggagttagtcgatgccacagctgatccaccaaagccgctgacagctgctcagtagtagcgaaagcctgcccgaaggttgccgcatcaaccagctgctgtacggtctcggcaggcagtttttcaccggtctcatagtgcaccgcgtagttagcaacaacttctggatgatacgcccacatctcgttaaactggctcggcgcctccacaaagtcgcgcgccacgttagtgccacaggtccagcggtactgggagtccgcgaacatcccgtgcagcgcatgcccgaactcatggaacagggtgatgacatgatcccaggtcagcaggcacggctcacccgactgcggttctggatagttgcagttgttcatgatcaccggcaggttgccgtcgcgcttggcgccctccacaatcgcgtgcatccaggctccgcctgatttgcctttgcggcggaagaagtcagcctggaacagcgcaatcggggtgccgtcagcttcctgaacctcccaggttttgacgctcggcagatatcccttcagctccgggagcggcacgaaacgaatcccgtacagtttttcagcagcaaagaataagccgcgctcaaccacgctgttcaactcaaagtaaggcgctaattcactctcatcaatacccagctcggcgcggagcttagcctcgtaaaacagccagtcagcggctcgcaactcacgcaaaccgtcagccgcagccagctgcttaaagcgctccgcctcctgtttcgcggctgctaaagccgagctgctgacgctgcgcagtagctccataatggcatcagaatcctgcgccatcccggcggcagcaaccgcctgggcgtgatatgggtagcccagcagagccgcccgctcagcacgcagcttcgcgatccgcaaaatcagctccctggtgtcgctgctctcgtgctcaccaagaccgcgcgacagtgatgccgccaaaaccttttcgcgcgacgcctgcagcttgagctccgcttgcaccggttgattggtgtagttatcaagcggcagcttccaggtgccgtcagcctgctcgtaagccgcaagttgctcagcactcaatccctcaagctcagcagcgtcggtgaaaaccacctcgttgtcgctcatcgccagcgttgcacgctgcgagaaggcaatttccgcctcgctgatagccgcgtcgagctcccgcagtttagccttatcagcggcatcaagcttgatgccaccctgctcgaatttcagcagctctgttttaatatagtgtgcggtttcagcgtctgcgtcgcttaaatcaatcgcagcaagtcgattgtagagccgctcgtcgagccggtaagtgttgtcgtgggcgctcagcagcgggccgatttcagcctctgcagcctccagctcggggccgccgatggaagaaaacagggtgaaagcgatgttcagaatctcgctcagctggcggccagcatcgtgcaactcgtacactgtgttggcgacggttggcgctgcctcctgggtggcgatgcgctcccaagcggcttcggttgcggcaatcgcagttttaacagccggaacgatgtgctccggtttaatctgctcccacacaggcagttgataggggagggtggatcgcgtcagcagtggattatttacgttttcagtcatgcgcacaattttactcttttgcgcaaccgcaaattttcaccattgtatccggtggtttttggttatagactgatggtgttcaaagatgatccgtttcataaggagcgtaaagtggcgaaacaaaaactaaccctcagtaacgctactgacaccggccatattcacgtcggcaaaggtcttaacagcgctgcgctcggcgttgtcggctctacagtcatcggtctggcatcaaccgcaccgttgtactctctggctgcaacgctcggctacgtgattctggcggttggcgcgcaggctccggtggtgtttattgtggcttgcatccccatggtttttgcggctctcgcgtatcaagagctcaaccgggaaatgcccgactgcggcaccgctttcgtgtggggcgcgaaagcttttgggccaattattgggtggatcggcggctgggccgtggcggtgtctgccgtaatggtgctggcgaacgtgggagaaatttccggacagtacttctggctgctacttggtaatgaagagtttgccagcaaccgcacaatcgtggtcacaaccgcggtggtgtttattgcgttgatgacgtttatctccactgtcggggtgcaaatcggcgaaaaaatgcagatgattctgatggttgtgcagattggcgcaatggtggcttttgcgattgcggctgtggtgcacgcggtgagcggatccaaccctgattctgtcgcttttgactgggcttggtttgatatcacccagatcactgagtatggcggttttattgaggcggtgctgctggccctgttcatttactggggttgggacacctgtctggcgctgaacgaagaaacaaagaatccgcgcaccgtgccgggccgcgccgcacttttgagcattgcggtgctgatcgtgctatacgtgggggtgactgtggcggcaatgatgtttgctggcatgggtgacagcggcaccgggctaacggtagaagaaaacctcgacgatgttttcagtgtgctctctggggcgttgttcggcccatggggctggttcttgattctggcggtgatggtgtctgctgcttcttccacacagaccacgattctgccaactgctcgcggcaccctgtcaatggcggtgtatcgggcattgccggcaaagtttgcgctgctgcacccgaagtttaagacgccgtggttctcgaccacggtgatgggcatcgcggcgattgcatactatgtggtgatgtcgattgtgtcgcaggatattcttgccgattcgctgctctcgatgggcttggcgattgccctgtactacaccatcgtgtgcttcgcttgcgtctggtactaccgtgacaccctgcgtgacagcgcccgcaacctatggatgcgcggcatcttcccgacgctgggtggcctgatgcttggttacgctttcgtgcagagcgcaatcgacatgattgatccggagtacggctacaccgtgttcttcggcattggaggtgtttttgtgatcggtatcggcgcgctggcgctggggctggtagtgatggggctgtgggctcttaacaaagacgctaaaccgtacttccgcggtgaaagcctgaaccgcgacaccccggtgctggtgcctgacgagggatagcactctgctgctgcattcgatgctgacaataggatataattaaatcctcaatctcagtaaacgtctccgtgttagaggcgtcgaatggtccctccaatcggagataatttaaccgccacttgctattgcaggtggcggttttgtttccttataattctgctatgagcaaagcagcgcagttgcagtacaaagttggtattgatgttggcttgaattctgtgggtcttgcggcgattgaggttgacgacgatggcacaccgttaaaacttcttaacgcggttgtatacactcacgattctggcgttgaccctgagcaggctaaaagtgccaccagcaggcttgctgttgctggagtggcgcgacgcgctcggcaccgggtgcggcgccgtaagaagcggttagcgcaacttgatgctttgctagagtcagcaggctatatgctggtggataaccacagcaataacgacccgtactggccgtggaaggtgcgccagcgcctggcaaccgagcaggttgataaagccgagctgctgctactgttgcccgttgcgctgcggcacattgcgcggcatcgcggttggcgtaacccttattcctccactaaaacgctgcagcagccggcgccctacagccaattttatgaagcgatgcgggagcgggtaagcaaggtaacttttcatgagtttgatgacagtgcaactccagcacagattgtgtgtgaagctctagtgccgaagctggcacacaccatcggggtgattcctaaccctgataaaacggctgcaaaacaaaaagcttttatcaaccagtatcgcgtgcgcggtggtgacctacacggtaagctgcatcagcaggatctcgctaacgagattcatcagattgctaccatgcagcagttgccagctgcttttgtgttagagcttatctcctgtgtctttgcgtctgagagcccgaaaggcaaagcggccgagcgggctgggaaagatcacttgccggggcaagaaaaactcaccagggcaccgaaagcgcatcctgcttttcagaaatttaagattgtcagcaccttagctaatctgcgggtcgccgagcagccgctgtcagccgctgagttgcaaaaagccacggattttctgctggcgcaaaccgggaaagatggcacaacttgggagttacttgccgatcacctcggtgtcagcgtcgcgagccttggtggtctggcatccgctggtgcagacgtagaacacaccggcaaaaccccgccgcgcgatatcactagcgtgcgcattttgaattccaaccacaaggcgttaaaaacctggtgggcgaacgcagatgagctacaacgtgccgcgatggtgagccagcttactaactcagaacagctgccgcaggaagctatcggtgctgaagcggtgactgagtttctcgggtcatgtgatgacgccgatctgctaaagctagaaattatttctttgccagctggccgggccgcatactcagtagactcacttaagaagctcactgcccaaatgctcgcaacaggctgcgatctgttcaccgcgcggcagacactttttaatgttgagcgcgattggcggccgccagctgatccgattggtgagccggttggcaaccccgcggtagatcgggttttgaaaatagtgaaccgctggctgcttgctgcggagcgccgctggggcaccccggcaaccatcaatattgagcacgtgcgcaccgcgttcgcatccgaggcgaaaacccgggagtacctgaaggagttaaagcagcgggcagagctcaacgaaaagattgttgccgagatggaggcgcggattggtgtgcagccgggcggctcaagcagctctgtcacgcgctggctggctctcgcgcggcaacgcaattgctgcctttactgtggcacgtttattgatttcttcacggcagaaatggatcacatagtgccgcgcaaggggccggaatcaacaaacacccgcgtcaatctcgcggcggcttgcaaagagtgcaacaaagataaatctaatcgaccctttgcagtctgggcagaaaatactggccgtcctaatgtgagctatgctgcggttgccgaacgagtgcagaacctcacaccgtacgataactttgatatgcgggagctgaggcggttcaaacaggaagtgctgttgcggctcaaaaaacgcactcctgacgaggctattgattctcgctccatcgcctctgtcgcatggatggcgcgcgagctggctgcacgtattaaatatcatttccgctctaagcaagagattaccgtcggcacatacgcagggtcggtaactgcagatgcccgccgcgcgacaggctttgtgggcaaggtggagctaatcggcggaaaagcaaaaacccggcttgatcgccgccatcacgcgatggatgctgcaatcgtcgcgcttctgcgcccaagtgtggcaaaaacgctggcgatccgctctaatatgcggcaggcagagaatctcagtcagcgtcacactggcgattggaaacaatttgatggtgcggatcacgccgcccaaaaaatttatgccgtgtggcggcagcacatggaagtcttgctaggccttttcaacgaagcactgcaagcagataatgtgccggtaacccagaatttgcggttggggctgggcaacagcaaagcacacgatgacacggtgcgcccgttctacccgaagggcagcaatccgaaacgtttgggggatgcttggagcgttgaggagattgatcgcgcgaacactccacaactgtggttggcgctgacccgactgcccgattttgacgctaaaaccggtttgccggaaaataagcagcgtgagattcgcgtcaaaaatcggtggtttatcgcgccagatgtgattaacattttcccaaagtcgattgccgcgattgcggtacgtgaggggtgggctgagattggcagcacaatccaccacgcgcggctgtatcggctggcgccaaaaaagccaggcggcaagccagagtacggcatggtgcgggtgtttatgcaggacctgctgcgtcacagcagcgatgacctgttcacggtgccgctaccgccggaatcaatcagtttgcggacagcacaggcgaaggtgcgtgagcaggttttggctggcacagcagagtatctcacctggattgtatcgggcaccgagctggctttcgacagcagcgcttttgagtcgggtagtggtgccttaaaagacttcttaaccattttgcccgagacgaatacttggacaattactggcttttacgataccgcccgcatcacaatcaaacctcgacaattgtcagcggaaggactcgagaatcaaaacaacgctttactcgcaaataatcaagcagtgtgccgcattctaggagtgaagggactgcaaatatcattgaatgtattgctgcagcaaaccgtggaggttatacaccgcaatgctctcggtgaaaaacgctacggtgatgctgcctcaaattcgctgccaacaacggtgcaattgaaagcatgagttatgtctctgaagtggcgggttgttgattgttccaccctggatggcagtattcgcactgcccgcggttcggtgaatatctgcaaagctgacggcagcgtcactaatttgccactggctgatgttgcggtgcttttgcttgggatgcaggtgactgtttctgcagcggctttgcatcgcttaatgcaacaggacatctcggttttaatctgtgattggaaaggagtgcctgaaggaggcatttattcgtggagtgaacacggtcgagtaggtgcaagggctcgcgcacaagcgactttaacagtgccccgggctaagaacgcctgggggagaatcgttaaggctaaaattttgggtcaggctgctgtgttgcaggtaaatggtagtcgtgagcataaactgctcacagagcttgctggtgctgtgaggtcaggcgacccagcgaatttagaagcgcaggctgcacgtatttactgggatgcgatttccggtcccgggtattttaagcgcactcctaggttgaatcttgatgacactaatgcttgcttaaactatgcttacacggtgctgcgtggttttggaatccaggcggtattagccgcgggtttaactccggcacttggggttttccaccgcaaccgagcgaacaattttgcactggttgacgatctcattgaaccgtttcgtcccgctgtcgacgctggtgtttttgcgttatccgataaagacatcgctaaacctaaggtacgtgcagaattggttgccatcgcgcagcgaaaatttgctgctgatggtttaaccgtcccatctgtttttcgtgattttgcacagcattatgcactgtatgtcgagaagcagattgattttattaaccctccggtttggagaagagaatatgccgagtgatccgatgtgggcagttgtgatgtttgatttaccgacgcaaaccaaaactcagcgtcggaactatactaagttcagaaacctgattctcgatttggggttctgccagatgcagtattcggtttaccagaagtactgcatctccgggcctttgccagatagcacggtgaaagaaattaaggcaggggtgccaccgcagggacatgtcagaatcatgcatgtcactgataggcaatgggcagcaaccatctgtttttccaacgcaacagaggaaactcccgaagaaacacccactcagctagcttttttctaacgtatttgggtgcaaaaaatgaccctaatcgggcatttttctcagaaactaaagtctatctgaagtctctgagtctcaatctcagctcaactccgcacttttagcgaatccgataaagtctatctgaagtctctgagtctcaatctcagcagtgttagctaaggcgttgccaataaacaaagtctatctgaagtctctgagtctcaatctcagcctacaccgccgcggaatgtcgcgcgtttaaagtctatctgaagtctctgagtctcaatctcagcaacgaatccggtgggcgtcgatttgtggaaagtctatctgaagtctctgagtctcaatctcagccttaatgttttgtcgtcgccgccgacgcaaagtctatctgaagtctctgagtctcaatctcagccgctgtcaccacgccgctaatcgccgcaaaagtctatctgaagtctctgagtctcaatctcagctgcagcaagacggagtgtgcgccgaggtaaagtctatctgaagtctctgagtctcaatctcagccgtgccgcggcagggctgccgctgctgcaaagtctatctgaagtctctgagtctcaatctcagcagatgactgtatgtgtttaatgtttgtgaaagtctatctgaagtctctgagtctcaatctcagcaaccccatgtttaaacgcgattttagtaaaagtctatctgaagtctctgagtctcaatctcagcgtaggctggcagggttgccacaagggttaaagtctatctgaagtctctgagtctcaatctcagcgctgcgtgatactacccgtgacggtaaaaaagtctatctgaagtctctgagtctcaatctcagcggtgttgatgttgcgtagttgtgctggtaaagtctatctgaagtctctgagtctcaatctcagccacacgctggcaaccccgttgcagtataaaagtctatctgaagtctctgagtctcaatctcagcccgtgtggctgcggcggctggcggcaagaaagtctatctgaagtctctgagtctcaatctcagccaaccgaatacaccgagtttttctatgaaaagtctatctgaagtctctgagtctcaatctcagctatctcagtatcggacctgacagaaacaaaagtctatctgaagtctctgagtctcaatctcagcatcgctgttgggtggttttgctccgctgaaagtctatctgaagtctctgagtctcaatctcagcgactgggcagccgattggcatgtgggggaaagtctatctgaagtctctgagtctcaatctcagcggttttcctcggggttcgcagcgcgcagaaagtctatctgaagtctctgagtctcaatctcagcccgaacgtggcacaggcgattcagtccaaaagtctatctgaagtctctgagtctcaatctcagcgcggattcttatgcagtctgattatttgaaagtctatctgaagtctctgagtctcaatctcagcgcttgggctgccgtgctcacgaagcacgaaagtctatctgaagtctctgagtctcaatctcagcttatgtagatcgcgtggcgcagagttttaaagtctatctgaagtctctgagtctcaatctcagcctatcggcgccgccgcacgcatcacttaaaagtctatctgaagtctctgagtctcaatctcagcaaactaggctggctgcctctaagctcgcaaagtctatctgaagtctctgagtctcaatctcagcaaaaatatcgagaatggacacctccaccaaagtctatctgaagtctctgagtctcaatctcagctcttccagctgcatagcgtgaccgagtgaaagcttatctaaagtttctgagtctcaatctcagccttttcttatacccaaaaggagagccgcaaagtctatctgaagtctctgagtctcaatctcagctggtttatcgccgtggccagattattcgaaagtctatctgaagtctctgagtctcaatctcagctcagcttagcggccagcccggcaacaacaaagtctatctgaagtctctgagtctcaatctcagcccgtgtcaagcgtggtctgtcgctggtaaaagcttatctaaagtttctgagtctcaatctcagctgccgagcgcgacactcttagatgttgcaaagcttatctaaagtttctgagtttctatcccgatagactcttaatctgtgggttcggagttcaagcatgttcgcagtttctgctcttccataccgcggcctcgtaaagagaaggtcgcgggtttagagctctaatacacggcaatttaaccgagtggatacaacttgacagcatcaccagcacaccgcgcgctcaaatcggcatggtacaaacgtaaaacctccgctacaaaactcagcgtgcggagacagctagcaagcagggctcggcacaccaccaagcaatcaacacaaaacccttgaacttccgcagaaattcaagggttttagctattcaatttgtacgcccccgggggatcgaaccccgaacccacagattaagagtctgttgctctgccaattgagctagaggcgcatgttgtttttagcaacagattaaatactaaagaagttttgctgcaatgtcaaattccgcgaaaaacactgtgtgtcacgccttttgagccaccaaatcgaactttccgcaggctgctaaacatccacaccacactttcgcgtcaagcatatacttaaaatatgtcttccaccgcaaaaaccctctccgctacccccgcagatctcgacttcgcgctcgaacttgcaaccatcgccaataagatttcactgccgcgctttaaagcagcagacctcaaggtcacaaccaaacctgaccgcacctacgtcaccgatgctgacaaagccgttgagggagcggtccgcgcacacatcgaaaagcatcgccccgcagatgtcttcttcggcgaagaaacagggggagatgccgcagccacaacagccggggtgcggcggtggatcctcgatccaatcgacggcaccgccaacttcttgcgtggtgtgccgaactgggctacccttatcgcgcttgaaatcgacggggaagcacagcttggggtgtgcgcaatgcctgcgcttgacaccacctggtgggcattagcggggcacggcgcttacaaacaggtcggcgccactcaaccacagcggatccacgtctccgccgtcagcgagcttgccgacgcgtcgctcagcttccaaagcatccagcagtgggaagaggccggcaaacttgacagcctgctgaacctgcggcggcaggtgtggcgcgaccgcgcgtacggcgacgcgtggtcgtatatggcactggcagaaggtttgcttgatctggtgggggagtttgacattaagtcatacgatgttgctgcaattatcccaatcgttaacgaagctggcggcaagttcagcgacctagccggtaacccaagcgcttggtctggcagcagcatggcaagcaacgggctactgcacgagcaattcttagcagcggtgaggggagtagcctaaccgtgaaacagcagatcttaaaggagcaagacatgccgcaaccacacaccgctaaaaccgcaacctcaaccgtcgcggttgccgccgtaatcgatttcgcactgctaattattttcgcgttcaccggacgcaacagccacgggctgcccctcagcatcacaggcgtttttgaaaccgcactaccatttctactagcggctgccgtggggtggatcatcacagccatgtggcgcgccccgcagagccttgtgaaagggctactgctatggctcatcactgttggcggcggacagctgctgcgtatgctgctgcaaggcaccgaattttcgctgccgttcttcctcgtctcactgggtgttgtcggcatctttttagtggggtggcgggcaattgctgcggccatccgcactctcaataaagcaccgcgcagcgcataacagcagcaccagcaaaagcaagcagccggccagcaaacactgaccgactgctgcgctatcgccatactaacgagccaagacgcacgagccgcaaagctcacaaagtaccaagctcaagcgactacttttggtggaccaccatcaccgggcagggcagagcctgcagcaccccgtggctaacagaacccagcagcagtcgcgcaatattgccacgcccgcggttacctacaaccaacagctgggcatctttagcgctctcaatcagcgcctgcaccggcggctgctgcacaatctcctgcgtgatctgcaaatcagggtagtcggccgccagcccggcggtaccaaccgccaaagcctcttttgcctcgtcctcctgctgctgcacaaactcagagctccacagatgctgcaaccccggggcggtaggtggcatccacgcgtaaaccgtgtgcaaaatagcaccactgccggcagcaacccgcgctgcggtcgcaaccgcgttacgggcagccttcgaaccgtcaacaccaacaaccacgcgagcaggatccgccaccgtaaactctggcggcacaatcaccactgggcactgcgaaaccgcggcaattttcacaccgcgggtaccgaaaacagcccccgcgaaacggtgcccgtgatgcccaccaagcaccagcagcgcagcggtgtgtgacaccttctctagctcatcgatcggatgcccgacaatcgccagcgcagtgatggttgcggcagtgtcctgctctttcgcgtaagcaagttcttcacgcaaaagtgcctcagacgcttccagcgcggcagccttaaaatctggtgtcacaaccagcatgctgtcgtccgtcacattaaccagctgcacctcagccttgttattctgcgcccaagccaaagcccagcgcaatgcagcacgaccctcagcggtgccgtcaacaccaactacaatcttttgagacattttatcctcctataagcagacggctgagacatggaagctccacatctcagccgcccattagcatcaattatttagctggcaaacgctcaggcttaatgcccgccatctccgcgatgacgcgcacaacctggcggctgtagccgtactcgttgtcgtaccaaacgtaaaccactgcggttttgccagttgccttagtcgcaagaccgtcaaccacgcccgcacggctggcacccacgaagtcactagacacaatctccggagattctacgtagtcaatctgcgcctgcagctcaccggtcagtgagacgttgcgcagcaggtcgttgagctcctcgacagtggtttctttctccagttgcaggttaagaatcgcgagcgaaacattcggggtcggaacacgaatcgcgttgccggtgagcttcccggcgaactctggcagcgccttcgcaaccgcgctagctgcgccggtctcggtgataaccatgttcagcgctgcgccgcggccgcgacgatcgcccttgtggaagttgtcgatgaggttctggtcattggtgtaactgtgcacggtttcaacgtggccgtgagcaaccccaaattcgtcattcagcaccttcagcaccggagtaatcgcattggttgtgcaagaagcagcagacacaatcttgtcgtcagcggtgatggtggcgtggttgatgccgtaaaccacattcttcagcgcgcccttacccggagcggtcagtagcacacgcgctacaccctttgactgcaggtgctgtgacagccctgcctcgtcgcgccagcgaccggtattgtcaaccacaatcgcgttgtcaatgccgtaagcggtgtaatcgacagtcgcaggatcattagagtagataacctgaattcgcacaccgtttgcgataattacgttattgtcgcggtcaagctcgatgctgccgttgaacggaccgtgcacagagtcacgacgcagcagatttgcgcgcttctcaagatcgtttgcggcaccctgacgcaccacaatagcgcgcaggttcagaccgttaccgctgccggtgtggtcaatcagaatacgggacaacagccggccgatacggccgaagccgtacagcaccacatcggtgccggcaggcgcggcagctgacagccccgccagctcgccctgcaggaacgcctccagctcgccgccggcagcggcaaacttgttttgcagctgggccacgtcaatagctgctgcagcaggctgtagcttggcgagggtgttgataatttcgctggttgccgcgagtgacagctcctgctcgtcaatgtgccgagagtgcttgtgtgcgcggatgatatcgatcgggctcttaccaaccagggtgcgaccgtgtactgacaacactacgtcgttgtcgcggtgcagccggccaatcaccggcaccagctcttcagccagcgctactttctgattccaggttgtcaggtggtcttgtgtattgctcattttgtgagttttcctcgcttcagtgagtggagacggcctgcccgccgagatgtcacttataagtattccacggattaccgaaatttccactgagaaaagccgataataggctaggctcataaacatgaccacggtgcaagacgtaattaacagctgccgcagcctgtggccggagcacactgccgagcagtgggatcgggtcgggctcagcgtcggcgagccacacgccccggtgcgtaaagtcgccctcgcactcgatgccagcctggcaaactgcgccgcagcgcaacaactcggcgcacaaatgttgttgacacaccatccgctgctgttgcaggctgtgcacagtgttgccgcaaccgattacaaaggtcgcgtaatcaccgaactgattcgctctgggatggccctttacagcgcccacaccaacgccgatattgtgcctgacggggtcagtgacatcatcgctactagactcggcttgcaggagctgcagccgctcgttccagcggagcatgacagcagccacggcatcggacggcggggcagactggctgatccactatcattacaagaatttgtggatcgcgccgccgcaatttttccagacacggtgagcgggttgcgggtagcgggtgatccacagcaaaaagtagagcacatcgcgctgtgcgggggagctggtgacagtctgctctcgaacgagctggtgctgcagtctgatgtgtatttaacgagcgatttgcggcaccatccagcgcaggagtttcgtgaaaacaatccggacatcgccctcgtggatgtcgcacactgggccgcagagtcactgtggctggaagttgcggcgcaacaactcagtgcggcgctgccgggggtagaatttgtagtctgcgatattaaaagtgatccgtggattttttccgcgcacaaacaaggagcgtcaaaatgagggcaagcgcagcacagcaacagttacttctgccgttggcggcggtggatcaccgcatcgcccacctgcagcgggtcgcgcacgagctgcaacaaccgcaacccgaggtcgcggccctcaggcgcaccgcccaaccactgcgccaagcacagctgctggcgcagcgtgagcttgaagcacagcagcgcgaaatgtcgcgtctgaccgacgatttagacaccgttgccaagcgcactaagcacgatgaaaatctgctagcgcaggcaaccgactcgaaactggcccaacaggtaaccagcgagctgcaacagctggccatgcgccgcgacaagctagaaacccaacagcttgtagtaatggaaactattgaggaagcagagaaaaaactgcaggcagcggcggcagagctgcaagaaattactgcgaaagagcaggagctgctggccgaaatcgctgcccgtctgcagcagaccgagcaggacttggcacagctaactaaagaacgcaagctcctggcggcaccaatcattggcgagctactcgcggagtatgacgcggttcgcagccgcggtggtatcggggcagcggagctcaccaataacgtgtctggggccagcggcatgcacctgacaccgggggagattgcggttgtgaagtcgctcgacagcgatgagctgtattactgctcgctgaccggcgcgattctggtgcgtgccgaggcaagctagcctctatcacagctccatgcgtgcacccgcagcgcggcagcatagcgtcccgcaagtagcccagcgagcgtgccgcagcgcaacgcagcagtttttagctagacttgatttggaatgggtcgacaagacggtcgcgtcgcggaaaaccgcgccgaggaacgtccgggctccacaggggagaacggtgggtaacgcccacccggggtaacccgcgagcaagtgcaacagaaagtaaaccgccaggcaactggtaagggtgaaagggtggtgtaagagaccaccagcgtttatggtgacataagcggctaggtaaacctcgttaggagcaagaccatgcagcagacaacgacgcgccccgctgagtctgcgggtaggttgctagagcacgcaggtaactgcgcgccgagatagatggccgtcacgatgcaaatcgcacagaacccggcgtatcagtcggcccattccactatcagtgcgacgcgtagattgctagaattagataaagcaaactctgcggaaaggttcaataatgagcactgaaaacatcatcgaagatgcagaacaatactggtacaacaccaaaactcgtaaagtcgagcatgggcggctctcgcctgcagtagatcgtgttgggccgtttgcga

SEQ ID NO: 2606 - DNA, 22199 bp, synthetic construct
  misc_feature 1..22199: note = Synthetic
  source 1..22199: mol_type = other DNA
gctcgctgatacgctttaaccggtagcgcacggtgttagtgtgcacatataaatcacgcgaggtttgttccaatgagctgccgttcaacaaatagctgcgcagagtcgccagcagttcaccattcgctcggtgcagtggcaggtagatcgtttccaacagggtttcacgcgccagctcatcgccagagattgctcgctccggcagcagcgcgtcagcagctgcagggtagctcacatcgcgcaccgcagcagctactgccagtgccgcaagtgctgcttttgcggagtactgtgcgtgcacaatcgaagaaacagttgggccaagaatcaatggatcagcggtaaagtggtgtttaacccgctgcgtgagcgcattaaaaacctcgctagctgcagcaaggctctgttgctgcagctgcccgaaaaccaaaagcaatctgttgccctgcaccccaaccagcacatcacaaccgtatttacgagtggctcggcgcagctgctccagatttgcttgtggtgcaatggtgcccgctagcactgccaccgcaccgtttcctttccagcccagcgcagcgctacgactacgcacatctccaactgcggtgccggtgatgattgaatctacgattagcgcttccaggcgggtatcccacaggccgcgaatctccgccaccttagcgtaaaccttggcagctgcgaaagccagttcgcgagagaactgcagtgtagcttctttgagttcggggctacgctccgcaacagcttcctctacggttgccaccaccacctgagtgagctgtagggtttgaaacaagctcagcgcctgtgacagttcgcgtggtgcggaggcaaaaatttcagcgattagcgattgccggccagccgggtcctcacaccaattaacgtaggcctgcaggcctcggcgcaccacatcaccaatgatttggtggcgtttttccggcatattcgccagccacggaaactccgcgtcacaacgctgtagtgacagtgcggtgacctcatgcatgacggttttaagccatttcagatctgccgcaactgtttcatttatttgattagttgtcacagtttttcctgtgttcatttttctttgagggggattatttagggggatatggttacagggcggactcagcccgccctgtaacctgtattttactaggaatcaccgccagcgccgccagttgaaccggcagcaatatcgtcgaggcggtacttctgataggcagtgcgaggaatatcgtagctaatttgccccgcggctgccagccgctccagcaccttcacaaccacatactcgcggtcaataccgaagtagcgccgggccgctgcccgggtatcactgaagccgaaaccgtcagcaccaagcaccgagtagtcgcccggaacgtacttccgaatttgctccggcacaccggtctcgaaatcgctaaccgcaacgaatggccccgtggcatccgccagcttttcagtgacgtatgcctggcggttttgctcaccgatattcttaaaggcagcggcatctgcagcgaggccatcacggtacagctctgaccagctggtaacactccacacatcggcgctcacaccccagtcttcgtgcaacagctgggcggcctctcgtgcccatggcacggcaacaccggaagctagaatctgtgcttttagctccgcatctgggccaacctcaacacggtgaatacccttcacaatgccttcaacatcaacatcggccggctctgctggatgcacaatcggttcgttgtagacagtgaggtagtagaacacgttcgggtcgggatgcttgccaccgtacatccgctccataccggcgcggataatatgtccaatctcgtacccgtatgctgggtcatagctgatagctgcagggttggttgacgccagcagcggagagtggccatcggcgtgctgcagcccctcaccggtgagcgtggtacgcccagctgttgcgccaattacgaaaccacgcaccatttggtcgcccgccgcccagaaagcgtcgcccgtacgctggaacccgaacattgagtagaagatgtaaaccggaatcatcggctcgccgtgagttgagtatgaggtgccaaccgcggtgaacgccgctgcagcgcccgcctcgttaatacccacgtgcaaaatcgcgccctctgagctctccttgtaggcgagcaataggttgcggtcaaccgaggtgtaggtttgcccgtttgggttgtagatcttggatgtagggaagtagctgtccatcccgaaggtgcgtgcctcgtcaggaataatcggcacgatccgcttaccgtaattcggatcgcgcatcaggtctttcagcagtcgcacaaacaccatagtggttgcagcctgctggttaccggagcctttcttcgcgatgtcgtagcgtttagcctcgggcagcgcgagatccacatattttgcactgcggctcgggaggtagccgccgagttcacgacgccgctctttgatgtactggattacatcgctgtcttctgctgggcggtagtaaggtgcctcgtatggatttgcctccagctcagcgtcagaaaccggaatatccatggtgtcgcggaagagtttgaggtcttcaagcgacattttcttcatctggtgggttgcgttacgggcctcaaagtgcggccccaggccgtaacccttaatggtgtgcgccaggataaccgttgggcggcctttatgctcggttgcggccttgaacgctgcgtaaactttgcggtagtcgtgaccgccacgctgcagcccccaaatctggtcgtcgctgtaattttcaacgagttgcagagcgcgtggatcgcgaccgaagaagttctgccgcacatatgcaccgttttctgccttgtaggtctggaagtcaccgtctggggtaacgttcatcagcttcagcagagcaccgtctttgtcacgtgccagcaggtcatcccactgccggccccagataactttgatgacgttccaaccggcaccgcggaagaagctctccagctcctggatgattttgccgttaccgcgcaccggaccgtctagccgctgcaggttgcagttgattacgaaggtgaggttatcaagcccctcgtttgcggcaacctgcaactgtccgcggctctctacctcgtcaagctcaccgtcgccgaggaaggcccacacgtgctgatcagagcagtctttaatgccgcggttggttagatacttgttgaactgtgcctgatagatggcgttgattgggccgagacccatcgatacagtcgggaactgccagaagtctggcatcaatcgcgggtgcgggtagcttggcaaaccgccgcccggatgtgacacctcctgccggaaaccatcaagatcagccgcgctgagacgaccctccaggaaagcgcgagcgtagatacctggggaggcgtggccctgcacgaaaatctgatcaccgccgccgggatgctcttgcccgcggaagaagtggttaaacccaacttcataaagcgcagcagccgaagcatacgtggagatatggccgccgacctcaataccgggacgctgcgctcgatgtaccagcatcgccgcattccagcgaatatatttgcggtatttgcgctctagcgcttcgtctcctggaaactctggttcattctgtgacgcgatagtgttcacgtagtccgtggttgggatctgtggcacgttcaggtgcagctcgcgagagcgtgccaaaagactgctcataacttcccgagcacggccaggaccgcgctgcgctaccaggtcgtcaagcgattcacgccagtcttgggtttcttccggatctgagtcgggacggtcaggtgcatatggatcttcagtgttaactgccatcttcatcctctgctgatacgcgcaatgcgctacggacactctgcttttgcagacacgttactatcctactaggtgacaggcggagggggtgcgagttttgcacaatacctctaaaatatcctcagcatgcattttttacacaagaccatggttaaaatccgcgggcgcgttacagcggcacgctcggcggctggatccaccgccccagatttctcactcccggacatcaaaggagagctttatcacctgcggacagctacagcgcaacagccgcagtttctcgttttcatcccgaacgcattcactccggtgtgcgatgcggaggtgacagagctgctgcaactcgcaccgagcttggaggcgcagctggtgattattacctgcgacagtaagcatactttacgatcatggctgcaaacccagcaggatattcccgccaatgttgtggtggtcagtgacttctggccgcacggtaaaatttcgcgccgctacggtgcatttaacgcgcagaccggaagcagcctgcgcaaaactttgcttgtcgatcagcgggggcggatcagcgccgtctttagcgccatcccggggcagcaacgggataccgcgagctacgaaaacaccctcgcagccttgcgacacgccgaggccggggagccatttgcgagggcttaaaaaatgttgttatagttattgagttgtcaccgacaacaacagaaaagtcgcaagacaagcgcctgtagctcagttggttagagcacttggtttacacccagggggtcgggagttcgagtctctccgggcgcacagataaaacccgccgcaagcgggttttttgctattcccgggcatctgccgttagcagcggtgccgcccgctgcgctgacagccgccaggctgtccgcctgccttaatccatccgacacgaaatagcttcaggcagggcacgccggcatgcgatgcacggcgcaaggccccgtgtgtgacacaacgcgagtgcggcacgactatcaaaatagccgcgccgcactcggtcgcttgatgggtgtcagcgctgctggtcgctgctgtctagttcagcccacggcggcgcagcaccgctgccggctccggatcacgtccgagcacggcccgcacagaatccatctctggacgagaagaaccccgcccaagcaactcacggcgtaccttttcaccggcggcgcggttcagaccaccgtcaccgttctcggcgcccacagtgcggaaccagtgttcgatctctgcagccacaacctctgcccacacgtatgagtagtagccagcgtcgtagccgccgccgaaagtgtgggtgaagtaagcagagcgataccgcggaggaatcaagtcgtaatccatcccaacctggcgcagcgcatgcgcttcaaactcggcaacgtcgtctggcacctcagtcggagttagtcgatgccacagctgatccaccaaagccgctgacagctgctcagtggtagcgaaagcctgcccgaaggttgccgcatcaaccagctgctgtacggtctcggcaggcagtttttcaccggtctcatagtgcactgcgtagttagcaacaacttctggatgatacgcccacatctcgttaaactggctcggcgcctccacaaagtcgcgcgccacgttagtgccacaggtccagcggtactgggagtccgcgaacatcccgtgcagcgcatgcccgaactcatggaacagggtgatgacatgatcccaggtcagcaggcacggctcacccgactgcggctctggatagttgcagttgttcatgatcaccggcaggttaccgtcgcgcttggcgccctccacaatcgcgtgcatccaggctccgcctgattttcctttgcggcggaagaagtcagcctggaacagcgcaatcggggtgccgtcagcttcctgaacctcccaggttttgacgctcggcagatatcccttcagctccgggagcggcacgaaacgaatcccgtacagtttttcagcagcaaagaacaagccgcgctcaaccacgctgttcaactcaaagtaaggcgctaattcactctcatcaatacccagctcggcgcggagcttagcctcgtaaaacagccagtcagcggctcgcaactcacgcaaaccgtcagccgcagccagctgcttaaagcgctccgcctcctgtttcgcggctgctaaagccgagctgctgacgctgcgcagtagctccataatggcgtcagaatcctgcgccatcccggcggcagcaaccgcctgggcgtgatatgggtagcccagcagagcagcccgctcagcacgcagcttcgcgatccgcaaaatcagctccctggtgtcgctgctctcgtgctcaccaagaccgcgcgacagtgatgccgccaaaaccttttcgcgagacgcctgcagcttgagctccgcttgcaccggttgattggtgtagttatcaagcggcagcttccaggtgccgtcagcctgttcgtaagccgcaagttgctcagcactcaatccctcaagctcagcagcgtcggtgaaaaccacctcgttgtcgctcatcgccagagttgcgcgctgcgagaaggcaatttctgcctcgctgatagccgcgtcgagctcccgcagtttagccttatcagcggcatcaagcttgatgccgccctgctcaaatttcagcagctctgttttaatatagtgtgcggtttcagcgtctgcgtcgcttaaatcaatcgcagcaagtcgattgtagagccgctcgtcgagccggtaagtgttgtcgtgggcgctcagcagcgggccgatttcagcctctgcagcctccagctcggggccgccgatggaagaaaacagggtgaaagcgatgttcagaatctcgctcagctggcggccagcatcgtgcaactcgtacactgtgttggcgacggttggcgctgcctcctgggtggcgatgcgctcccaagcggcttcggttgcggcaatcgcagttttaacagccggaacgatgtgctccggtttaatctgctcccacacaggcagttgataggggagggtggatcgcgtcagcagtggattatttacgttttcagtcatgcgcacaattttactcttttgcgcaaccgcaaattttcaccattgtatccggtggtttttggttatagactgatggtgttcaaagatgatccgtttcataaggagcgtaaagtggcgaaacaaaaactaaccctcagtaacgctactgacaccggccatattcacgtcggcaaaggccttaacagcgctgcgctcggcgttgtcggctctacagtcatcggtctggcatcaaccgcaccgttgtactctctggctgcaacgctcggctacgtgattctggcggttggcgcgcaggctccggtggtgtttattgtggcttgcatccccatggtttttgcggctctcgcgtatcaagagctcaaccgggaaatgcccgactgcggcaccgctttcgtgtggggcgcgaaagcttttgggccaattattgggtggatcggcggctgggccgtggcggtgtctgccgtaatggtgctggcgaacgtgggagaaatttccggacagtacttctggctgctacttggtaatgaagagtttgccagcaaccgcacaatcgtggtcacaaccgcggtggtgtttattgcgttgatgacgtttatctccaccgtcggggtgcaaatcggcgaaaaaatgcagatgattctgatggttgtgcagattggcgccatggtggcttttgcgattgcggctgtggtgcacgcggtgagcggatccaaccctgattctgtcgcttttgactgggcttggtttgatatcacccagatcactgagtatggcggttttattgaggcggtgctgctggccctgttcatttactggggttgggacacctgtctggcactgaacgaagaaacgaagaatccgcgcaccgtgccgggccgcgccgcacttttgagcattgcggtgctgatcgtgctatacgtgggggtgactgtggcggcaatgatgtttgctggcatgggtgacagcggcaccgggttaacggtagaagaaaacctcgacgatgttttcagtgtgctctctggggcgttgttcggcccatggggctggttcttgattctggcggtgatggtgtctgctgcttcttccacacagaccacgattctgccaactgctcgcggcaccctgtcaatggcggtgtatcgggcattgccggcaaagtttgcgctcctgcacccgaagtttaagacgccgtggttctcgaccacggtgatgggcatcgcggcgattgcatactatgtggtgatgtcgattgtgtcgcaggatattcttgccgattcgctgctctcgatgggcttggcgattgccctgtactacaccatcgtgtgcttcgcttgcgtctggtactaccgtgacaccctgcgtgacagcgcccgcaacctatggatgcgcggcatcttcccgacgctgggtggcctgatgcttggttacgctttcgtgcagagcgcaatcgacatgattgatccggagtacggctacaccgtgttcttcggcattggaggtgtttttgtgatcggtatcggcgcgctggcgctggggctggtagtgatggggctgtgggctcttaacaaagacgctaaaccgtacttccgcggtgaaagcctgaaccgcgacaccccggtgctggtgcctgacgagggatagcactctgctgttgcattcgatgctgacaacaggatataattaaatcctcaatctcagtaaacgtctccgtgttagaggcgtcgaatggtccctccaatcggagataatttaaccgccacttgctattgcaggtggcggttttgtttccttataattctgctatgagcaaagcagcgcagttgcagtacaaagttggtattgatgttggcttgaattctgtgggtcttgcggcgattgaggttgccgacgatggcacaccgttaaaacttcttaacgcggttgtgtacactcacgattctggcgttgaccctgagcaggctaaaagtgccaccagcaggcttgctgttgctggagtggcgcgacgcgctcggcaccgggtgcggcgccgtaagaagcggttagcgcagcttgatgctttgctagagtcagcaggctatatgctggtggataaccacagcaataacgacccgtactggccgtggaaggtgcgccaacgcctggcaaccgagcaggttgataaagccgagctgctgctactgttacccgttgcgctgcggcacattgcgcggcatcgcggttggcgtaacccttattcctccactaaaacgctgcagcagccggcgccctacagccaattttatgaagcgatgcgggagcgggtaagcaaggtaacttttcatgagtttgatgacagtgcaactccagcacagattgtgtgtgaagctctagtaccgaagctggcacacaccatcggggtgattcctaaccctgataaaacggctgcaaaacaaaaagcttttatcaaccagtatcgcgtgcgcggtggtgacctacacggtaagctgcatcagcaggatctcgctaacgagattcatcagattgctaccatgcagcagttgccagctgcttttgtgttcgagcttatctcctgtgtctttgcgtctgagagcccgaaaggcaaagcggccgagcgggctgggaaagatcacttgccggggcaagaaaaactcaccagggcaccgaaagcgcatcctgcttttcagaaatttaagattgtcagcaccttagctaatctgcgggtcgccgagcagccgctgtcagccgctgagttgcaaaaagccacggattttctgctggcgcaaaccgggaaagatggtacaacttgggagttacttgccgatcacctcggtgtcagcgtcgcgagccttggtggtctggcatccgctggtgcagacgtggaacacaccggcaaaacaccgccgcgcgatatcactagcgtgcgcattttgaattccaaccacaaggcgttaaaacctggtgggcgaacgcagatgagctacaacgtgccgcgatggtgagccagcttgctaactcagaacagctgccgcaggaagctatcggtgctgaagcggtgactgagtttttggaggcatgtgatgatgacgagctgcaaaaactggagtcgattagtctcccggctggtcgcgccgcttactctgtagattcactagaaaaactaaccgcgcaaatgcttgcaacaggctgcgatctgttcaccgcgcggcagacactttttaatgttgagcgcgattggcggccgccagctgatccgattggtgagccggttggcaaccccgcggtagatcgggttttgaaaatagtaaaccgctggctgcttgctgcggagcgccgctggggcaccccggcaaccattaatattgagcacgtgcgcaccgcgttcgcgtcagaggcgaaaacccgggagtacctgaaggagttaaagcagcgggcagagctcaacgaaaagattgttgccgagatggaggcgcggattggtgtgcagccgggcggctcaagcagctctgtcacgcgctggctggctctcgcgcggcaacgcaattgctgcctttactgtggcacgtttattgatttcttcacggcagaaatggatcacatagtgccgcgcaaggggccggaatcaacaaacacccgcgttaatcttgctgccgcttgtaaagagtgcaacaaagataaatctaaccgaccttttgcggtctgggcagaagatactggccgccccaatgtcagctacgctgctgtagctgaacgggtccggaacctcacaccttacgacaactttgacggtcgtgagcttaaacgtttcaaacaggaagtgttgttgcggctcaaaaaacgcactccagacgaggccattgattctcgctctatagcctctgtcgcatggatggcacgcgagctggctgcacgtattaaatatcatttccgctctaagcaagagattaccgtcggcacatacgcagggtcgataactgcagatgcccgccgcgcgacaggctttgagggcaaggtggagctaatcggcggcaaagcaaaaacccggcttgatcgccgccatcacgcgatggatgccgcaattgtggcactgctacgcccgagtgtcgcacaaacactggcgatccgctctaatatgcggcaggcagagaatctcagtcagcgtcacactggcaattggaaacaatttgatggtgcggatcacgccgcccaaaaaatttatgccgtgtggcggcagcacatggaagtcttgctaggccttttcaacgaagcactgcaagcagataatgttccggtaacccagaatttgcgcttggggctgggcaacagcaaagcacacgatgacacggtgcgcccgttctgcccgaaaggcagcacgccgaaacgtttaggggatgcttggagcgttgaggagattgatcgcgcgagcactccgcaactgtggttggcgctgacccgactgcccgattttgatgctaaaaccggtttgccggaaaatctgcagcgtgagattcgcgtcaaaaatcggtggtttagcgcaccagatgtgattaacattttccctaagtcgattgccgcgattgcggtacgtgaggggtgggctgagattggcagcacaatccaccacgcacggctgtatcgactggcaccaaaaaagccaggcggtaaacccgagtatggtatggtgcgggtgtttatgcaggacctgctgcgtcacagcagcgaagacctgtttacagtgccgctgccgccggaatcaatcagtttgcggacagcccaggcgaaggtgcgtgagcaggttttggctggcacagcagagtatctcacctggattgtatcgggcaccgagctggctttcgacagcagcgcttttgagtcgggtagtggtgccttaaaagacttcttaaccattttgcccgagacgaatacttggacaattactggcttttacgataccgcccgcatcacaatcaaacctcgacaattgtcagcggaaggactcgagaatcaaaacaacgctttactcgcaaataatcaagcagtgtgccgcattctaggagtgaagggactgcaaatatcattgaatgtattgctgcagcaaaccgtggaggttatacaccgcaatgctctcggtgaaaaacgctacggtgatgctgcctcaaattcgctgccaacaacggtgcaattgaaagcatgagttatgtctctgaagtggcgggttgttgattgttccaccctgaatggcagtattcgcactgcccgcggttcggtgaatatctgcaaagctgacggcagcgtcactaatttgccactggctgatgttgcggtgcttttgcttgggatgcaggtgactgtttctgcagcggctttgcatcgcttaatgcaacaggacatctcggttttaatctgtgattggaaaggagtgcctgaaggaggcatttattcgtggagtgaacacggtcgagtaggtgcaagggctcgcgcacaagcgactttaacagtgccccgggctaagaacgcctgggggagaatcgttaaggctaaaattttgggtcaggctgctgtgttgcaggtaaatggtagtcgtgagcataaactgctcacagagcttgctggtgctgtgaggtcaggcgacccagcgaatttagaagcgcaggctgcacgtatttactgggatgcgatttccggtcccgggtattttaagcgcactcctaggttgaatcttgatgacactaatgcttgcttaaactatgcttacacggtgctgcgtggttttggaatccaggcggtattagccgcgggtttaactccggcacttggggttttccaccgcaaccgagcgaacaattttgcactggttgacgatctcattgaaccgtttcgtcccgctgtcgacgctggtgtttttgcgttatccgataaagacatcgctaaacctaaggtacgtgcagaattggttgccatcgcgcagcgaaaatttgctgctgatggtttaaccgtcccatctgtttttcgtgattttgcacagcattatgcactgtatgtcgagaagcagattgattttattaaccctccggtttggagaagagaatatgccgagtgatccgatgtgggcagttgtgatgtttgatttaccgacgcaaaccaaaactcagcgtcggaactatactaagttcagaaacctgattctcgatttggggttctgccagatgcagtattcggtttaccagaagtactgcatctccgggcctttgccagatagcacggtgaaagaaattaaggcaggggtgccaccgcagggacatgtcagaatcatgcatgtcactgataggcaatgggcagcaaccatctgtttttccaacgcaacagaggaaactcccgaagaaacacccactcagctagcttttttctaacgtatttgggtgcaaaaaatgaccctaatcgggcatttttctcagaaacaaaagcttatctaaagtttctgagtctcaatctcagcgagcgccgtgagaagctaggtgccgattaaagcttatctaaagtttctgagtctcaatctcagcgggtccgccaactattccgattctgaacaaagcttatctaaagtttctgagtctcaatctcagctacatcgtaatggtttgcgacaaacagtaaagcttatctaaagtttctgagtctcaatctcagccacacgctcgcaaccccgttacagtacaaaagcttatctaaagtttctgagtctcaatctcagctcgtcaaggcaaatatctgaccgtagataaagcttatctaaagtttctgagtctcaatctcagcagtggcagattaacgagatggcgatgcaaaagcttatctaaagtttctgagtctcaatctcagcggatcagtagtttgtctactcttgtgccaaagcttatctaaagtttctgagtctcaatctcagcgcgattgatcagttaacgattaatgcgcaaagcttatctaaagtttctgagtctcaatctcagcccgcctggaccggggtacagaagaccgtaaagcttatctaaagtttctgagtctcaatctcagccaaccactcctggacctgagcgccggtaaaagcttatctaaagtttctgagtctcaatctcagcgcacgaattgcggttgcatagccggcgcaaagcttatctaaagtttctgagtctcaatctcagccggtagcggtacaagcagtcattgactgaaagcttatctaaagtttctgagtctcaatctcagcgacatgagtctgtgtgtcccagggctgcaaagcttatctaaagtttctgagtctcaatctcagcgcccgcatcgccgtgtttaaagcaagctaaagcttatctaaagtttctgagtctcaatctcagctatcgcctacttcaccgcgcagaccggtaaagcttatctaaagtttctgagtctcaatctcagcgctcacaagactggagcaacagcactagaaagcttatctaaagtttctgagtctcaatctcagctacatgtaaacggtgccggggtattccaaaagcttatctaaagtttctgagtctcaatctcagcaggaggcagctgcgaagctgccgctggtaaagcttatctaaagtttctgagtctcaatctcagcacagtgcgtgggtgaacctactaaaggcaaagcttatctaaagtttctgagtctcaatctcagctctgttgttgctttttcgcttgttttttaaagcttatctaaagtttctgagtctcaatctcagcgttgcggtctttgcagtcggagaagcctaaagcttatctaaagtttctgagtctcaatctcagcattgtgccgggggtaaagcaatgaccagaaagcttatctaaagtttctgagtctcaatctcagccgctgaaaaccgctgccgttaatgctttaaagcttatctaaagtttctgagtctcaatctcagccgccagagtttgcgattggtgcgttctaaaagcttatctaaagtttctgagtctcaatctcagcgttagagaaggcgcataatcaaaggattaaagcttatctaaagtttctgagtctcaatctcagctgctgcgtgacgggctggaaggctggttaaagcttatctaaagttcctgagtctctatcccgatagactcttaatctgtaggttcggagttcaagcatgttcgcagtttctgctcttccataccgcgacctcgtaaagagaaggtcgcgggtttagagctctaatacacggcaatttagccgagtggatacaacttgacagcatcaccagcactaccgcgcgctcaaatcggcatggtacaaacgtaaaacctccgctacaaaactcagcgtgcggagacaggtagcaagcagggctcggcacagcaccaagcaatcaacacaaaacccttgaacttccgcagaaattcaagggttttagctattcaatttgtacgcccccgggggatcgaaccccgaacccacagattaagagtctgttgctctgccaattgagctagaggcgcatgttgtttttaacaacagattaaatactaaagaagttttgctgcaatgtcaaattccgcgaaaaacactgtgtgtcacgccttttgagtcaccaaatcgaactttccgcaggctgctaaacatccacaccacaccttcgcgacaagcatatacttaaaatatgtcttccaccgcaaaaaccctctccgcgacccccgcagatctcgacttcgcgctcgaacttgcaaccatcgccaataagatttcactgccgcgctttaaagcagcagacctcaaggtcacaaccaaacctgaccgcacctacgtcaccgatgctgacaaagccgttgaggcggcgatccgcgcacacatcgaaaagcatcgccccgcagatgtcttcttcggcgaagaaacagggggagatgccgcagccacgacagccggggtgcggcggtggatcctcgatccaatcgacggcaccgccaacttcttgcgtggtgtgccgaactgggctacccttatcgcgcttgaaatcgacggggaagcacagcttggggtgtgtgcaatgcctgcgcttgacaccacctggtgggcattagcggggcacggcgcttacaaacaggtcggcatcactcaaccacagcggatccacgtctccgccgtcagcgagcttgccgacgcgtcgctcagcttccaaagcatccagcagtgggaagaggccggcaaacttgacagcctgctaagcctgcggcggcaggtgtggcgtgaccgcgcgtacggcgacgcgtggtcatatatggcactggcagaaggtttgcttgatctggtgggggagtttgacatcaagtcatacgatgttgctgcaattatcccaatcgttaacgaagctggcggcaagttcagtgacctagacggtaacccaagcgcttggtctggcagcagcatggcgagcaacgggctactgcacgagcaattcttagcagcggtgaggggagtagcctaaccgtgaaacagcagatcttaaaggagcaagacatgccgcaaccacacaccgctaaaaccgcaacctcaaccgtcgcggttgccgccgtaatcgatttcgcactgctaattattttcgcgttcaccggccgcaacagccacgggctgcccctcagcatcacaggcgtttttgaaaccgcactaccgtttctactagcggctgccgtggggtggatcatcacagccatgtggcgcgccccgcagagcctagtgaaagggctactgctgtggctcatcactgttggcggcggacagctgctgcgtatgctgctgcaaggcaccgaattttcactgcccttcttcctcgtctcactgggtgttgtcggcatctttttagtggggtggcgggcaattgctgcggccatccgcactctcaataaagcaccgcgcagcgcataacagcagcaccagcaaaagcaagcagccggccagcaaacactgaccgactgctgcgctatcgccatactaacgagccaagacgcacgagccgcaaagctcacaaagtaacaagctcaagcgactacttttggtggaccaccatcaccgggcacggcagagcctgcagcaccccgtggctaacagaacccagcagcagtcgcgcaatattgccacgcccgcggttacctacaaccaacagctgggcatctttagcgctctcgatcagcgcctgcaccggcggctgctgcacaatctcttgcgtgatctgcaaatctgggtagtcggccgccagccctgcggtgccaaccgccagagcctcttttgcctcgtcctcctgctgctgcacaaactcagagctccacagatgctgcaaccccggggcggtaggtggcatccacgcgtaaaccgtgtgcaaaatagcaccactgccggcagcaacccgcgctgcggtcgcaaccgcgttacgggcagccttcgaaccgtcaacaccaacaaccacgcgagcaggatccgccaccgtaaactctggcggcacaatcaccactgggcactgcgaaaccgcggcaattttcacaccgcgggtaccgaaaacagcccccgcgaaacggtgcccgtgatgcccaccaagcaccagcagcgcagcggtgtgtgacaccttctctagctcatcgatcggatgtccgacaatcgccagcgcagtgatggttgcggcagcgtcctgctctttcgcgtaagcaagttcttcacgcaaaagtgcctcagaagcttccagcgcggcagccttaaaatctggtgtcacaaccagcatgctgtcgtccgtcacattaaccagctgcacctcagccttgttattctgcgcccaagccaaagcccagcgcagcgcggcacgaccctcagcggtgccgtcaacaccaactacaatcttttgagacattttatcctcctataagcagacggctgagacatggaagctccacatctcagccgcccattagcatcaattatttagctggcaaacgctcaggcttaatgcccgccatctcggcgatgacgcgcacaacctggcggctgtagccgtactcgttgtcgtaccaaacgtaaaccactgcggttttgccagttgccttagtcgcaagaccgtcaaccacgcccgcacggctggcacccacgaagtcactagatacaatctccggagactctacgtagtcaatctgcgcctgcagctcaccggtcagtgagacgttgcgcagcaagtcgttgagctcctcgacagtggtttctttctccagttgcaggttaagaatcgcgagcgaaacattcggggtcggaacgcgaatcgcgttgccggtgagcttcccggcgaactctggcagcgccttcgcaaccgcgctagctgcgccggtctcggtgataaccatgttcagcgctgcgccgcggccgcgacgatcgcccttgtggaagttgtcgatgaggttctggtcattggtgtaactgtgcacggtttcaacgtggccgtgagcaaccccaaattcgtcattcagcaccttcagcaccggagtaatcgcattggttgtgcaagaagcagcagacacaatcttgtcgtcagcggtgatggtggcgtggttgatgccgtaaaccacattcttcagcgcgcccttacccggagcggtcagtagcacacgcgctacaccctttgactgcaggtgctgtgacagccctgcctcgtcgcgccagcgaccggtattgtcaaccacaatcgcgttgtcaatgccgtaagcggtgtaatcgacagtcgcaggatcattagagtagataacctgaattcgcacgccgtttgcgataattacgttattgtcgcggtcaagctcgatgctgccgttgaacggaccgtgcacagagtcacgacgcagcagatttgcgcgcttctcaagatcgtttgcggcaccctgacgcaccacaatagcgcgcaggttcagaccgttaccgctgccggtgtggtcaatcagaatacgggccaacagccggccgatacggccgaagccgtacagcaccacatcggtgccggcaggcgcggcagctgacagccccgccagctcgccctgcaggaacgcctccagctcgccgccggcagcggcaaacttgttttgcagctgggccacgtcaatagctgctgcagcaggctgtagcttggcgagggtgttgataatttcgctggttgccgcgagtgacagctcctgctcgtcaatgtgccgagagtgcttgtgtgcgcggatgatatcgatcgggctcttaccaaccagggtgcgaccgtgtactgacaacactacgtcgttgtcgcggtgcagccggccaatcaccggcaccagctcttcagccagcgctactttctgattccaggttgtcaggtggtcttgtgtattgctcattttgtgagttttcctcgcttcagtgagtggagacggcctgcccgccgagatgtcacttataagtattccacggattaccgaaatttccactgagaaaagccgataataggctaggctcataaacatgaccacggtgcaagacgtaattaacagctgccgcagcctgtggccggagcacactgccgagcagtgggatcgggtcgggctcagcgtcggcgagccacacgccccggtgcgtaaagtcgccctcgcactcgatgccagcctggcaaactgcgccgcagcgcaacaactcggcgcacaaatgttgttgacacaccatccgctgctgttgcaggctgtgcacagtgttgccgcaaccgattacaaaggtcgcgtaatcaccgaactgattcgctctgggatggccctttacagcgcccacaccaacgccgatattgtgcctgacggggtcagtgacatcatcgctactagactcggcttgcaggagctgcagccgctcgttccagcggagcatgacagcagccacggcatcggacggcggggcagactggctgatccactatcattacaagaatttgtggatcgcgccgccgcaatttttccagacacggtgagcgggttgcgggtagcgggtgatccacagcaaaaagtagagcacatcgcgctgtgcgggggagctggtgacagtctgctctcgaacgagctggtgctgcagtctgatgtgtatttaacgagcgatttgcggcaccatccagcgcaggagtttcgtgaaaacaatccggacatcgccctcgtggatgtcgcacactgggccgcagagtcactgtggctggaagttgcggcgcaacaactcagtgcggcgctgccgggggtagaatttgtagtctgcgatattaaaagtgatccgtggattttttccgcgcacaaacaaggagcgtcaaaatgagggcaagcgcagcacagcaacagttacttctgccgttggcggcggtggatcaccgcatcgcccacctgcagcgggtcgcgcacgagctgcaacaaccgcaacccgaggtcgcggccctcaggcgcaccgcccaaccactgcgccaagcacagctgctggcgcagcgtgagcttgaagcacagcagcgcgaaatgtcgcgtctgaccgatgatttagacaccgttgccaagcgcactaagcacgatgaaaatctgctagcgcaggcaaccgactcgaaactggcccaacaggtaaccagcgagctgcaacagctggccatgcgccgcgacaagctagaaacccaacagcttgtagtaatggaaactattgaggaagcggagaaaaaactgcaggcagcggcggcagagctgcaagaaattactgcgaaagagcaggagctgctggccgaaatcgctgcccgtctgcagcagaccgagcaggacttggcacagctaactaaagaacgcaagctcctggcggcaccaatcattggtgagctactcgcggagtatgacgcggtgcgcagccgcggtggtatcggggcagcggagctcaccaataacgtgtctggggccagcggcatgcacctgacaccgggggagattgcggttgtgaagtcgctcgacagcgatgagctgtattactgctcgctgaccggcgcgattctggtgcgtgccgaggcaagctagcctctatcacagctccatgcgtgcacccgcagcgcggcagcatagcgtcccgtaagtagcccagcgagcgtgccgcagcgcaacgcagcagtttttagctagacttgatttggaatgggtcgacaagacggtcgcgtcgcggaaaaccgcgccgaggaacgtccgggctccacaggggagaacggtgggtaacgcccacccggggtaacccgcgagcaagtgcaacagaaagtaaaccgccaggcaactggtaagggtgaaagggtggtgtaagagaccaccagcgtttatggtgacataagcggctaggtaaacctcgttcggagcaagaccatgcagcagacaacgacgcgccccgctgagtctgcgggtaggttgctagagcacgcaggtaactgcgcgccgagatagatggccgtcacgatgcaaatcgcacagaacccggcgtatcagtcggcccattccactatcagtgcgacgcgcagattgctagaattagataaagcaaactctgcggaaaggttcaataatgagcactgaaaacatcatcgaagatgcagaacaatactggtacaacaccaaaactcgtaaagtcgagcatgggcggctctcgcctgcagtagatcgtgttgggccgtttgcgaccgcagctgaagcagcagccgcaccgcagacacttgccgcgcgcgccgcagcatgggaagcagaagacaaagccgcagacgagtgggaagattaattgtctaaacagcgtgactatgtgctgcgcaccattgaggagcgtggcgttaagtttgtgcgtctgtggttcactgacatcgcaggcaacctgaagtcggtggcactttcaccaaccgaagtggaaagtgccttcagcgaaggtatcggctttgacggcagcgcaatcgagggcgcaacccgcgcctatgagtcagacatcattgcgattcctgacgcttcaacgttccagatgctgccatggcggggcgatatggaacccaccgctcgaatgttctgtaacctattcaccccgaacggggaacccgcggtgtctgatcctcgccaagtgctgaagcgccagctcgacaaag

SEQ ID NO: 2607 - DNA, 16125 bp, synthetic construct
  misc_feature 1..16125: note = Synthetic
  source 1..16125: mol_type = other DNA
cctgctcgcggatgcgagacgcgagctcggcgatcggctcgagatcatcatgcgcgtctatttcgagaagccgcgcacgacggtcggctggaagggcctcatcaacgacccgcgcctcgacggcagcttcgacatagaagcgggactgcgcctcgcccggcgcctgctgctcgacgtcaatgagctgggcctgccggcgggctgcgaattcctcgacatgacgacgccgcaatatatcgccgacctcgtcggctggggcgcgatcggcgcgcgcaccacggagagccaggcgcatcgcgagctcgcctcgggcctctcctgcccggtcggattcaagaacggcaccgacggcaatgtgcgcatcgcgctggacgcggtgctctccgcctcgcagccgcatcatttcctcgccgtcaccaaggagggccgctcggcgatcgcctcggccagcggcaatgaggactgccacatcatcctgcgcggcggaaaggcgccgaattacgacgccgacagcgtggacgccgcagcgaaggaagcggagaagtcgggcgtctcgccgtttctgatgatcgacgcgtcgcacgccaacagcggcaagaagccggagaaccagcccgccgtcgccgagcatgtggcgcggcagatcgaagcgggagagcgccgaatcatcgggctgatgatcgagagccatctgctcggcgggcgccaggacatcgttccgggcaagccgctcgtctatggccagagcgtcaccgacggctgcctcgactggccgacctcgctcgagctgctgcgccgtctcgccgccgccgtcgagcgtcggcgttcggcgtcgggcgcgacgcgcgtcgcatcctagaacaacgacacgaaaactccgcccgctgcgctggtttcccgatcgctcgccgcgcgagcgtcgggaatgacaaaatgagctgacgagggcctcgcctgcggtcgaatgatcaatgcgacgatgcgccgcacgccgccgccgcgctcctcatgcgacaaatgctgtctcgagagcgagcgcggcgccgggccgcgcagcccggcccccgcagtccaggccgggcagcggagcacacagccgaggagtcggtcatggagatttctctggatcaggccgtcgagattcatgcccgcgccttgacccgccgcttgcaaggcgaagcgccgttcaacgcgcgcgagcgggccgccgatctcgaaagagtcggcgacaacgaaggccatggcgtgtggattcgcgtcgccgagacggccgagcgcctgctcggcgaaaggccctacgccgccgaggcttcgccgaataggtaatttccacggggcgcgctgtcacaaaagctcatcgcgctcggtctagcgctctgcgtcagaaacgagtcgatggagtcgaccgatgacgcagctagccgaaattttggccccgagcggcctcgtcccgccatccctggacggcgtcgcgccctcacgggcgcatgagcgcgcgctcgcgagctatctcctcaatcgccaccgcggcgttgcggccgttcgcgatattctggtggccgacattcgcgcctatgtcgatctcggccaggcgcgcgccgccgtcgatctgatggtcgtgctgaagatgctgctcgcgcgctggcccgaggcgcgacggcgcgcgcagcggcctctggcctgggacgcgacggcctgaccggccaggagctctactgccgcccgtccgcttccagcgctcgggacagcaagccgatgacgcgttcgacgagcgcatattcggcgtcgaaataggcgcgctcctcgcgctccaattcgtcgaattcgtctggcgcgcaaagttcccgacgaatgtcgcacagccgctcggaacggcgacgaagactgccgacgagcgctgcggcgtcgccgcgcgcgagctcgagcgtgatcgtggactgcatttcctcctcccctttcttcgtctagatggcgagcgcttgccgtccgcgcaacgaaacgaccgtcgcatcgacgaaaatcggattgaacattctgcggcccacgccagttagagcaaaactctctcgagcgaacgaggctcttccatggaacgccgcgaattcgtcgccgcggtcggcgcggccgccgctctctccgccacacgcgctctggccgaggatcagacgaccaatccccagacgaccaatccccatgccgagcatatgatgcatgggccgaaatttcaggcgctgatgaagacgagcgccgaatgcgtgtcgaccggcaatgaatgtctgcgtcattgtttcgggatgctgtcgatgaacgacacgagcatggccggctgcacgaaggccgcctatgatctcgtcgccgcctgcgccgcgctcgagagcttggcggcggtcaactcgcccttcacgccgactctcgccaaggccgtcggcgacgtctgcgtcgcctgcaagaaagaatgcgatcgcttcccgcaaaatgccgaatgcaaggcctgcggcgacgcctgcaaggcctgcgcggaagagtgccggaaagtctcggtctgacgtcgcgccatcgaagaaaccctcgcgcggcgttccgagccggacgatgggcgagcgtgacccgagcgccggaagaggcgtttccacccccacttcgaaggggaggtcgagcgtcgaacaccactccgtccagccgtaaggcgttcttaaagagagccttacgaacgatagacgacaaatgccgaatcatcgcggtcacgcgcgatatcgccggcgatcgatatgctttagaatttgcgcatgtcgcggcggcctcccgcggcgggaccgggtcggcgcgatgacgatttcacgattggcgcaatttgaaacgctgcagagcggctttccgacggtccttccagccgatctgcgcatctatgcgatcggcgacatccatgggcgcgccgatctcctcgacgcgctcgcccgccgcatcgaagaggagctcccctccgcgcccgcagatgtgctgacgatctttctcggcgactatgtcgatcgcggcctccaatcctcgaccgtcgtcgactggctgagccgcaacgattttccgacgccttttcacgccttgcggggcaatcatgaagaggtgctgatgcgtttcctcgaggacgattcgatcctcgagaactggcgcaggttcggcggcctggagacgctccattcctacggcgtggacatctccgccgcgatgcgcggcaagggctatgaagaggcgcggcgcgccctgctggcgcggctcccggaccaccatcgccaattcctcgcgcagacgcggctgacggcgagctatggcgactatttcttctgtcacgccggggcgaagcccgacgtgccgctcgaccggcagaaggcggaagatctgctctggatacgagacgaattcctgaaccaccgaggcggctgggaaaagatgatcgtgcacggccatacgcccgtctgcgagcccgacgtccaggccaaccgcatcaatatcgatacgggcgccttcgcgacctccatcctcaccgcattggcgctcgagggagacagtcgccgcatgttgttcgcgggccgcgtctgacatcgcccggacccatgagcggacgctccgggacgcccgcccggctcgagggctcgcggcgacgcatttcgtttcgacgcgtctccgacgccgaaccggcgtccacttcggcgggaaacctctcggcttttgatttcacgctctcaatacgccgcaggcgcgagttgaactctgtttcgaccgccgcgccgtcgggagcgaaaacggaaaaatcgcccgagcctacgcggcgatttcgcccgttcgacgaacgccttttcaggcgtcgaccaccgccctcctcgctggcgcgccgcgcttcttgggcgcggggacggccttcgccggcgccgggacggccttcgccgcgggcttgcgcccgagaccgagcgatttcgccagcgcggaacgctgagcagcgtaattgggcgcgacgatcggatagtcgctcttcaaatcgaaggcggcgcgatattcgtccggcgtcagcttgtgttcggcctgcaagtggcgtttcaaggatttgaacgcctcaccgcaacaaaggcaagtaatggcgtccgcgctgacggatttcttcaccggaaccgaaggccgccagtgtctagcctcgccctcgggggcgtcggccgtctcggcgccgccgccgccgaaggctttcttcaccgcctcgatgacggaaggaaggtcgataggggcaacagtgttatttgaaagataagaagaaagtatctgtgcgacgagcgctttgtcttcggcttcggacatggtggtttcctcggcggtcgaatcttttctatttgagccgatatcgatgtggattgcaatcggcgacttccctatcgaagaggcgcgcaacggaccaaaacattcgtcgagaaccgagcctgccgcgcagacagatatgtcacagacgagaggcgcggtcgaatgcgcgccgagcctgtgcgaattctatctccacggcgcgcggccgcgcgcctctctggcagggcggattcttcagcgcctgttcgatcgcgacgatcgccggcgacagcttgtcgagatactgattttcgacccgctggatcaattccagcgccgctgtagcgagaccagcagcgtgaccgcgttttgcttttcgatctcgatctttatcatcttcgttactacgcttccttctttcggaatagagcgtttccaaccgaagcggacgccggttcggctggaaacgcgcgcctcgtctttcgtttttatcggcgccgctcgggacgtctttctcgcaggcggcgcgctcgatgaagtctatgagccacggcgcccgcgcttgcatcaaatacccgcgccgcctaatctacgagcaagccgaaggtttcccggaaccgaacgcaacagcgaaacgccccgacgccggatgtaagcgcggggcgtttttgcgtctggctctgtgccggctcggacggctcgatgatgggtgaatcagtcgtagcgatgccggtaggcgtggcgccgccaactgtaacgccggggcgcggtgaccgcgccgacgatcgcgccgcctgccgccccgattgccgcgccagcgagcgtcgggccggcaaggcctccagacgccagagcgccgattcctgcgccgccgatgccgccgatgatcgcgccgcctgtggcgcgttgtccgggagtgtaacagcccgcgagaggcaacgcagtgacgagcgcgacgatgagaagcaatatcttccgcggccgccgtccattcgcgagagcaatcatcgcaacaaccttccactctctgcgagccgtcgcctctatggcctttgcggcttcgcttctcgtctcagcccgggccaaacttcggatagaattgcgccgattgcgtggagtcgcgcattgacgctttcggctcgaggagagtgcgcatgcggtcggcgagagattgtcgacgtctcggacctgccaggctcgctcgatgtgccggcgctcgcgggccggttccgccgcgtcgccagcggcgcgcggccgatggacgtgattggctggacaggacatgagcgcaggccgatcacgtgagaaaaagcgtcggcgcgaggatgccacccggttgcgtccgcgcccctcggaagggttcggaacccttgccctaactgcctgatttgaatggtgggcgcgacagggattgaacctgtgacccctacgatgtcaacgtagtgctctcccgctgagctacgcgcccccggcgccggccgtatgcttcggtccagcgcgagtgcagcgggtataatggctgtcgggccggggcgcaagcgccgttcgagacgtttcgacgctcgaggcgaagcgcggtccgccggccggaaattgttaagaatcccttccgcgaacagagcctttcggcaaaataattcgcgctcccgcgactttttcgccccttgccggccttcgaattcgtgtcacactgacgtcgtccttctgtcatgcaccaaaggaggcgccgtatgtcgctacagacccatctcgtcgagctcgaacgccgccatcaggctctcaaaaaagagatcgagcaggagcagcaccattcccgacgcgacgattcgaagctccacgagctgaagcgcaagaagcttcagctcaaggacgagataaccaagctgcggcaaggcgtcagcctgcactgacagtcctcgaagaaaagtcgagcatcgacgaggcggagagcgattctccgccttttttatttcggggaagccggtttcgggcgcccggcttgcttcgaagcgcccgcccgccgcacaatctttcgaccgcgagaacgaagccgccccatgcccccttccacgcgctatcgcgccgaaactcttcacgcctcgctcggcgacggcttcttcgatctcgtcgagcccgcccgcttcccaaaacatcttctgcgccaccgcaatcagcgttgggcggagcgtgtcggcctcgacacgttgaccgacgacgaatggatcgcccatttcggccgtttcgagcccctgcccggcggtttcgcccagccattggcgctacgctaccacggccatcaattccacatgtataatccggacattggcgacggtcgcggcttcctcttcgcgcagctgcgcgacgccgtggacgggcggctgctcgacctcggaaccaaaggctccggccgcacgccctggtcgcgccagggcgacggcaagctcacgctcaaaggcggcgtgcgcgagattctcgcgacggaaatgctggaggcgctcggcgtcgacacctccaagagcttcagcctgatcgagaccggcgagccgctctatcgcggcgatgagccctcgccgacccgctccgccgtgctggtgcggctctcccattcccacatccgcatcggcaccttccagcgcctcgcccatttcgacgacacgcaagcgctcgggcggctcatcgactattgcgtcgcccattatttcccggagctcgccgacgagccggccgagagccgcgccggcgcctttctggagcgcgtcgtcgcccgcgtcgcgcggctcggcgcgcgctatatggcggcgggcttcgtccatggcgtgctcaattcggacaatatcaacatcaccggcgagagcttcgactatgggccgtggcgattcgcgccgcgctacgatccgcaattcacggcggcctatttcgacgagagcgggctctacgccttcggccgccagccgggcgcgctcggctggaatctcacccggctcgcggagaccatattgccgcatgtcgggctccagcgggccgagcaggctctcggctcctatcagagcgtcattcagcgcgagttccagctcgccctgctcgaccgattcggcctgctgccggcgcaggatcaggcgggggacgccgccctcgccaaggcgctgctcgaatttctcggcaagacgcaggcgtccttcgagcagaccttcttcgactggcgcggcgggctggcgagccgcgagcgcgccgccgccagcccgcaggccgcggcctatgacgcgccggaattcgtagggctgcgcgaggcgctcgccgcgcatgagacggcgccctcggccaatctcgatcacccctatttccgccgccccgtcccctgcactatgctcatcgaagaggtcgaatccatctgggcgcaaatcgcagagcgcgacgactggcgcgcgctcggcgacaagatcgcgcagatcgcttcgatgcgcgaagcctatgcgccggcgcccgccgggggatgacattgcgacgatgagccgtccgatctgcgccttgctgtttctcgctctttcgagcgccgccgccgccaaaaatcagctgatcgagaaaattccgccgagcgacgcctgcttctttcgccgctacgacgaggcgcatcttcgcgcccgtcccggccagacggtcgtctccgtgcggctgtcgcttcgtcgcgcgctccccctcacgcccgaggaggcgcgcgacctgcgcctcgaatttcgtcacaaagggcggggcaagcccttctatgtcgtcggcggctgcgcctctagcgaaggggccgatcgcgacattctcggggcgcggcccatccgatccttccgcgatgaggcggcggcgcaatgcatggcgcgcggcgggctcggcggctcggccgaggaaggcggcgagttttccatcgatctcgcggaagacggggcttccgtcaccctctatatgggcgacggcgtgagcggctggcgcggcccggatcagaagaagacatcgacctatctcgagctctcgcgccaggaccgcgtcttcgagctcgagcgcgtcgacccctccgcctgcgtcgatctggacaaggcgatcgccgtcgattgaagctcggaatttcgcccgaaggcgtcgccgccttcgcattaggacttgaagatgaatgtgtcgcgaggcgataatcgcgcgtcacgactcgccatgaggcggcgctcggtcaggttgtcgaatggtcgaagagctcagcgaagccgaacgcaactcgatccgtatcgaagtggagcgcctgaggctcgagcacaaagacctggaggatgcgatcgacgcccttctcgccgtcggcgccgtggaccagctacaaattcagcgattgaaaaaacgaaaattgctgctgcgcgatcgcatcgcttttctcgacgaccagctgacgcccgacattatcgcgtgagccgcgctcgagccgatcctatttccacattctgagccccaccgccacggcgagcgatacgaccgcgacgatcgcgacgaccgccaccagccttaccgtttctttgctttcctgggcgctccccatacggtcctccgccgtccatatttcgaattcggcgagcctatgcctgtcttggagagatacaataagcgcgcatgcgacggaacagcgcagtgcgaatcgctcctcggcgggccgaagccgcagtctgcggctcaataaactgatattatgggcctaccgctctggcgcacgcctcgggatccgcgcatgcgcgcccaaattcgaggcgccggcggcgggccgccgccccgaagccatcgccacggcggatcgagagacccttcttgtcctccgcgcgcggccgaggctcagtgtgtggcgcgattacccattgctgctcgaggcgcggctcgagaaggtttctcgagcgttcgtccgatcgtgtcgtcgctggctttttcgacgaagttccgcctttttcttcgcgcacgcgcagaatctatcgcgcgtaaaataaattcggccgagggattcgggtttgcccgctctcggctgtctttagtgtgggagaagcagcgtttttatacggaagccttcggagttatcacgtcgactattacctcgctcaggtcggcaccagcggcgcgaatgcttctcacgtcagtttcgttcccagcgcctcgtcgccgctgctcgcgatgtcggaggaccacgccctgctacggctcatcatcgccaatgcgctgggggattcggttgtcgtctccgacgcgctcgaggattccatgctggacgatcccgacgcagcaggggcgctgctctccaatctcggcgtcgcggccatgccctcggccgccgcctactcatctcgtatcatggcgtatctgcattgattctcggcgcatcgattctcggcgcgaccgccaaaaggccctgcgatcggctccgaaatcagctccaagcgtttgattggcgcgccggtctgggcaaagatacgaacacgtatatcattgaagttaattgctaattgtcgggatcagttgctcgctccgccggctatgagagagtctccttccgaggggcgctattgcttgaggcgcgctaatcgagctgcgcttcgagcaaaaacgggcagaccggagcctgcccgtgatttggtgaggttgtcctcttgttaacgaagagaccacaccgtctcctttgctagacaacctaagcgtagcacgcctagactggtttgcaactgtcccgtccagaacctttcgtcgagaccgcatggatttttgcatgacagttcgctcgattcttcgtttcgcattcgacatcggcacaaactcgatcggctgggtcgtgcttctcggaaccaccaccctcccggcaggcgcgacgcggcagggtcaggcgacagaaattatcggcgtgaaagcgctcggcgcgcggatttattccgatggtcgcagccccaaggacggttcgtctctggcgatgatgcggcgcgttcccaaggcggcgcgccggcgacgtgatcgttatctccaacgccagcgcaaactcatccgtctcttgatcgaacatggcctgctgccggcggaggaaggggcgcgcaagaagctcgagcggctcgacccgtacgccctgcgcacggctggactcgatcgcgcgctcgagcccttcgagttcggcagggcgctgtttcatctcaaccagcggcgcggctttcagtcgaaccgcaaggcggatgcgaaggacaaggaaagcggcgtcctgaaggaggcggccaagcgcctggccgagcagctcgagcatgacggaagccgcacgcttggcgagtttctgcaccggcgcttgaaaacgggaaaccacgcgcgttttcgactggcgggcgtcggaacgaaagccgagcacgaattctatccgacccgcgatctcgtccggcgggaattcgatgcgctttggtcggcacaagcggcgttcgaccccgagcggctgacgccggacgtaaaatgcaagatcgccgaagcgatctttcatcaaagaaagctgaaagatgcgaagcccggccgctgcacgctgaaccctcacgaggaacgattgcccgccgccctgccatccgtgcaggcgcgacggatttatcaacagttgaacgaattgcgcttcggtccgcggtttcgtctcgaccgacagttgacgcgagagcagcgcgagccgctcgccgcgacgctgctcggcggcaaatcgctgacatgggatcagattcgaaaggcgctcaagctcgactccgaaattctgttcagccgcgaggagatcgacgagaagatcgaaggctgcgagaccgcgaggagacttgtcggctccgccaagaaaaaagcattcggaaacgtctggcgtaatctcccgttggagcgcaaggacgagattgtctcgcggctcctgaccgaggaagacgaagagtcgttgatcgcttggttgagagcggaatgcggattggacgcggaagccgcgagcaatgtcgccggcatgagcctgccggacggccatgggcgtctcggcaagaccgccaacgccgaggtgctcgcggaattgaaggctgcggtgatcacctatgccaaagcggcagaaaacgccggctatcatcattccgatttctcgaccgaggaaaagctcgatcggctgccttattacgcgcgcgtcctcgaacggcatgtcgccttcggcacaggcgaacccgaagaggcgcagccgggatggaaaaagatgagcgcctcggagcgacgccgccggcgcccggcatgggaagaaaaatgctacggccgcatcgccaatcccacggtgcatatcggcctcaatcaattgcggcgcatcgtcaacgagttgatcgctgtctacggcaagccggatgaggtcgtcctcgaactcgcgcgcgagttgaagctgaacaagaagcaaaaggacgatatcgagcggaagaaccgggagaacaggacggcgaacgaccggcgcaagaagcaattggccgaatgtggcgtggaggacaacggcctcaatcgcacgcttctgaggttgtgggaggagcagcgcgacggcttgaactcggtttgcccctattccaggaaccagatcggcatcgaacaattattctcggaagaaatcgagatcgatcacatcctgcctttttccagaacgctcgacgacagcgcggcgaacaaggtcgtctgctttcgcaatgcaaatcgcgagaagcgcaatcgcacgccgcacgaagccttcggctacaggaacgattggagcgctatcgaggcgaacgccgagaaattgccgtataacaagcgctggcgttttgcgccggacgctatggaacgcttcgatacgcgcgagcgcgattttctcgatcggcaattgaacgagaccaagcacctttcccgcgtcgccaaggaatatctcgaatgcgtcgcccccgacgtctgggccgtcaccggcaatctcacttccttgctgcgccacaaatgggggctcaattccattctgggcgacgatcgcaagaaccgggacgatcaccgccatcacgccatcgacgcggcggcgatcggatgcatctcgcgaagcattctcaaccggctggcgcaacgcgccggagagtcggaatcgagcgaggagcgcggccggatcgcggacgacattcccgatccctatccgacgttccgcgacgacgttcgcgagctagtgcgcaagacgatcgtctcgcacaagccggagcacgccaaaggcggcgcgctgcatgaggatacggcctatggcctcgtgcgggacgaggccgaacgccagatcggcaatctcgtctaccgcaaggcgctgaccgcgctgacgcccaaggagatcgagcgcgtgcgcgacaccgatctgcgcaagaagctgctcgcgttacgcgacgccgttcaagcctcgggcgagaagctcgaagcggcgctgatcgcattcgcgcaggctgaagcgcatgccgaacaggaacgaacgggcaagccgcgcaatcccatccgccatgtgcgactgctgaagcccgaggccacgaatgtcgaaatcgaggatcgtcgcaacggcaagccctataaggcggtcgtgcccagcgagaattggtgcatggacgtcgtctcgttgaaagacgggaacggcggccatgtgtggaaaggcttcgccgcctcacttttcgaggtgaatcaaaagggctggcggccgcaatgggagcgcgaccgcatcggcggcaagctcgtcatgcgactgcacaaaggcgatttcgtggagatcgacgacaaggacggcgagcggcggatcaagaaagtggtgcgcttgtcgccatcaaacgggattgtctatctcgtcgggcacaatgaagccggcgaacttcagaagcgccacgacgatccggaagacccattccgttgggacttcgcgaatatcgggggaatgcggatacgcaacgcacagaaaattgcgatcgatgagcttggctgcattgcaaataaaatccgggactgttacagtttttagtcacaccttgcagtcccatctgtatggcgtgattgggtgtaagtttggaactcatttctttcactctaacgtcaagaaataaaatcatgaaagaccctttgctacaaaagctgacgacgagaaacgccgtgatcgtaaatagaaactcaaatagaggagcatttaagattgacatcacaacgcaagttaatattgatcggaggattgtcggcaaagattccgggaaaaataaacgtctaatcaaaaacaaataaagatcactttcttcgccgcgaatggcgttaagacctaaggtaagacctaaggacttaagctttaagtcgtgcacgttagagtgagttgcgattggatcgcaccgcccctttgctaagacggtctcgtcgcttcatcccggcgagaccactcgcctgaaagcggctggcccgttttccgcaacctccgatcgcgttttcgccgtcgtgttttccaacggcgcggagttgcgtcattatgttacgtcgcatcgtcgaaatttccggcgaagggagaaagctctccctcgaacgcggatttctttccgtttcctgcgccgacggccttttgggccgtgtgccgctcgacgatatcgaggcggtcgtcgcggcgacgccggccatctcctattccggtcagcttctcgccgccctcgcggcgcggggcgcgcccgtcgtcatttgtggcgagcgcttcacaccggtcatgtggttgcttcccgtcgatggccaccatgctcagggcgaccggatggaggcgcaggcggattcggatcggccagtgcgcaaacgtctctgggcggagatcgtcacggcgaagatcgaagcgcaagccctcgcgctcgaaaaactcggcgtcgaagcagaggccttgaaacggctgaaggccagcgtccgctccggcgacccgggaaatgcggaagcgctcgccgcgcagaaatattttcctctgatgttcggacatggatttcggcgggatcgggacggcggcgacgtcaatctattcctcaactacggctacacggtattgcgggccgctgcggcgcgggcgatcgtggctgcgggcctcaatccttcgctcggtctctttcatcgcagtcgaggcgacgcgctccggctcgcggacgatctgatggagccgttccggccggcggtcgatctcgcggcgcgcatgctcacgcagggaggacgcagcgaattggacgcagcggcgaagcgcgaactcgtaaatgtgttgtacggcgactacgcgacgagcgaagggcgcgcaccgctgaccaattgcctggccaagctcgcgatctcgctcgctcaagtctttacgaacgaacgcaagaagctctcgtttccggccccgctggttccattgcccgagcagccggccagagacgaaccgtgagcgttctgtcggggtatcgaatcatgtgggtcatggccgtgttcgatttgcccgttctcacgaaagccgaacgccggcgggcgacgaaattccgcgaattcctcctcgacgaaggcttcaccatgatgcagttatctgtttatattcgctttacgggcggaaaagaacaagcgctcgcgatcaccaaccggatcggcaagaaggtgcccaagaacggcaaggtcgatgtcttgttcttcaccgacaaacaatatcagaatattttctcgttccggggccgacgcgacgagccgaagccagaacgtccggaccagctcaccctgttttgacggcgtgcaaaaatcggcgctcatgcacggagttttcgtcgagcactccggcttttcctgcagaaaaacagggaaaaagccctttaaatcaagggctttttccaaggcagttctagcaaaggggacggtgcgatccaatcgcaacaccgaccagcaggtgttccgcatcacctatgttctagcaaaggggacggtgcgatccaatcgcaaccgccaccgataggattcgatggccgccgttgttctagcaaaggggacggtgcgatccaatcgcaacatggctgagtccgtatttcttgatgatctcgttctagcaaaggggacggtgcgatccaatcgcaaccgccgcctgcatcaagccatcctcggcgcaggttctagcaaaggggacggtgcgatccaatcgcaacctggcgatcgttcaggcaatcgtcaccgcggttctagcaaaggggacggtgcgatccaatcgcaacttccttaggcgtgattatgatccgctgtgtgttctagcaaaggggacggtgcgatccaatcgcaaccgatcgcatcatctcgacgatctcgacagcgttctagcaaaggggacggtgcgatccaatcgcaaccggataatccggatcgcgtatgtcgggccagttctagcaaaggggacggtgcgatccaatcgcaacaggccgacacgctggcgcctcgatgcgctgttctagcaaaggggacggtgcgatccaatcgcaaccgcaccgggcgcgcatcgcggcggcatttggttctagcaaaggggacggtgcgatccaatcgcaacctgcgccgctctggcctgcggacatatcgcgttctagcaaaggggacggtgcgatccaatcgcaacattacgaagcgcgtccctctccgcctccacgttctagcaaaggggacggtgcgatccaatcgcaacaggatcctgcgatgcgcgccgcctatctcggttctagcaaaggggacggtgcgatccaatcgcaaccatctcagctttcgaaagctctgacgatcggttctagcaaa

SEQ ID NO: 2608 - DNA, 15341 bp, synthetic construct
  misc_feature 1..15341: note = Synthetic
  source 1..15341: mol_type = other DNA
ctcggcaatgctgtcagacccggcacccagagcggcgttgatgtcggacttggccttttccagggccgcaatggtgtcggaaacatggtcgtgggcggtgctggcggccgcttccgccccggcaacggctgtggcggccaccgcggtggccgcggccccggcgcccgacagggtggagccggcggcgtcgcccaggtggcgccggaagcccgtgaagcgctcacgccggaaagctgccatgcgatcttccggcgcggccggaatggccgcgggctggacttcaacccgggcaggcgctggaggctccaccaccggcgcagctgtcaccacgggagcaggctccgtcaccagaatttcctcggtgctgccggcgctgtgctggggaaggtggaccggctggccgctctgggccgcttcgatggcccggatgaccccgccgagccccatggcgaccatgccgcccgccagcagggtgaaggctgcctcgggcgtcagccccatgacctgcatctggccaggggcggcaaagttgaccagcgccagaacgagacccagaagggccatcagccctccgcccacgcgcatcaaattcatcatccttccccctccggggcgactcacggccccgtctgttcacctgtgcatcggggttcagggttaagatttcacttccccagccccatcgcggcccctcggctgcgacctcagtcctcaaacaccacgcgggtcgcgggccgggcgccggcagcaccttccagcgcgtcccagaccttgcgggccatggcgcggtagatggcagtatgggccgaatcggggagaaattccaccaccggttcgccattgtcggagcggcggcggacgtcggggtcgagcggcacttcgccgaggaagggcaccccgatgcgctcggcttcagcgcgggcaccgccatgactgaaaatctcgtggcgggcgccgcaggggctgcacacgaagtagctcatgttttggatgatgccgatgattggcacattgacccgcttgaacatggcgatgcccttgcgcgcgtcgatcagcgccagatcctgcggggtcgacacgatgacggcaccggagagcggcgtctgctgggccagcgtcagttgcgcatcgcccgtgcccggcggcatgtcgatgatcatgacatcggtttccgaccactcgacctcgcgcagcaactgggtgagggccgccatgaccatggggccgcgccagatcatgggcgtgtcttcatcgacgaggaagcccacggaactcacttcgactccgaagcgtttcaggggcttgaggcgcttgcccggcacggaggaggcctcgggacggtccttgatgccgaagaggcgcggcatggaagggccgtaaacgtcggcgtcgagcaccgcgaccttgaggccgagacttttcagcgccagggccagattgatgctggtggtggacttgcccacgccacccttgcccgaggccacggcgacgagatgcctgatgccgggcacggcattgccgagggtctggctggcggtggcctgcccctggtcgcggccggggcctccggcgcgttcggaggtcagcgccaccatggccttttgcacgccgggaatggccttcaccgcctgctccaccacgccgcgcaactgttccatggacttcaggtgggcgggatcggcggcgagcgccagcatgaccgacccatccttgatggtgaccggcgacacgaggccggcggagacaatattgccgcggccgtcgggggcggcgatgcgcttcagttcggcaaggatgcggtcttcggtgagtgcggtcatggggggcctctgtgaggaaatcaggcaggggattaaccacctttaaggcggccccgcaaggcgcaagacgaaccccggcaccgatcaaattttagccaatgggacaagcccggcttagcgttttgctgatagtcgtgacggcggaccgggccgcatggacggccgttggaatgagggctatgggccaatcggtatccgcttcgggcttccttgaccgggtgacacgacccgaggccccgcctgcgcgcgaggccgagaccgtccaggtggaagacctgctggccggggccgatcccagcctctatgaccgggtgccctgggaaagggacatgctggcgctggtcctgcgcaatcagctcaaggtggcgctggccctgccggtgctgacgctcatggtggcgcttggcctgtcaacctggctgccgtggcaacaggtggttgcctgggcggtggccgctctcggcttccaggccatccagctttacctcgcccgccagttcttcaagcggccgcgcaaccgttcggaacagtccgactggatcggcatgatttccgccactgaacttctgctcgccatgagctgggtggcgcccctgttcctgttctgggatcaagccgccattctccagcaattgttcctcattgcctgtgtgctcgcggtggcggtggtgcgcctgctggtgatggggtctttcctgccggtcatgctggcaggcaccagcaccatgaccatgggcatcgtgctgcgctgcctcattcagggtgagccgctctacctgtcgctggccagcgtggttctggcgctggaactgttcttcatcttcgtggcgcggcaaattcaccagaccacccgcgacatggtggtgttcaaggcgcagaaggacattctcatcgccgaattgcagcgccagcgcgacacggccaatgtggaacgggaccgggccgaggacgccaaccgggccaagtcatccttcctcgccaacatgagccacgaattgcgcacgccgctcaacgccatcatgggcttttcggaaattctcgaacgcgaactcttcggccccatccagaaccagacctatcgcggctatgccggcgacatccaccattccggcagtcatctgctggcgctgatcaatgacattctcgacctgtcccgcatcgaggccgggcggcgcgaactgtccaccgagcccgtgagcctgggcgaggtgctgaaggatgccaattacctgctcaatctcaaggcgcgcgaacgcaagcataccgtgcgggtcgatgtcgatcccaacctgccgcgcctgtcgggcgatcatcgcgccctctatcaggtggcgatcaacctcatcaacaacgccatcaagttcacccagccccatggcctgatccagatcaaggcgggccagaccggtgatggccgggtgtttctgagcgtcaaggacaatggccccggcataccggcccatgagatcgagcaggcgctgggcgccttcgcccgcgggagcatggcggcgcgcaaggccatcgacggggccgggctgggcctgtccatcgtgcgcggcctgatgcagctgcatgatggtgacgtggtgatcaacagccagcagggcgtgggcaccgaggtgatctgcaccttcccggtgagccgcgttctcaacgggccgcgccgccaggtgacaggcgagagcggcggtccttcggaaagccagcgccggctcatcgcgctcaccggcaacggctgaattcaaccgttcactgcgagcttgagcaacgccagggcaaggacagcaccctgccctgggccatcgcccgtgtcgatggcgatgagcggtgtcaggccgaggtgccgggcaagccgttcttgcgatgccccgtggacgcgggcgagacgcacatgagcgatggccgaaggctcgagggcctgtagcacggcggcagcggccagggcggccatgccttcgatgaccaccggcacctgatgcaggcgcgccgccagaatggcgccggccagcgccgccatctcacgtccgccgaaatggcgcaatgcctccagcgggtccagcccgccctccggcagggggtgcaaggccgcacgctggcgctctccctggtcaccttcggccgggtcgagccactgatccacgtttccgcccaggagcgcccggcacagggccgcggcggcgaggtcgccgccgatggcaaagccggcaagaccgagcaggtcggcaccgccggccaccgcctccatgccataggccatggtggcggcgcagtcggcctccgccagactggggcccgtcaacagatcgccggcggggtgggccagcgccagttcaaacaccttgaggccaagcccctgggccgcgcaggtgcgcgccgccggatcgctaccctcctgcagggcgtgaagccgcgcctcatcctcccccgccgcatgaccggccagggcgcgcagggccggatggggacgggcgatgaacagggcgacacccgggcgggtgagccggggagggctggccgccggtgcagccgccagccccgcggggctgttgcccgccactgtcggcaagggcggcaggtcgcgcagcagcgcacggatgtcgtcgaagggcagaccggtcagggcagaaggcggcatggcaatccgggtcaggttggcggctttgtgaacgccatgcctcatatgcccagtcgccgggcctttcaacaccccggcaaggcggctaaaagagtccggggatgaccatgtttggcaatgacgacaggacgggggacgacggccaatcgggcttccggccggtggccgagttgctgctcgcgctgcgcttccacacccgtttgcccattcccttcctgcgcactctcgatccgccgccgctggcccaggccatgcggttttttcccgtggccggagcggtggtgggggcgctcatcggcgccatgctgattgcggcggcgctgctcaatctgcccccggcgctggcggccatcgtggccgtcgcgggcggcatgttcctcaccggagcccggcacgaggacgggctggccgacatggccgatggttttggcggcggcgagacgcgcgaacaacgcctggacatcatggccgacagccggttgggcacctatggcacatcggccctggccctgagcctcatggcgcgggtggtgattctggaaaacctgctggcgctgcgccccctcgccgtcatcgtgctgctggccggggcggccgccttttcgcgagccttgatggtggacctgctgtgggccacgcgtccggcgcgcctggaaagcaccatgctggaccacggcaggccggggcgggccgtgacgctgttcgccctgttcaccggcggtgccatggtgacggcggccggtgccatcatgatcgcaccggaagccgggatgctggcgctggtcgcggcgctggccaccacggcgggcttgcgcgcgctctccatgcggctgatcggcggccagaacgacaatgtggcgggggcggcccaggtgctcagcgaagtcgccatgctcaccgccttcgtggcaagcattggttaaccctgccgataaatcacaaggtttcgtcaaccttctctcacccggcccgcgcctagaatggcggcatcgtctgttgcgttcctcggagatgccatgcgccggtccggtcccctgccttcggttggtcttgccttcctgctcaccatgagcgcgggcctgccgggcctcacgcctctggtggcggcgcccgcctatcagctcatggccatgaccgaactcaagtccggcagcaacgggcatttcgtggtcatggcggaaatcaacggccgcgatgtgcgcgtgatggtggacacgggtgccaccgccgtggcgctgagccatgaggacgccagcgccatcggcctcaagcccgacgacctcacctatgacgtgccggtgtcgaccgccaatggcatcgccaaggcggcgcgcgtcaccctcaccaaggtcaatatcgatcaggtgaaggtctatgacgtgcaggcgctggtcatgcccgagggcgccctcaccggttcactgctcggcatgagctatctcggccgcttgcagagcttcaaggtgcaggacggcgtgctggttctcaagaactagcagcctgactgttgatggacttaacacaagtcagatcagttgctctcccgcgatacttttgagcggtggctttgagccatcaaagccaaaaacgctctagaactgaaaggcgaactgggcaccgcccatgtaggtgtcgctgtcgtccatgatgagaccggagacttcgcccatgagcgcgagctgcgcccgcccggcgaagctgaagttcagtccggcctgaagccggagatcggtatccgcatcgctgcgcagtgttccgctcccctcctccctggtcttgtcgaggaagttccagtccagttgcgcgccggcccagggctccaccgtaaccttgtccgagatggccacggtattgccgatctggagggcgggcgagagagcggcggtataaaaggtctggtccggccagccgccggtcgtttcctcctgcttttcgcgcgaccaggcgaagttcagcgatggcgtgaagcgccaggtgccggaatagaaattgccggtcagcgccgccgccgtctgcacccgcgtgttgtcatagtcgttgccgccgaactggctgtcgaggtccatccacgcggcattgccggaaagcatccaggtctggttgatcgaccaggcaccatagacgccaccgccccagccgtcggtttccacccgtgaccaggggaaacccggcgcttcctgacgggaggtttcgcgcagggccatgatgccgagaatgaccgaatccgaaaccttgtaatccgcgcccagggtgaaattggccagcggtccttcaagatcggagagatcggcatcgccgtccacccaactgtagcggccatcaagccagacattccagcggggcgcggacgcaacggcagagggcaggtccgccgtgggcacgatggtgatggcggagggggcgaggcgcgccagggcctcggccgggtcgagcgtcagtccggcgggcgcaatctggtcgggcgcaaagcggcggcgcagggccagcgccacggcatcgttcacggcgtgcatggactggccgatgcgcgccgaggcggcgcaggccgtgatgtggttgctgtcggcgtcgaaggagacctctgcgagataggaacagccgtagtcggggttgttcacctgggcctgggccggaagggtccaggccagaagacagccagcagcaagcacaaggttacgcggcgtcatggccccctcctcgtcaatcgcggttgttccgcatcacgtcagcagtgcccccggcacgttgtaacaggaggcggcgggcatttccaccccgctatgcgtcaggtgcacgtctggaggaggctgccgccacggcggccagggcctgatggatcacgtccacccccgctccggcgcggcaggtctcggtggagaggacctgccgccacaggcggccgccgcgctggccatggaacaggcccagcatgtggcgggtgatgcgggagagccagacgccctgccccagttggtcctcgacgtagggcaggaaggcttggactgccgccacccgatcagccaccgggtttgccgcaccgaagacgcggcggtcaacatcggccagcagccaggggtcatgataggcggcgcggcccagcatgacgccatcgagaccagccccttcggcttccgcctgatcgagcgaggcgaggccgccgttgaggatgatggcaagctgcggcatggcctgtttcaggcggtgcacgcgggcatagttcagcggcggcacctcgcggttttccttggggctgaggccctgaagccaggcttttctcgcgtggacaatgaaggtgtcgcaacccgcgccggccacggcggccacgaagcgggagaggtcttcgtcctcgtcctgatcgtcgatgccgatgcggcattttaccgtcacgggaattttcacggcggcgcgcatggcggcaaagcattccgccaccatgtccggctcggccatgaggcaggcgccgaagcggccgtcctgcacccggtccgaggggcagccgacattgagattgatctcgccatagccccagtcctcacccaccctggcggcttcggccagaagggcgggatcgctgccgcccagttgcagggcgactggctgttcagcgggcgaaaagccgagaaggcgctggcggtcgccatggcggatggcggcggcggtcaccatctcggtatagagcagcgcgtgcctggtcagcacccgatggaacatccggcaatgccggtcggtccagtccatcatgggggccacggaaaaactttttcctttatttttcaatcaaatacctgtatcaatcaatggaacaaacacgaaacgtgtgcgctgtttttcgtcggatttgcacacgtttctacccatttcttcgcttccctgcacacaaatcgcacacggtgcgggggatttcgcatcggagtgcacacggatggcagtgataacaaaactcccgtcaggcaattggcgggtccaggttcgccggaagggttcttacgccagtaacaccttcaggcgaagggccgatgccgacgtatgggcgctggaggcggagcgcaatattgacctgggcatcgcccccaaagccgtctcccccgccaagattcggacggtgggtgatatcatcgatctgcacatcaatgacatgcttgaggtgggcaagcccattcgaaggtcaaaggcagctgtcttggccgccctcaaaacttcccttgggaccacccggctacgagacctgaaccgcatagcgcttatcgactatggcaaggcacgcgcaaaggcgggcgcgggacccgctacgctcgccatcgacttctcgttccttggaactctcctcacccatgcggctgcggtccacggcatcgaagcgacacccgaagatgtcaggcttgcccgcaaggcactaacgcgtcttgggctcattggcagatcgaatgaacgcgaccgccggcctacccaggaggaattggatgtgctggtggagtattttatcaataagccgcgccagcttatcccattggaccgcatcatccgcttcgctgtggcgacagcgatgcgcttggaggagatctgcaagatcacgtgggacgatgtcgattttcggaatcgcctggtgactgtcagaaaccgcaaagacccccgcaagaaggacggcaacgaccaacgtgtgccccttctcggtctcacaggatatgatgcctggcagatcatccttgagcaacagattgtcactcatggaaggggaagggtttttccccattcccataggtctgttggaactgccttccatcgtgcttgcgcggaactgaaaattgttgacctgcattttcacgatctgcggcatgaaggaacgagccgactattcgaggcgggtctgacaattgagaaggtcgcacttgtcaccggccacaaggactggaagatgttacgccgctataccaacctccgtccggagtccttgcatcgtgtggcgccaactaccgctgtggtcctggcgagcccctctgcggtgagccaactgggggcaagtccaccacagaccggaaatactccagccgggtgatgcgaagatggtagcagctcacatcaccacatccgctgcacggtaactaaacctgggatcaagggcaggtggtctgtttccccaaacgcggggatgaactatcaattcaacctcccgacctatggcaaaagtggtaaaatgacaccagttggccaaaaattccggagtccctaagagctgtcggatgaaatttcagtggcaaaaccacaacaaaacgcacattcctttcagcctctcaggactatttcgtagaggaaaagccgatggcgcaccgtgaatgacaaaggtgagaactggtgtgttctgtttgcccgcaaagaattcaattgaagaaggcggaccggagcccgccttcaatttgatggagttgtctccttgttaacggagagaccgcaccgttttcaatgctaacgaggacagtatagctgcccattccaagttgacaacctattttgtgtgattaagttttccctcaaataggggttgcatggcatggatgtcattcgattttcatttgatatggggacaaattcactggggtgggccgttctgaagggcacccggactgacaaaagcgcgaatgctcgtcaaggtgaagcgactaacattgtaaaaacgttggccgtcggagcacgcgtctattccgacgggcgaaaccccaaagacggaacttctttagcaatgatgcggcgcgagcctcgcgccgcccgcaaacgccgtgaccgcttcctgcaacgtcaacgcaagctcatcaaactcttgatctcatacggtctgatgcccaaggctgaaggtgaacgcaaacgtcttgaattgcttgaaccgtattccctacgtgtcaaagcactggacaacgccattgaacctttccacttgggccgcatcatctttcacctaaaccagcgacgcggttttcaatccaatcgcaagaccgacaagtccgacaaggacgacggtgttctgaagcaggcgcagaaacggctttgcgaggccctcgaacgggatggttcgcgcaccttaggagagtttcaatatcggcgacttcagactggtgacaacgcacggttccgcattaccggaactggcctcaaggcggagcatgagttctttccaacccgccagcttgtgaaggatgaattcgctgctctttgggcagcccagaaaatgcaccacccctcattgcttaccgatgaagccaaaactgccattagcaacgccatttttttccagcgtcctttgaaagctgtgaaggctggacggtgcacctttaatccctcggaggagcgtctgcctgctgccctgccaagcgtggaagcccgccgtatctatcaggaggtgaacgaacttcgatatggtgagggttaccggatcactacaccgctagagcaagccgagcgcaacgctctcgtttcggccttgctcatgggtaacaagctgacttgggtacagatcaagaagcagctgaaactgccggcaggcacgcgattcagcctcgaagacgtgcgcgacgagttaaaaggctgcgccactgcggcaatcctgcggggcaagaagggcagagaactgtttggcaagggatggcatgcttacccccttaagcgccaagacgacatcgtgcggcatttgctcgacgtggaagaccccggcgaaatcatctcatggttgcaaatggaatgtggtgtttcagcggaagtggctgctcatatcgccagcgttaacttgccggacggtcacggcaggctgggaaaaaccgccaatgccgcaatccttgaacaattgatagcgcaccacgaatttacgtatgcccaagcggcggaggccgcgggctatcaccattcggatttctcaccccaacagaagctttctagcctgccctactatgcccgcgtgcttgagcgccatgtatccttcggcaccggcaaccctgctgatggagatgagaagtgctttggcaaattcgccaacccgaccgtccatgtcggcctcaaccagctgcgcaagctcacaaacaagctgattgccaaatatggtaggcccgatgaagtggtaattgaacttgcacgcgacctgaaacaatcaaaaaagcaaaaggatgaagagcagaagaccaatttgaaaaaccggtccataaatgacggatttagaaagttgcttgcagaaaataatgtcccggaaactcctgttaacatgatgcgaatgcgactgtggcatgaacagcgcgatgcgttgaatactttctgcccttattgtggcgaacagatctccatttccaacctgctctccgacaccaatgagatcgaggtggatcacatcttgccattttctcgcacgctagatgatagcgccgccaacaagattgtctgccaccgcacatgtaatcagggaaaaagggacagaactccttttgagcatttcggttcgaggccaatctggggtgctatagaagccaatgccgcgaaactgccccgcaacaaaagctggcgtttcgctcctgacgcgatggacaaattcaagaccgagagccgcgacttcctcgatcggcagctaaacgagacccgtcatctttcccgcgtcgccaaggcctatcttgaaactgtcagcccgcaggtgtgggttgtcactggaagcctcaccgctatgttgcgcggcaaatgggggcttaactcaattcttgatggtggcaaccgcaaaaaccgagacgatcaccgccaccatgccattgacgccttcaccatcggttgcatctcgcgcagcctgctggcggcagtcgcaaggagttcggcttcggccgaaggcctcgattctgaccgcgtactggctgacctgcctgaaccgtttgataactatcgagatcctttgcgcgaattgctgcgcacaatggtggtgtctcacaagcccgaccattccaaggacggtgaactgcacgaggagacagcttatggcattgtgagcagcaagaaagagcgcgcaataggcaatctcgtttatcgcaagacgcttggagggctcaccgacaaggaaatagagagggtgcgcgatccgcaactccgcagggaattgcaaagtgtccgagatggcttggccgacgctggcaagaaacctgatgccaaggccctcagcgccgctctcatcgcctgggccaccacacaagccgaagcggaagaagtgcgcactggtcggccgcgtaaccctgtccgtcatgtccgtctgctcaagccagaagcttcctgcgtagaaattataaaccgagaaactgacaaaccctacaaagcgctggtaccgggtcagaactggtgcatggacatcgtctcggtgcgtgacggtaacgggtcttttgagtggaagggcttcgccgccacctatttcgaagtgaaccgcaagggttggcgcccgcaatgggaacgcgacaagatcggcggtaagctggtcatgcgcttgcacaagggcgatctggtggaaatcgatgacagggacggtgtacgcagggtgaaaagagttgtgcggctggctccgtccaacaaccttgtctacttggctggccacaacgaaggcggcgacctgcagaagcggcacgatgatgcagatgacccattcagatgggactttgccaacattggtggcatggcagcccggaatgcccgcaaggtcaagatcaacgaaatcggcatttgagtccgtacacagatcaattggcatgatttctgcttaaccggcttgactttgaacttctgctccatttctggacgggaaacatgtcaatgctgcgccggattgtggaaatcaccggggaaggaaagcgcctgtcgttagatcggggcttcctcacgatctccaatgccgaaggccatttgggttcagtcccacttgatgacattgaagccgtcatcgcggcatcgccttccgtcagctactcgggacagttgattgatgcgttggcaaaccgtggagcgccactggtgatttgcggcaactattacaggccaagcgtctggatgctgccggtcaatggccaccacgcccaaggagagcgtatggaggcacaggccgcttgttcccaagcactacgcaagcgcctttggtcggacctggttactgccaagctcgaggcccaagcccaggcgctagcccatgcaggtcgcaccttttcgccattgcgtttcatgcagcgcgagatacgcgcgggagaccctggcaatgtcgaagcccgtgccgcccagttctatttccccgaactctttggagctgatttccgccgcaaccgcgtgcttgagggggctaattctcttctgaattatggctacactgttctgcgtgccgccacggcgcgcgccattgtggcagcagggctgcacccctcgtttggcattcttcacaagagccgaggtgatgcctttcgccttgccgatgatctgatggaacccttccgccccacggttgatctcgaagtccttgacttgctggccgtcgggaagcagtcgctagaaacggacgtaaagcgtcggctggcgggcttgttgcagcttgattttcagacgccggaaggacgtacaccgctttccagttgtctgacacgcctttcatcatcattggcccaaatctacacgggcgaacgcaatgcgctgcaattgccatcgcctctcgtccgtttgccggacgacttgggtcaagcctcagaatgagcagtctttccggttatcgcatcatgtgggtgatggttgtttttgatcttccggtgttgaccaagttggaacgtaagagggcaagcaggttccgcatggacttacttgatgagggcttcagtatgatgcagctttcggtctatctgcgcttcacggctgggaaagagcaagccttggccctcaccgagcgcgttggacgcaaagttccgagggatggaaaagttgatgtcctgttcttcacggataagcagtatgagaacatctattcgtttcgcggcaagcggaacgaaccaaaacctgtcaagccagaccagttggcgctgttttgattcgccccccacttcggcagcagatgtggacaagttgtggataacaccggttccgacaagctcaaatgagcaaaaaagcccctgttttcaggggctttttcaaaggttaggttagcattgagaacggtgcggtccaaccgcaactcccgtacgcggcggtggcgcgctgccggtaggttagcattgagaacggtgcggtccaaccgcaacttatggatcgtgcgatttgctccaaaacaaaggttagcattgagaacggtgcggtccaaccgcaacaggcatggcccgcaaggagcgcccctcttcaggttagcattgagaacggtgcggtccaaccgcaacaattcgcgcgcccgcaaatcacgcctgataaggttagcattgagaacggtgcggtccaaccgcaactaggatcggacaatgtgttggtcatggctcaggttagcattgagaacggtgcggtccaaccgcaactcctggctgttccaggtcgggtttttctgggaggttagcattgagaacggtgcggtccaaccgcaacagagattgagacgggggacattctgatgcgaggttagcattgagaacggtgcggtccaaccgcaacgtatgtggcaccatattacaatcaggccaaaggttagcattgagaacggtgcggtccaaccgcaacttcacgcggcgtttcgttgtggtttcgaccgaggttagcattgagaacggtgcggtccaaccgcaactcgcgtatccgtcgccatatcaatgccgataggttagcattgagaacggtgcggtccaaccgcaaccacaggtcaattcttctgg

SEQ ID NO: 2609 - DNA, 17658 bp, synthetic construct
  misc_feature 1..17658: note = Synthetic
  source 1..17658: mol_type = other DNA
acctcgatcaacccgaaccgcggggcggtcccgaggtgccactcgaagttgtcgatcaaggaccagtggaaatacccgcgcacgggcaccccctcgtcgagcaaccgtgcgatgcggatgaggtgggccaccaggtaggtggtcctgaagacctcgtcgtgcgtcgcgatgccgttctccgtgaccatgaggccccacccatagttcgcgtacgtctccttgaggacccggtagagtccgtccggacggaccttgatgcccatcaggtccgaactcttctccttgctcaggaaaccgagtttgaggccggtgaattgggtgaccgcaagttcgagcagatcccggaaacgcaacgaggtgtaataattgataccgagcacatccatacggttggtgatggtggcggcggggagggccacctcttccggactaagtccgatgttaccgaagatgtcgaccttgccgctcttcagcgtccgcaggaggtcgttgttgaagcggtccatcatcgtgccgaaggccgggaaggcccgaaacgtctcggcgttgagggctacgtactgatgcgcgaggccgaccgaggccgccacgccgtcgccatcggcatcgacgagatccttggccttgatgaggtcataggcgcgaatatggcagagcaggagggtatagagtgagcgcacgaacatcttgccctgcggtgaagaggcgatgagttgttcgaggctcttgttgcgcagcagcatccacagcgcacgggcgacctcgccgggcggcagggcgaccccgggagggaaattgcccgtgagatagccgttcatcgagaggatcgtcggttcgttgagggtccagtaatgatcgaccagatcgccgaaacgcgccacgaccaactcgacgaactcgaggaattgtttcacggtctctacggtctggaaatggcccttgccggggtccttgaagttcatcagccagatcggcgtggtgaagtgatgcaaggtcaggtagggagtaaggccttgctcgcgcatggccaggatcatggtgcgatagtgggcgatcatggcttcgtcgatgcggtcgcgttcaggctcgatcttggaccattcgatggaaaaccggtaggcgttggtgttgatctggcttgccaaggcgaaatcttcccggaagcgcgtgaaatgatcggtcgccttaccgttcttctgcttgccgtggattttacccagggcttcccaggccgcccagtcggaatggagattgcccccctcgacctggtaggcagcggtcgaggtgccccactggaaaccgggagggaaatcgtattcggggggctccgcggccctggcaaggaaggggatggccgtacaggcgagcagcgcgaggagggaccatcggctcatcgggggtctccgaactccatgaatgcgtcgcctctgtaccacggaatccctcaaaaatcaaccccacccacacccaggaaccaccttgctcctgacttccctgtatttcttcagtcttggggtacaattcaggctgttcgtcaccgcattggggtggcgccgacgggggtcccccgccacggtgggtgcatggatgcacacctccaagtggtgcgcaggatgccgcaccatcgggcgcaagcatgagcatggtgggggcggccgcaaggatgcggacctccagcgctgcgcaggatgcagcggcgtcggtgtgtgaggcgacatgaccccgtacccaacctaagactgaagcgttacgacttccctcgactctcctcttgacaacccccggccgttctcggtagagggaacccgcgcctgagtgatggaattggtagacgtgctggactcaaaatccagtgggggcaaccccgtgtcggttcgactccgacctcaggcatgacgagccaacgagagcgcacactccgccgagcgcggatcaggcagggctaggccatgccggtgtgcgctctcggcttttctccaaccctctaccttgatctcggcccatgaacatgagttctcgagccgtgcccgcttacgacctccgcctcctccgcggcgtcgcgaccctcggggtccttttcatccacagcaccggaggccgttgcttcgactacgccaacgtcgccgagtacgtcctccgggtcctcaatttcttcccgcgcttcagtctacctctcttcgtcctcatctccggctactcgttggcctcggcctatgggacgagggggaaccttggccgcttttaccagcgccgagcccaggccattctcccgccgtatctggccttctcttccttcgccttgctcttcaaatattcctgcgtatggaggggaactcctcgcgctgctgcagaattctctccctcgagcctactcaacacgctgctcaacggttcagccttctaccatctctggttcctcagcaccttggtggtgctctatgcgatgttccccctgttccgacacctcctctcccgctgttcgggtctagccgcgggccagagactactcctggtctggctggctctccaggtcgcctggagtttcctccaggccgcgttgggcgaaccaccaatcctcggcaacgttgtccctcatatactcaacgtcttgatcatccagggactctacttctatgccggcatgcatctcgccgtccaccaagggtattatcgtcggctcgcgaccgaggtctctccgtggctcttcctctcgctcctcacggcaatgccgttcatctatatgacctcttgtccggaacccggtttcgatacccctctgcgcaccctccaactcgcctgcggcgcgatgctccttctgcgatggctccccatcctcgaaagaccgggacgcttcaataccttcctcgactactgtgcagccaactccttcgctctctacctggtccaccccctggtcctcgacggtttcgtcaggctcttggccttccgaggcctcaacgcccataccccggcgctcgtgctgccaaccctcctgacaaccttggggttaacgctcctcgcggtagcaatccttcgcacgttaccgggccgccgctatctcatcggccacgaccgttgaacgagctccttcagcggtgcgcacgcgcatagcactgaggacagcgatgcccacagacgtggcccaggggtccatgctcgaccgagcggccaacatccaaggccctcgtgcaaccacagcctttgttccggcgttggcctttgtccggactctcgctggccccaggaccgaagagggcgttgagcctggctccgtcgacgcaagcgccggccgagcatccttcccgatcggcgagcaggggttcagcgcaggtcctgaccctcaaacccattgatgctgcaagcccctggaaacgctggatgaccctctcatagacaggccgaccctcagggctgccggggtttgcgaaaaccaaacctctcgccttcgctcgcacctcggcccggggataggggtcatacaagctggtcgtcacctcgggaagccccagcgccgcaatggcggcgaagatccgttcgagagcggccgccggagcattgtcccgccaatccgtctctccgagcctccggtacacgatcagtggatccactgccacggtgaccgctccagcggttgccccctgtaccaggtcctcgagcgtgcggagttggaggtcgaccggcggggcgaagggtttgcaccagggatcgtcgggcatgatggtacagcggtaccaacagcgataccccagtcgctccacctcccgacgtctggggagccaggcggaaaaattctgactccacaacccgaggctgtggatgtctgccggtccgaaacggagttccctgagaggttggcgcggaggttggggatagaaccttcccctgcgcagaccctcgacaagctcgtcgagatggaaggctggcaggtcgctcctcctgctggccacgaggacaaggcgcccccccccttggcgtgcggcgacctccgaggcgtgcaagacctcggtagggacgggggttcgacctcccgcctcaagccgagaattcgttccgttggcttcgtccatgctgcacctctgatcgtgagaagagggcatcctgcgttctgtcccacaatgcttgcccccgctggacccgatcagtatactcggccgtatggtatcgagaccattttccatgaagcgccccttcctctttctcgccgtcggcctcctcctcgccggttgccagggtactcaccatgccccgaccgggccgggtctcgcgttccacgacaaggccttgctcatggcagtgctctggcaccagacctcggccgaataccgggccttgtgctaccaagccttcaacattgccagggaacgcctggaggaagcgctggcgcatccgtccgaccgccctcgcgccgtgatcatcgacgtggacgagaccgtgctcgataatgctctctacgacgggtatctggtcctcaaccccgaacagtaccccgaagatttctaccgttggctccggaacggccctcctcggttgatccccggcgccgccgacttcctcgcagcggtggatcgggccggcgtggctattttttacctgaccaaccgccgcaccgtcaccgcggaggacacccttcggcagttgtcggtattgggcctgccgcagctcggccccgaccgtctcctcctccgcaccggtcaggggcgcagcaaggaaacccgccgcgcctcggtcggagcaaccaacgacatcgtgctgtttgtgggcgatgatctcaacgatttttccgatcatttccagggggattcgatcgaggcccgcaaatccgccgtcgacgagcaccgatccgatttcggccgacgcttcgtgcttttaccaaacgccgtgggagggagttgggaaaaagtcctctatcacgacaacgacctccaccttgtcgagctgaaagatcatttccgaaaacactacctcgaggccttctcccctgctccgaacgctcccgaatgacacgaggcggattcgcctttccgaaacacgccgttcggcttctcgaatcctgcgttggtacaactctgactggttctattttcgctatgttattcaacggctaaactgaataaccagcgacggcacgagccctgctaacgaggttcctcagcgacctcgaacctgcaagagaggccgagaaggtcgcgtgaaccactcgctcgaggagggaccatgctcgccgtttccagcttgcttctgttcaccctgacgactgccctgcccacggttcccaaccgggatccgctgtacgacgacatcataccggctccgaccgccatgatcctcgaggatccgctcctgttgcaacccgaacccgccggcaccgtgctcttcgaccaggacctgctccagccctgacgttcgatcgggagaacccgcccggccgttgtggctgggtgcatgcctacagtcttgggtggttcgaggggtcctgtcacctctcacccccaccatgctcatccttgcgcgtggcgggggacccccgtcggtgccaccccaacatggtgacgaacaacatgcaatcccccccccaagacttgcagggttacgggtgggttctcttccaacttgcggttcggtcctccacctggcaccatggtgcaacgagtggccccctgagaggcagaccatgcacgatgaatcttccttcgacgacgagaacgagagcggccaggaccacgaagaacccatgctcttcctcggccaacgcgacctccacgacgcccatcgcatccaggccgacctggccgaacgcggggtgacggtcgacctggtccacgagggtgaacactgctcgcgcggctgtaagatcacggtcgaggtctggtttgcggagagcggcctccccattgtgcgagactacctcggggaagagtggcaacgcgatgccggagacctcgcgtacgatccgacgctcgcggcggcggtcttcgatccggacaaaccggagacgatctgccccgcctgcggtacgacctttgccacgaccttgtccgaatgccccgagtgcgggctcggcttcggcgatccctgaaccaggacgacccgatcacgagggagcgaggaccagccgcaccggacaatgatccgaccccccgacctcgctcaggatggaggcttcggcaacccggggtttcaagtcgccggatacgcagcagtagtcaattctccaaccgatgttcctccgccgcgctccgccgcgataactccaccaagtatagtgcccgccctcggcggaaaagagacggaaggtgtcgaggaaacctgcaccgaggatcgaggagaaaccggcccgctcttcatcggtgaagcccggattgccccggttgtcctcgggtctggctaggtcccgttcctcgtgcgccacgttcaggtctccgcagaacaccacacctttggtcgcacgaaggtcctggaggtaggccaagaaaccctcgtcccaggcctgtcggtagcggagccgggtcaggccgtgccgggcgttgggcgtatagaccgtgaccaggtagaagctcgggtattcgcaggtaaggaccctgccctctgcctcgtccttgccgaagggcatgtcccggaccacccgaaggggaggcacccgggtcaacaccagggttccagaatagcccggtttggcggcggggtgccacaggtggtcgtagcccggcaagacctcaccgacctgcgtcggcagggctcggacttcttgcaagcaaaaggcgtcggcgccctcagcatgggcgaaatcccgaaagcccttcccaaggatagatctcaacccattgacattccaagagactatccgcaaaggctcgcaggcgcccatgcccgctaaccgaccacggtgcgcatccaaccataccggtcttccagatcaccgtactggataccctggagggtcttgatcaacccggtgcagatcggaccggccttgtccgtgctgccgaaacggaacacccgatccccatgaaccagggtgtggaccggcgtgatcaccgctgctgtgccgaccgcaccgacctcgacgaagcgggcgaggtcctcgagctcgacgtcaccaaccatgacctccctgccctgagctcgggccaggacctgcaaacttgcgttggtcacgctggcgaggatgcactcaggagcatgaggagtgtaatacataccggcggcatcgaaggcgatgaagttcgaggtcccgaactcgttgatgaggtggcgtttcgtggggtgggtatagaggcagagggaatacccctcgctgcgggcgcgcaacaaggggaggagacttgcggcatagttaccgccggccttggcgctgcccgtgccgagggccgccgcccggtcgtagtcatcgacaatcaagcccttcaccggagcgaagccgtgctggtagtaaggtccgaccggggtgacgaggaccaggaagcgatagctcagggaaggactgaccccaatgatcgggtcggtaccgagcagcagcggccggacgtagagggcggccccggtgccatagggcggcacataatcgaggttcttcctgatcgccagatcgcaggcctcgagaaacagttcttcgggcggagcctgcatgcacaggcgcatggccgaatactgcatgcggcgtgcgttctgttcgggccgaaacaagacgaccttccccgctttggtcctgaaggccttgagtccttcgaagatttcctgtccgtagtgcagacacgtcgccgccacggggacagtacaggtgggttcggctacggtacagaggggaccccaggcccccttggtgaattcggtctggatataacaattggtcggcaggtaggcgaacggcaggtttccccaatcgagttgcatgacccctccttcccggctctcgtacacacagtcccacggggcaccctagcatgtctggaaaaaattgaaagcctttcggggaaggtaaatacatgttgaatttcattgcggttacaacagcgacagggcgctaggaggaacctccccccggcaagcctcacggagcctcgggagggatactcttgctgacctcttcgctaattgcaagagcactgcagaacgtggagagtagccgaggccaggtacccagtcccggctctcgccacctcactacgcggggatcgaatgtgatgatcgcatcgacacctcggaggcttggttgggcctgggcgagatctagggttagagatggaatcgaggccaatcggctgctcggtccacccgctcacgaatggcgaatggatcatctcatgctccgtacaagtcgtttacaacctgacctggagtattctcctctctgaaacctctcacgcgatctaccccatcgacggtgtcgtgacggtggccgcgccggggggggcctgggtagaatacaagatcgaaaccaaaattttacgtctcatcgatgtcgaaaataccgccacctcttggaaaagctgtcagtaagacgggaccggcactacttctcatttcgaaatgcagttgttaccactacggtgaactcaagaacgaaggagggtgaaaatgcccaacggtcgccccggcatgaatgggctcttgtatgtacagtggcggctgctcgagttgctcgcgaccaagggccgcagctacagcatcgccgagctggccactgtcctggccgattgccgcggtggcgaggccctcgccgcacactattttcttccatgaggacaccagatgtccctcagcgggggtagggtggttgacggaagaggggtcgaggtgcatcgtatcatcaatcttgccgtttctttcaagaggctagtacatatcgccgatgccgttgcctctcgcgaaaagctcacccacggtatcggcgcgaccaaagctttcggttatggcgtgatgatcgatcgacggattctagggaggcggtgacatgcccaacgacctcatcgtcttcaaaggcaaagaaatccggcgaacgctgcacaacaacgaatggtggttttcggttgccgatgttgtggtggtactgaccgacagtatcgacccacggcaatacatcaagaaaatgcgccaacgggatccggaactcgatacctactggggtacaatctgtaccccacttgaactgatcgcactcgatgggaagaagcggaaaaccaactgcgccaacaccgagggaatcttccgtatcatccaatccatcccctcgcccaaggccgagcccttcaagcgttggttggccaaggttggctacgagcgggtccaggagatcgaggaccccgagctggctacggcgcgaaccaaagaaatctaccgcgccaagggctactccgaggtgtggatcgagaaacgactgcgtggtatcgccgtgcgggccgagctgaccgacgagtggaagaagcgtggggttcagggccagcccgaatacgccatcctgactgccgagatctcgaaggctgccttcggcctcaccccgttcgagtacaaggaaatcaaggggctcgtgcgcgagaacctgcgcgaccacatgaccgaccttgaactcatcttctccatgctcggcgaggctgccaccaccgagatcgcgcggaaacgggatgcccaggggttcgaccagaacaaagtagcagcccacaagggcggtaccatcgccggggaagcgcgaaagaacctggaaaccgaggccggtcgatcgatcgtgagcgccgagaactatctcgacgaacccgagggacaaaagagattgaaaccataacaacatccccctcgatcaacccgcgccacctcgaccgggagctggagcgcggctgaagaaggccgcgcgatcatctcgtaaaaaaaatcgcacccacggacaccggatgtccctcaaggggggtagggggatcagaagaatcatctcactgtcaacgaggttgtcatcgccacatgcatgaagtactaccgatccaaccaacactctgaaggctgagccatcatcatgaccgagacaagcgtgctcaacgaacgttttcatcatggtctcgttatagggctcgatgtcggaaccgccgggctaggctgggcagtgcgccggggtcctgatctcctcgacctcggtgtgctggtagtgccagagaaagtgggaaatctcgaagagcggcgtaccctgcgtcgtatgcgcaggaccatccgcagccgacgccagaggatgcaacaactcagggcgatgcttaccgaggtcggtttgccaagtcccggggcaaacgcggaactagatagcccagcggtcttgcgccttcaggccttgaacggcgaaccattgcgccccgaagagctgcacgccgccctgttccacctctggaagcaccggggctggctcgacgcatggtggaagaagaagacagtggaacggacggcggatgacgagcctgaactgacggccgagcagaagacggctcaaaaagaggccaaggagaccgctgcgcggatcgctgggctcctagccgccatgaaggaccgggggtgccgtttcgcctgccactacctcgccctgaaggaaggccgctgggatcgcaccatggggtgcttgccacggccgaagcctggccaggccattgcgccggaggggcataagaaccttatcttccctcgcgagttgctccgcgaggagtttctggccatcgtcgaagcccagcgtgaaaggtggcccaccctctacgtagcccgcgaacgcatcttgtacggcgcgtggggagaggacagtcaccaccctgcaccggaagcggcgggtcgacaacatcgcctccacggcggggtctggcaccagcgacaagcccgcttcgacaaccgcaagccggggaagtgcgtggcctgtggggtgaacaacgtctgccgggccgatgcccccgagttcgccgaggcccagcgggcgattgtgctcgggaattacagggtgttctccgccgtgcagggtaaagcggtaccggtgggccaggctgcacttcccgagctggccgacattctcgccaagcaccaagccggattgaaagagttgcgcgcgctggccaagaccggtgggtacacaccactcgaaccgggtatcaagaagaaggatcaggctcgcgacctcttggtacagcaatgggcagaccggaacgggtacgaactcctgccagggcagcaactcactgccaggaaactgagcgatggtcgctgtgctttctgtcgcccctgtttgcgcgctgtgcggtacgagtacgagcggacggggaccatccgcaccttccaaccgctgctccgtcggccaggagaatcgctcgccagcgcgcgcgcacggtacgtgcgagagctgcgcaaccctctggtccgccagcgggtcgaggcgctggaccggttgctcgatcggctcgaacgggaccatggttcgccagcggtgatcgtggtcgaggcagtgcgttcgctggggctgggcaagaaagcaaacgacgacttgaaaaagaaacaagccactcagcgcgaggaacgcgaggcagccagacaggaggccgcagagcatcacgcggcaggcagccaggccgtgctccgtttccgcttggccaaagaggtagggaaagtctgcccctactgccaccagccctttcatgccgatcttgccgacgccgagatcgaacacatcctgccgcgggccctcggggggagcgaccagcaggtcaacctcaccgtcgcccacacccactgcaaccacgagaagcacgatcagctaccccatgctgcctggggcgaggccgatcgttggccgtgcctcgaacgcttcgcccgtgagcatttcaagggcctcaagctccagttgttccttcaccagggcaacccggaggaggcgctcgcgctgctcgcaccgcctgctgacctgacccaaaccgcctatatcgcccgtgccctccgcggcttatgcctgctccgccaaaactggctcaccccggaaggccgcgaccccagcgaccagcccggtggacccggacagttcttccaactcaccaacggctatctcaccgccggcatcagacgttgctggggacttgatgaactactgccctctgctctggatgacgaaggcggcaagaaccgccacgacctgcgccatcatgccctcgatgccgcggtcatcgcctgtaccttgccctgggctgcccatcaacctctctcgcgggggggatggcgggaagcaccacccttcggttcggcacgtcgcgagcagtggcgcacccccttcgaccatcttcggtcccagatcagagcacgcgtcccggatatcgtccccacgcagaaggtggggacttcggcgaagcagaagatgatgaacaccacggcctacggaccgcggccgcagcgcgaccgcaaaggcaaggaaactacggtactggtgacgcgcgtcccgttagtccagttgaaagagaaacagctcaatgacatctatccccaggtcctaatgcgctacatcgccgcggcattgtccgaatttcgccgcacccatggcgacgagcatgcatttcaacagaaagcccccaacacggggaaactcagcccggctttcgttgcaacgctacataatccaggaactggtcgtcccattcacaaggtccacgtgttgggtaaggaccctgctgcctgtagagaggtgcgtccgaatgtcttcgtcgagtacaccgatgctactgcgtatctggtctatcctgatccaaagaagggaaggacctgggcagtctacctggtgaaaccttgggaaaagctcggacaactgcgtgctagttttcccacgccggtttatgtctttcagaaaaagcagctcatcgagttcccaagagaagtggttgtgagcgctaccaataaagcccaagctgggaagtaccgattcatgtcatgcaataagaatgggaatgtacggctttgcccagcacacatcgtacaagggaaagaagggtttctcagcgcaggcttgccatactacggcttcgagttgcatatccgtcacttaatggaggcactcggctatggggcatcacctcctccacctgctgaagccggggttgcagctcaccctcgcccagaaccgcctcatcctcaacgacggcgcggttgacgagcacaacttcccgctcgaagacctggccgcggtgatcgcggtgagctttcagggcacgctctcactgccgctgctctctgccttggccgaacacaaggttccgctcttggtgtgcgacgccaggtatcgcccggcaagtttcacgctgccttgccaccaagccacctcaacagccaccctgcgcaggcaggtgaatctcaatgcaacctggaagacacgggtttttcgcctgttgattcaggccaagcttcgcgctcaggcccgctgtttactggttttagaagaggaccctggtttcctccccgcgttggccgaacggcttgcggacgagaaggctcgggccgccgagtcacggggcgcccgctattattggccgcgctacctcgccgcctgcgaaaccgccgaacgccgtcgcaccccgggttgcggcagtggcgcaaacggcagattggattacggctatgcggtgctgcgtgccctgattctgcgctctctttatgtacacgggcttatcccagcccttggagtgggccatgcggctaaagccggaagttttgccctggccgacgacctgatcgagccgctgcggccgatgatcgatcttgcccagtggcaattctgccgtcagcaggcccccgtggaagatgaagccgcggcgttccgagcctgggcgcgggctgccgctgcgtgttgtgtacaaaaagtcctatcgaagcgcaaggtcaccgacctgctccacggcgtcgatcgcatggtccagagcttctgccgggcgatgggcgaacgcttgcccagttcgctcgaactacccgagttccttccccagaccgcgccgctccttccggcttcgtctgtgcccaaagcctcacgaactgcacggcgcaggtgatgccgtgccgcgtccgcacacctacccttggcgttccgagctacgcatggcttggctggtggtgatgttcgacctgccggtcgggaccaaggaagaacggcgcatcgccacacgcttccgcaaggacctcgaacgagacggcttcaacaggatccagtacagcgtctatgctcgggcctgccccagtctggctaaggtcgaaacccatcttcgccggctccgaccaccacaggagggcgaggtgcgcgcgctggtgctgaccgatctacaatggtcggctatgcgggtcttcttcggcggcagagccaaggaaccggaacgacgtcccgaacaactgcagttttttttctaggtgtcaggggagagaaagaagtgacctcgcgacccccgggtcctgccgagcaggagagcctggggttggtcagcttatgtgggaggctctcgaaatttcttgcgaattcctttagtgcctaaaacgcaccaaaggaattcacatttcaaaaggttgaaggaatgctggcttcaaagcatttgattcgagagcagtcccaaactccggcccgatagtcctgctctgctcgctgggcttcaaagcatttgattcgagagcagtcccaaacccaacggcacaaacatgctcgtggagagcgggcttcaaagcatttgattcgagagcagtcccaaacgagcaaggtcgttgatagaacaaacaaggtcggcttcaaagcatttgattcgagagcagtcccaaacgagtgtcccactcgataaactcgacattagggcttcaaagcatttgattcgagagcagtcccaaaccgtgcgttgtctacgccgaggacacgttcgcggcttcaaagcatttgattcgagagcagtcccaaacatgtcgaggagcacaacactgccgacctctggcttcaaagcatttgattcgagagcagtcccaaactcatccgatgccgtaccgcgacggtccccgggcttcaaagcatttgattcgagagcagtcccaaacccgatgggaagctgcacaaggtcgtgggttggcttcaaagcatttgattcgagagcagtcccaaacgtgccgctgatcacggccgttacataggagggcttcaaagcatttgattcgagagcagtcccaaacccactcgctccccacccgttgttgcctccaggcttcaaagcatttgattcgagagcagtcccaaacgtaatagaccccgtccgtagccgatgcaacggcttcaaagcatttgattcgagagcagtcccaaacgggatggtggtggtacattaccgcatccggggcttcaaagcatttgattcgagagcagtcccaaaccgaactgcaacggcgccttcgagagaccgtggcttcaaagcatttgattcgagagcagtcccaaacagagcggcatcactatagtagtgattggctggcttcaaagcatttgattcgagagcagtcccaaaccccgatatcgacggtatgaccgtgccatcgaggcttcaaagcatttgattcgagagcagtcccaaaccaactgggggcttggaaagaaagaagcctgggcttcaaagcatttgattcgagagcagtcccaaacgatatttcaaggtcctcatgatccagctgcggcttcaaagcatttgattcgagagcagtcccaaacacatgactcaggtgactcagatgttttaggggcttcaaagcatttgattcgagagcagtcccaaactcacagtttcgcagggtgagcaatgcatcgggcttcaaagcatttgattcgagagcagtcccaaactgcacgctcaactctgtatcacactggcttacccccgatccttgatgcaccccggttcagggacagcctcgttccggttcacttgtcaaagaactactgaatgcttcatcgttgcttgtttctagctgcctgtcaacgaatgaatcccacgtgaatggatcccaccttagccctcgtcattcctaattcagcagtcagaagaatcaccccctgtggtcattcaacatcttgtatgtatgtcatccttatgaaacacaaggggtgctgcctggatccctcctgcaactttacaaccgagcatcgggcgcacggccgtgcgcccctacgatactctcttccctggcgcaattggatttcggttcaccgattcgcctcttcgaacgatcgttgatcttgaatgtgtatgtattcgtttccattgatgatcaccggtggtgcggcggatgcttggggatacatccgtgagcttaagtaccaacctccgcgagcgccgtgaccagcaactctacagtagcacccctggtggtaaccaacctcggttctggtcttttccatgcgccaatgtcaacgtataggttgacatttcggctatcatgaccttaaccttggtggtgttcccaggcttgaggactgaagaacagaccgtctggaagctgcgcattgtacagcgcgatgggcgggatcatgtgcaggaagaactcaaccggtggcgcacagaagcgaagggcgactatcgcaagattctcaaggtggcaagggtggtagcagggtccgacatggtgcgtgaccccaaaaaggtcaagcggggggaaggcgagggcctgggtgacatctatgaaatacgcgccgacaagggacacgcgcgggtattcttcttctatgaccacgttgacggcacggccgttgcggtctgcacgaacacgtactggaagaccaaggcgagcaagaccgagcaagagaatgccttccgcagggctgcccagttgcgggcgctttggataaagatgtcgaggagctgaccatgagcaaccgcgagaaagatgctactagttccctgaaccggtcctgggccattcctcacgaattggaacaggaagccgaagaactctttgccgacgccaccgcgcccagcccggaggcccaggcggagctgacctgcgccgggcgcgagcttgcgcaagacccagcctttcaagctgaactggcccaagccttcttcgtcgaagacttgctgcgcgcccaggaacgcgcgggtgtgagcctggcgcagctcgctgccaaggtcggcgtctcccggcagtacatgagccgcatcgtcaacgaggaccgcgcgaccaacttcaccatcgaaagcatggccaagatcagcgcggccttgggttgcacgctagccgtgcgcatgcttctaccgggggagagcctgcacctcaaggctacgtgggagtatgaacaggaaggcacaatgccaatacctgtgttggtcccacaacaggcggccaaggcaattgtcaaccccggcgccgccttcactgataacaagtgagacccactcctaagacccactcctcgttggacttagcttctgcagcgatttttgcagcactccgacccccactcactccataccgaaaagcaggcattgaggtcataaggatagaaatgcagaccggtgacggtcaaccagagcgaagaccaaagcaccccggaggtgaaatcaagaaatgaaataatggtgttgtacatgtgcagctatggaattcgccgctctccggccctggcgtggctggattcctcgaccaagctgcgagaatcaccct

SEQ ID NO: 2610 - DNA, 25241 bp, synthetic construct
  misc_feature 1..25241: note = Synthetic
  source 1..25241: mol_type = other DNA
aatgatgcaaagcctgcatagtaaagcgaaatcgtaaactggatgtcattgggttctataccgtaataacccgcagcaacgtcttcgttcgccattggtaagaaaaacataatcatgttgggtagcagcaatgtgaaaagtatcatttttgccagccagttcggaacccattctttgaataaagtcatcttttatgttggattaatgatgagggatggtgacagtcacattcatcccggaaagtattttggaacgccattctttgctgaggttaatgatttctatcttaacaggaatacgctggactattttcacaaagttcccagtagcgttatccggaggaagtaaagaaaaactagaaccagttgccggagagaaagccaatatctttccttcgaatttctcatcaggataagcatctaccgtgatagaaaccttgtcaccaattccaaaatgtgaaatctgagtttctttaaaattggccataatccatttagggttttcatcgttcacaatgtagcaaaggtgttcttcgtcgtcaatcatttgtcctttttctattttacgcttacctaatcgcccgttatatggcgcagtaattacggtataactcacgtccagatttttacgttgttttacttcattcaatcgtgatttttctgcgccaatgatggctttttcctgattaaggtcttccgctttttcttttgcaactctgtaatgttgttctgcttgtgataagtcacttttatagatattaaggctggcttctatctgttccagtttttgtgctgtggcagatttttctttgtacagttgcttgtatctttcatattccagattttctttccacacttttactttggccgcttctatggcttggtaagcttcttgagcttctgcttccaaggtttgtttttgttggttcaagacttgggtattggcattttgtttttggagttctgcacctacttggttggcatccagcttatattctcggctatcgatgatgaataatgtgtcgcctgcttttacgttgtcataatcagtaaaccgtacttctcttacataaccactcactcttgcaatcacaggattgatatattccaccacctgagcatcatttgtggtttcattatgtaagaaataatagatagagatggaggcttttatcataacaaaaagcacaaaaatccacgcgatagcagaggtgaatttgactagggttttacgatgagatactttcattttatagggttccggtttcgtattttagagagtagtagcttttcaggatgttcattttggattgttcaagttcaaattgggcttgcacttgtaagaggttggcatccaaaaggtctgtgataagcgcggtctggttgaaataagcgtttttcaaaatcctcgcattttcattagcatattgcagattttgttcaaagactttttcgtgttttagggcttcgtcgtattcgtaataagctttgtagattcgggttcggatgttatcattggtgaattgatgatgcagttgggcagaactcaattctattttagcttcttgcacttgatgcttgttgtggtagatactgctgatgtcataagacgcttgcagacctacgagccccaaactgtaccaattggggttgtagttatagaggaacacttgcggattggcaaattggaaagaacctatcagacctattttaggatagtaattgcctttgtctagttttaatttggtttctgccacttgggtgtgttgttcagataattctgcatcgtagcctttttccagagctatttcgatgtagtcatctactgataaagctgttgtttcttcttcaataggcgctatttctggttcaatgatggttttgtcatcttcaccggttaagacattgatctgttgttgcaaaacgatgatgctattctcaatctcggtgagggtcatttttcttttactaagttccagctcggtgcgcagaacatcactttccaggataattccggctttgtagatgttttttatttcggaaagctgatgttctttttctgcaatatcgttttgcattgtggttttccattggtattgcaaatgcaggtctataaaaagattggtggctttcagcttggtaaggctgatgagtttttctttatcggttaccgaaatatcagaaagaatcttcgccagtttgatttcattttttagtttgaaaccatcaaagagattcatatacagattggtctctgtgttgtaaagcgtgtggatgatgtcgtgctgggcaggtttgtgaagaatcccgttgacatagacaggcatattggtggcgtgtcttatagaggcagaaaagcttaatgttggaagttggttagatttagcttgtttaattttggtttcagccaattgtagtttcagttgttccaaagcaatttctttgctatgggtttcaactttgctaaagagctgaggaagcgttagttgttgttcttgggctttaagagaaagctggtatagacaggctgatagtgctagaataagcctgtattttttacaaaacattttgcgtttaattttaaagtgcaaaactaaaggcttttatgtgatgtaattttatacaaaatagactaatttttgttgattcctgccatttttatttacctttgagtatgaaattattggatatccttcaagagatagatgactcacccaaagatgtttatctggtgcacgagcggtttgagaggcattatgatatgcatacccacaagcgtgaccagttgagttttgtagaaggcggtgtggcgtatgtcacgatagagaatgagtatctagtggttccggcaatgcactttttatggattcctgcaggggtgcctcataagctggatgtgtcgcatcacgccactcagttgcattctttttatttcaaaagttcagagaaggccttttacaaagatttgggaatctatcccgccaatcgactcattacagaactgattaatttttcccaacgctggtctcatcagtttgtggactataatgagccttacgctgctgcacttttttctttgtatgatgttcttcctttgatgacagagcagcaaatcaagctacagcttcctacttccgaacatcccaagatagagcaggtcttgcagtatatccatcagaacttccatacgccattgaccttgagtgagatgaccgatcagtttcatatgagtgagcggagtttttgcagattattcaaaaaagaacttcatatttcttttattcagtatctcaagacatatcggattatccagtcgattagttttttacagaagcggaaagattactctatcgagcagattgccaatgcaacgggttacgaatctctcgcggctttcagcaatgctttttacgaatatacagggatgcgaccgtcacagatgcggaagatgattacttaatcaaaattatttaattaatgattaaaaccagatagaccttagtttcaaagctttcctttccgcttcaaaaccttacctcgcggttcattaccttcatacagtgcaatctcagaatgcagaaactgagcagctaaggcagagtcttgtacttttacagaacttctttctatcatttcagattcgaatgcggttaacacactttctctgatgcctttttctcgccagttggatggtggtctgcaggctttgaaaatggtacgagccagagataaggcatccagtagagcctgattggcaccttgtcctttgaaagggctcattgggtgggcagcatcaccaattaaggttgcttttcccgagttttccaaccattctgacctcagcaatgcacggtcataaacgggatagcccgagatttgagtttcaagggtggcggataatatctctggaatgggagaatgccattgtgtacgttggatagcttcttctttgagcgcttttttacctttggtgctcagggttttggcatcttcttctgtcattgggaaactcagttgccacattatggaatctgaatcataaggcatcatatagatacgctcattcccattagccgtctgaaataccgttgccgaatccaacaaatggctattcatattttcaagcgcgctcaaagggcaaatccctaatattacaatacaacccaagtaacgcaatggtgatcgtttttcgctaatcagtaagctacggactgcacttcggataccatctgcgcctacgatgaggtccgctttatccgtttttactttgccattgacttggaaattaaggtcaattccaccgtctttgttgtctttaaaatctaggagctgatgtccccattgtatggtagtatcactaccaagttgttggattaatgcttgtcgcagagactgtcgggcgatatggatattagttttttttggagaagttttagtgctgccttgcatccattttctcattccccattcagcgactacttttccatctgggttatggacaaggtgtcttgtagaaaccacgcctttgtccaaatcaaaaatcccaaatccctccattgctttactcgcttgttgcagagtcaacccatagccttgggaacgctcatcaaaagccttatcccgttcatacagcgtaaaaggaatcccacggtgcagacaagccacagctaatgctgtaccgccaatcccacctccaataatggcgacgtgaggataattctctttatcaggttttggaaagtctagtgaagataccagtccagaaccagcgcaagtagggcagatgtacaaagaggcttctggacggataggtggtgtgccttctccattggctttttcaaactgctccagttccagcaaataacgaagccgtagactcttcttgattctgcgcttttgtttgccgagtcccatacaatcgggacaactggtgaagctggtcattttggaaaacaaatttttggattaatgtaaaactaaaatagaatcttcaaaaatagtgaaaaccacataggcacatagaaaatcatagtatttaagctaaaacaattgaaaatagaaagttatacgagattattttctcttaatattttacaaccacaaaagtcacaaaaggtttataaggtataaagtacagtaaatctaattcccttaaaattaaaataagacaatatgataactcttttttgaacattgataaataacttgagcttgggttaagaaaatgatgcaacatcaataggaatgggctttagcccattctaatatgaaaaagaatgtaaggctttagccaaaattgaaatgatattttggctaaaccctttttttaattacaattctatacatcgggctaaagcccgacgctattgataataattttataatgattctcaataagcttaatgtaaattgttaatccgaaccaagttaaatatataaattactgcatttaaaagcttttgtgacttttgtggtagaatagattttttttattaaatactcatcataaaaagaattaatacaacatcagaaaaccatcttcaaaaatagtaaaaaccacataggcacatagaaaaaacaaaatgtttaactctcaaaagagaaaatagaactaagcaggctcctatttcatcttaaatctatacaaaactatgtgtctatgtggttaaaagagtttcaatttaaatctggagaggtactataaaacaagggaaaatagaaatccattagggactattttctctaaatgtttataaaaaacctatgtgcctatgtggttaaaaaaatgagactgcttttgtatttaataactatgtcatagaatcagaaaaccatcgtcagctgaattctctttctggcttcatccacttccgttactttgatttgcacgtgttggtggagtttcacaacctcattcacatccgagacaaaaccatctttcagttgagagatgtgtaccagtccactttctttgattcctaaatctacgaaacatccaaaagccgtaatgttattcacaatgccaggaagtaccatcccgattttgacgtctttgatggatttgacattcgggtcaaattcaaacaccttggcggcttttcttgggtctagtcctggcttttctaattccttcaaaatatccttgataccgagaattccaatatcattggtgacgtatttttctggattcaccaaggcgattttctctttattggaaatcaaatcctctgttttcaattccaaatcttttgccattttttctaccagcttatacgcttcaggatgtacagcagagttatccaaaggatttttagcgttcttgattctcacaaaagcagccgcctgttgataagctttttcgcccagtcttggtacttttttcaaatcctttctttcagagaaagcgccattttctgagcggtaagccacaatgttctcagccatcttttctccaattccggaaacatagcttaggagcgatttactggctgtattcagattaatccctacggagtttacggaacggatgactgtgttgtccaattcttctttcagtttggtctggtccacatcgtgctggtattgtccaacaccaatggatttagcatctatctttacaagctctgccaaagggtctgctaatcttcgtccgatagagacagcaccacgaacagtcacgtcataacttgggaactcatctctggcaatcttactggctgaatacaccgaagcaccggcttctgaaaccacaaaaacctgaattggtttgtcaaaggcgattttcttgataaagaactccgtttctcggctggcagttccgtttccgatggagatggcttcgatattataagcattcaccatcgagcggattttcttcatcgccattccactttcgttttggggtgcgtgggggtagatattctcgttgtgcaggaggtcgcctttttcatccagacaaactaccttgcaacctgttctgtaaccagggtcaatggccaagattcttttctctcccagaggagaggccagaagcagctgttgcagattatcagagaaaacctcaatagctttctggtctgccttttctttagcttcttgcagggcttcgttggaaagtgcaggttctaatagtcgtttgtaagaatctgtaatggcgagttctatctgtttggcagaggcgttattacttttaataatagctttgtcgatgaggtctaatgcttcatctttatctacatccacagatgcttttacaaaaccttcgttttctgcgcggagcatggctaataatctatggcttgggattctgttgagcacttcctgccattcaaaatactgactgaatttctgagctgcttcctcatcttttttagctttcaccactttggaagagatgatggcttttctctggaaaagtcttctcaggttttttcggacatagagattttcattcacccattcggcaataatgtctcttgcaccttgcaaagcttcgtcttcgttggcaacatcgttattcacatatttggaagccaagaaatctatatcgtcatttctctggctcatgatgatttttgccagcggttccagtcctttttctctggcagagtcagctttggttttcttacgttttttataaggcaggtagaagtcttctagctcctgcaggtcaaagctttgttctattttttgcttcagttcgggtgtcaaagcatgttgttcctcgatagatctcaggatgctgtctttccttttgatgatctctaggaaaagtttgttgagtttagcaatattttcaatcgctacctcatccagattgccagttttatcttttctgtatcgtgcaatgaaggggatggtacagtcttctgagagaagttgcagagttgcgtcaatacttttggtaggaagattaagttgctgttgtatgtaggcagaagttgtcatttcggtagtttgaacagcgaaaatagtgtttttgaaccgaaagtacagactgcaattactttcctttaggtcttttttctcgcagcagaaatatgaaaagtcctataaacaaaataataggtcccagtagttctaatccgaatgaaccaagaatcaatagtgtcatcataacagaaatattttggttaaaattatcacttatgaagaagttatcttatagtagaaatactgatttttaagtttttgaatcgcgttgggacatttaccaataggtcgcaccttcggcgctctttgtgattttgagaatcatgggaatagcaggactagatcttccaaaagatgtgcttggaaataaaccaatattaaaaaaatattcaggattacggaaagccgtaaaaaagtctggataatttatcttattttcgggatatattaatctaaccatactggtgagcttattttaactaaaaacataaaccccatgaaaaaccccaaaaaaaatctgtcctcttacgtagaactattttttgaaatgcttgcagaagtaattatactgcttagacaactagcggatcaaaaagtagaagccgaaaaatcctatgacagtgccgatgtcaagattcttttgaaaataagcgacagcaccttctaccgatggtgcaaacaagggaaactgcatagcaaaaaagtaggaggcaagatctatgtctccaaagcttcggtagataatctgttgaagtagagctgtagcatctgtcttttttgaaattatttgttctcacagattttgctgactgagcaggtagatttgtgttaatacttttctaaatatcgtattctcagaaattaaaaatcgggctaatccacaaaatctgcgagaaccattattcttttcatcttttacgtttttaaacaatcagttatctgagatccaagattcagccagtttcttctgattttcttcgggtatgctttaggctttattcggaaaaaacatcttttttccgaacaagacccgaaccaatgtgctacttgacccgaaggattgtagaaacaatcagtcaattgcagtcaacaatagtcaaaggcagtcaataccggtcaggggtgtacaagggatgcttttctgttatatcttcgtcctaccaaatcaataaaaacaatagagatgggaaaatttgaaaaaggaatcctaggtggattctccgggattgtaggcccggtagtaggcgccacatggcgtggtatggatatcttgcgtagccgcccaaaacgtacacatcgtgtaccaactgctgatcaactgttgcaacagcagaagttcaaattagcagtacagtttttgcaacctgtcagaaccatccaatccaagtattttggtactgggagtggggtgaagtccagggcaaatcttgccgtctcttacaccattgccgaggcaatacaagtggtagcagaggtgccagagctgattttcaacaaggtgctgattaccagaggggagcttgcaggctttcaaaatgcaacactggcaacgcaagtgggtgccgtactggaaatgagctggcaagacaacagtacgcaaggcaacgcaaaatccaatgatgcagtctctctcgtctgctactgtaaggagctgaaagcgtttgagatctttgaaggcatcgttctacgctcagatctggaagctatcgtaaccctccccaactattgcattggcaaaacaatggaggtctacgccttcctgaacaacgagaaagaaaccatggcaagcaccagtttctatcttggagaacacacggtcatctagactgtggtaaacgagccacccgagagggtggtttttttgtgcaatatagttggatacttaaaatctgggcataaaaaaaggcgagttgccccaccttgaatgttttcacaacggaataatccttattgtgaattgctttcagttacaaatctaaaactattttttgttatacaactaagaaaaagcattttgtggagattttttttcttgttaattttaaaggatttcaaaaaacaaaataattatgagcaaaaatatacttggattggacttgggaacgaactctattggatgggcgttgatagagatagatcatgaaaataaaattgttaaaatattaggtattggttctcgtattttaaccatggatgcagctgagattgcaaagtttgaaagtggagccaaaacagaaagtggagcagcaaaaagaacaactcaacgttctcctcgaaaacttaatgaaagatttttattaagaagagatagactgcattgtgttttaaatcttttaaattctcttccagaacattataaactttcgatagagtttgagaatgagaaaggtaaacgtagcggtaaattcaaaaaaggaagtgaagaaaaactagcttattacaaaaatgataacggaaagtatcagtttctatttatggacgcttactttcaaatggaaaatgattttagaaaactttatccagaactgttttataagagaaaaaatagtaatgaaactagaattccgtttgattggaccttgtattttttgcggcataaagcagttacagataaagattttgaacttacaaaagaacagttagcatggattacattaagctttaaccaaaaaagaggttatgaaaaagttataggtcaggatgaaaaagttcagaaagatggagagttatctgattcgtttattggtaaagtgaaagaagttagtaagattgataatgaagatgcctatcaaataactttggttgacaataacaatgaagatatcgagctttttaaatataaagaagaatcaaaaattttaattacagaaataggagatttaaaggaggtggaaattgtttcgaaatatgatgatgagggtacaattgattcgaaaaagacagaatatataataaatgaagttagagagttttttataaacgatgttcggaatactggcagaaaaatgaaagaaaatttcatttttgaagtggagctagaaacaggttggataaaagaacagcagagtaaatttactccaaaatggaaagatacgacgcgagattttatcattagaacaaagtatgatgaaaacggaattagaataccgaaaggtgcagataaaggtagaaacattaatatcccaaaagaagaagactggactttaatgaaattaaaaactgaaacttctttgacttcattcaatacaaaaaataatacaaaaggagttgcttcttttgtttattataaccttttacaaaaccccaagcaaaaaattaaggctgatttaattacggttattgaaagagattattatcgtgaagaactagataaaatctataaaaatcaagaaaagtttcatcctgaactaagaaatagaaatttgtacgagcaagctgttcaacttttgtatcctaataacataagtcaccagaaaacaattaaagagttagattttaatcacttgattaaagaagatattttgctatatcaaagagatttaaagtcaaaaaaatctttgattgccaattgtgtttacgagaaagagaactacgaacgtacagatgaaaaaagtggaaataaatacaaaaatccgctaaaagtaattcataaagcaaatcctatttatcaagagtttaggctgtggcaatttatcaaaagattaaaaataataaagaaaagcgaaacgattaatgaagagattaaaattaatcttgatgttacgtctcaattattaacaaataaggtaaaggaagaattgtatgcatttttaaatgataaagaaagtgtaacagagaaagatattcttagttttttaaacaaaaaatataaagatttaaacatttcttcagagaactataaatggaattttgcctctgaaaaagaaccttgcaatccaacgagatataatttcattttaaggactaaaagaatcaaaggattcaattataaaacatttttgactcctgaaaatgaatatagtctttggcatttcttttattcggtaaagaaaaaagaagaatttaataaaggattgagtaatattctttctcgcttattagataaatcaggtctttctaaagagtttcatgcagagttgactaaaaattttagctcttttgcaggatatactaatgattatggaacgtattctgaaaaagcaatcaagaaaatgttaccgtttctaaggcttggacaatattggaatgaaaaggatgttgagaatattttatcaaaagcaaatcaagaggtaaaacaaaaagttctagataaagaagaaatccatggcgagttaaaagatttccaaggcctttgggtctcgagtgcttgttatctagtttatggacgatattcagaagttggagaaattcaattttggcaatcgccttatgatattgaaaattatttaaagaacgagtttaagcagcattcattaaataatccaactgttgaaaaaatattggtagaaacgcttcatgttgtaaaagatatctggaaatattacggagaagaaataggtacagatgaagatggacgagttatttatgctaaattattcgacagaattcacattgagctaggtcgggaaatgaagaaaaataataagcaaaaagaaaaagacgacaaacaaaataaagaaaatagaaaagctaatgagcggattgttgagctcttaaaagaattaaaaaaaacaaatcctacgcttcaagaaaaatctccatttcaacaagaaaaactaagaatattagaagaaagtcttctgtcatcaatagaatatgataaagacacaactgaatatcaacttgctaatggaaaaataaccaaaaaagatataaaagaagtaaccacaaaagaactatcaaaaattagaaggtctgattttgaacgatataaactatggctcgatcaaagatatcaatctccatatacaggaaaattcattaaattatctgacttgtttgatagaaaaaaatatgaaattgaacatatctttccacaagaacgtgttacgctaaatgcactctacaataaaataatttgtgaaacagaaatcaataaagagaagaaagcttctactggatacggttttatactcaatgcaaaatccaaaaaggttttttgcagtgcgcacgattcagatactgagattatcgatataaaagattatgaagatttagtgaataacaatttctctggaagaaaaagagaaatacttctaagtaaagaaataccagaggaatttaccaacagccaactcaacaatagtcaatatatctctaaaatggcaatgaagcttttaagcaatatagtccgtgaaaaagatgaaaagacctttcgttcaaaaaatgttttggcaacaaatggtacaattacctccacattaaaaagacattggcaactgaatgatgcctggaatgaaattatttctccaagatttaaaagactaaatgaattaacaaataccaatttatttggagattatcgggaaataaatgggcataaagtttttatcaatagtgttcctgaagaaacgagtaagaattttgatcttaaaagaatagaccatcgtcatcatgctttggacgcattaataattgccttaacaacagagaatcacgttcaatatctcaacaacatttcttcacaagaaaaaaatgatgaagaaaagttgaaaactagaaagggaataaagtttcaattaacaaactcaagaaaaggatttaatgatgaaaaggaatggtactttttgccacccgcacaaataaaaacaaaggaaggtattgataagtttgagtatcaatataaagatacgaaaagcagaatttttaaggatattgctaaaatggcattagaaaaaactgttgcaagttttaaacagaaaaaccgtgttattcgtcaacgttggaataagtatttaaaatctgaagacggaaaactaaataccataaaacaagaaggtttaaaggaaattgtaaattataacattagaaaacgccttcatgaagatactttttatggaaaagttaaattatcccataaaacaatatcagtttccatggaaaaagcattggttgaatcttttgcatttgttgatactgaaataaacaaagagattgataatttaagtaacattgaaaatagatctcaacaggaaattataaaattgcttggagacaaatatcctaaagttatggtctatgagaaatatgttgcaacgagatttggaaataatttagagtcttttgcttcaataccatcagataaaattattaaaactattgaaagtattactgataccggtattcaaaaaattctgaaaaaacacttacacaaatacgatactgtaagtatgaaaattgtagaagtaactgaatatgttaactacatcgtagatgatgtgcaacgaactgttataaaggatttgttgaagaataatacaacaatagaatacattacgattgaaaaaaaggacattaaagaaacagaagtatttataagtagtttaggtgaaggatatgatagaaaaggagtcaagcagaatccgcaattagctttttcatatgatggagtgaaagagttaaataaaaatattattgagctaaatgatgggaaatttcatcatccaatttataaagtaagaacaagtgatgcaatgggaacaaagttccctgtatcagaagaaggacaaaaaagcactaaatttgttgtaacggcagcaggaagtaattcgttctgtggtttttataaaagcggtactgaaagaaaattctatattccaactttgcgagagtctgttgagagtttgaagcaagggttggagccatgtcccattgtacatcctgaagattctaagtttgaattaatgtttgtactacatccaagtgatttagtatatgttcctacggaagaggagattgagaactcaaatctagttgattttaaaaatttagacaaacaacagtttgaacggatttacaaattcaccgacggaagcggtaatacaatgaattttgtaccaacaaatcttgcaagtccgataattgatgttaaagcagaggagcataaaaagataatagataatttattgttttgggaagaagtaaatgaaacgaaaaaaggaattgtaaaaaaaacaaagccgctatttaatgaagttggattaggttcggaaaataaaacaaaaagccaaaatactttcgatagggagcagattaaatcaatttgttggaagttgaaagtagatagattagggaatatttcgaaagcataaaatatgattacacgctctatctacatcggcaatcccgcctacctcaagctaaaagacgaacaaatgtacatcctggatgcatcgtctaatgaggtaaaaggtaaagtacctgttgaagatctcggttttctaatgttggatcattttcagattacgctttcgcatcagctgattcagaagatgatggggaataatgtggtggtagtaagctgtgatgcacatcatttaccccacgggattatgttacctttgtatggtcatacagaacattcgaatagggtgaaagaccagttggaggccagcgagccgttgaaaaaacagctttggaagcagacggtagagtgcaagattgaaaatcaaaaagaggttttgctgaggttgggcaattattatgagccgatgatcgagtatcaaaacaatgtgaaaagcggtgacattaccaatatggaaggtatcgccgcacagcattattggaaatatctcatcagtcttgattttctgagacagcgttttggagactcacccaacctgttttttaattttggctatgccgttttacggagtattgtagcgagagcgattgtagaaaccggactattgcctgtgttggggattttccataaaaataaatacaatccgtactgtcttgctgatgacctgatggaaccataccgaccgtttgtagatcttctggtgatgcaatggctggaattgcacccgagtaccgaagaactgactaaagattttaaagcacacattctgcagattgctactaaagatgtaagaatcgacggaaaaacccgccccttgctggttgcggtaaaaacaaccgcgtcatcgctgtacaaatgctatacaggagaaaaaagactcatctcttatcccgaattgatatgagtcggtgaaagacattttactttttatattgtacctattacaatcaaaaatatggatgccgaaaggtttaactcttatcgaattatgtgggttttagtattgtatgatcttcctaccgaaaccaaagccaatatgcgggatgctacaaagttccgtaaagggctgatagatgatgggtttacgctttttcagttctcgatgtatgtacgccactgcccgagtcgggagaatgctgaagtgcatattaaaagagtgaaatttatgcttcccaaagccggaaaagtcgctattatgtgcatcaccgacaaacaatttggagatattgaaatcttttttgcgcgaaacaaagaagaaccgccaccgactttccaacagctcgaacttttttaataacctgtcactgcgaggaacgaagcagtctgatctttagaaaataaaaacctgcgttgtattaatatagaagtttcaaaaactaatattttcataattctagaacaataataaaccctctggtaaacagagggttaagttttgaggttgtgttgtatctcaaagatactgaaaaatgaaagcaattcacaacgaacttgaacttctttatgaatcgaatcaagttgtgttgtatctcaaagatactgaaaaatgaaagcaattcacaacaaaaataaacttcatttgaaatttgaatgagttgtgttgtatctcaaagatactgaaaaatgaaagcaattcacaacaacggtcaaaacgaagaagttgttttgaaagttgtgttgtatctcaaagatactgaaaaatgaaagcaattcacaacttttcatcaactcgggaaaggattttaattgttgtgttgtatctcaaagatactgaaaaatgaaagcaattcacaaccggtttgataattgggaattcttgttcccagttgtgttgtatctcaaagatactgaaaaatgaaagcaattcacaacatatttcattcttaaataatagaatatcaagttgtgttgtatctcaaagatactgaaaaatgaaagcaattcacaactgcatcttctgctgtaaaccaatgtttcatgttgtgttgtatctcaaagatactgaaaaatgaaagcaattcacaacacgcaaataaaatgcattttcgccattccagttgtgttgtatctcaaagatactgaaaaatgaaagcaattcacaactgccagttggtgccaatgttgacgagatcggttgtgttgtatctcaaagatactgaaaaatgaaagcaattcacaactaatattataaccagaaaaaccatcataaagttgtgttgtatctcaaagatactgaaaaatgaaagcaattcacaacggctctttgaccgcctgttaaaaccagtatgttgtgttgtatctcaaagatactgaaaaatgaaagcaattcacaactatgcaccatctggactttggtcagttaacgttgtgttgtatctcaaagatactgaaaaatgaaagcaattcacaacaacgcttgccaattatagaattttggattagttgtgttgtatctcaaagatactgaaaaatgaaagcaattcacaaccaatcggtcttatttctccccaatattcttgttgtgttgtatctcaaagatactgaaaaatgaaagcaattcacaacgcgctaacttcttgccctgtttagttccccgttgtgttgtatctcaaagatactgaaaaatgaaagcaattcacaacaatttcacggactctccagatagaagtttcgttgtgttgtatctcaaagatactgaaaaatgaaagcaattcacaacgaagatgataatgatgatgattttcaaaatgttgtgttgtatctcaaagatactgaaaaatgaaagcaattcacaacatgttatatcggtattgataataatgtttcgttgtgttgtatctcaaagatactgaaaaatgaaagcaattcacaaccaaagcaacgaaagtattccgggaaattctgttgtgttgtatctcaaagatactgaaaaatgaaagcaattcacaacctgtacatcaagaaaacattaaagaagattgttgtgttgtatctcaaagatactgaaaaatgaaagcaattcacaacggggtaggtgagttcggtgcgcccatttaggttgtgttgtatctcaaagatactgaaaaatgaaagcaattcacaaccacgcaaactgagtataatatccttttttagttgtgttgtatctcaaagatactgaaaaatgaaagcaattcacaacaatccttaaaaatgattattcaattctccagttgtgttgtatctcaaagatactgaaaaatgaaagcaattcacaacctttaaaggctggtaaccccatatttgaaggttgtgttgtatctcaaagatactgaaaaatgaaagcaattcacaacacgtcatcagatgttcctaaatgaacatgagttgtgttgtatctcaaagatactgaaaaatgaaagcaattcacaacttttaagctcctttaataagaatgcgtaatgttgtgttgtatctcaaagatactgaaaaatgaaagcaattcacaacaactacccttttttatgtaagggtttttaagttgtgttgtatctcaaagatactgaaaaatgaaagcaattcacaactgacaccaaaagaaaaagcaaaagaacttggttgtgttgtatctcaaagatactgaaaaatgaaagcaattcacaacaatctttgaatgcatcaaccaatgtggaaggttgtgttgtatctcaaagatactgaaaaatgaaagcaattcacaactcacaacgaacatcaaaatatattattgttgttgtgttgtatctcaaagatactgaaaaatgaaagcaattcacaactaaattgatgtttttagcgtctaatccagagttgtgttgtatctcaaagatactgaaaaatgaaagcaattcacaactatatcacagaattataatcagcggggtaagttgtgttgtatctcaaagatactgaaaaatgaaagcaattcacaaccattctcaatatttgaatcgaattcgtcaagttgtgttgtatctcaaagatactgaaaaatgaaagcaattcacaacggtcagaagttatcgaccgaaaaatgtcaggttgtgttgtatctcaaagatactgaaaaatgaaagcaattcacaacgtaacgggagcgattaaccaattggaatttgttgtgttgtatctcaaagatactgaaaaatgaaagcaattcacaacatacatatgttttgcccgtttatatagccagttgtgttgtatctcaaagatactgaaaaatgaaagcaattcacaactgacggtttgttggaaaatgaacaaaatccgttgtgttgtatctcaaagatactgaaaaatgaaagcaattcacaacgagttctatcattcgttttcggtaataggtgttgtgttgtatctcaaagatactgaaaaatgaaagcaattcacaacacacctttatagcaatgagggagaagttgtgttgtgttgtatctcaaagatactgaaaaatgaaagcaattcacaacctcctttaatgtgttccatacgttttatttgttgtgttgtatctcaaagatactgaaaaatgaaagcaattcacaacgtcgtataaatcatataagagtgcattatggttgtgttgtatctcaaagatactgaaaaatgaaagcaattcacaacattcttcatttaatgttgaagtggttaaatgttgtgttgtatctcaaagatactgaaaaatgaaagcaattcacaacaagctttatcgcattcaagttcccaacaatgttgtgttgtatctcaaagatactgaaaaatgaaagcaattcacaacactcattatctggcttagtgaaatatttcagttgtgttgtatctcaaagatactgaaaaatgaaagcaattcacaactgccgaactctgaatctgacttgtcggcaagttgtgttgtatctcaaagatactgaaaaatgaaagcaattcacaacaaactgaaacaactgaaaaatcagaatcgagttgtgttgtatctcaaagatactgaaaaatgaaagcaattcacaacaataaaatattcgctactaaagatgatttggttgtgttgtatctcaaagatactgaaaaatgaaagcaattcacaacttcagaacaatattcgtagaaaatagttttgttgtgttgtatctcaaagatactgaaaaatgaaagcaattcacaacacgacttcccctaatgctgatgttcgagatgttgtgttgtatctcaaagatactgaaaaatgaaagcaattcacaacagcagaaagcggtgcggtagcttctaagacgttgtgttgtatctcaaagatactgaaaaatgaaagcaattcacaactctttatctgctctttccgctggcgttaatgttgtgttgtatctcaaagatactgaaaaatgaaagcaattcacaacacgctttttgtcggtattggcaaacaaaaagttgtgttgtatctcaaagatactgaaaaatgaaagcaattcacaacgaaatatttgcaacagaaaattttgataatgttgtgttgtatctcaaagatactgaaaaatgaaagcaattcacaaccaccttttaaatcattgtcggtggctattagttgtgttgtatctcaaagatactgaaaaatgaaagcaattcacaacctaacatctcaatttcctgtctaagcataagttgtgttgtatctcaaagatactgaaaaatgaaagcaattcacaacatatcagaaactctatcagcatttctcatagttgtgttgtatctcaaagatactgaaaaatgaaagcaattcacaacttgaatgccaaatagaagtaatgcacgattgttgtgttgtatctcaaagatactgaaaaatgaaagcaattcacaacgtagtagagatttcattaggagcatcgccagttgtgttgtatctcaaagatactgaaaaatgaaagcaattcacaaccagcttctttctgggcttgtttctgtttctgttgtgttgtatctcaaagatactgaaaaatgaaagcaattcacaacaggctacctctttacaattagagtttgatagttgtgttgtatctcaaagatactgaaaaatgaaagcaattcacaaccagcatctctttttaaatcaaaaacagctcgttgtgttgtatctcaaagatactgaaaaatgaaagcaattcacaacaggcgatgccaggggcttatttcgcgtttggttgtgttgtatctcaaagatactgaaaaatgaaagcaattcacaacccaaacgtaaactcctaccacaactgagacgttgtgttgtatctcaaagatactgaaaaatgaaagcaattcacaacgtaataatttctactaatttaggataaatagttgtgttgtatctcaaagatactgaaaaatgaaagcaattcacaactataaaaattttcgttatgttcttttttaagttgtgttgtatctcaaagatactgaaaaatgaaagcaattcacaacaattgttatcgatatgcatatctgaatggcgttgtgttgtatctcaaagatactgaaaaatgaaagcaattcacaactcggtataattctctaaattaatccatcctgttgtgttgtatctcaaagatactgaaaaatgaaagcaattcacaacttaagtctaaattgtgttgctgttatttttgttgtgttgtatctcaaagatactgaaaaatgaaagcaattcacaaccatatactgagaagtcaccgacaaggaatggttgtgttgtatctcaaagatactgaaaaatgaaagcaattcacaactgatgacgatgacgatttacaattctaaccgttgtgttgtatctcaaagatactgaaaaatgaaagcaattcacaactaaacttactctactatcgccactattattgttgtgttgtatctcaaagatactgaaaaatgaaagcaattcacaactgtgatatcctcgtaggcttttacctgagcgttgtgttgtatctcaaagatactgaaaaatgaaagcaattcacaacttaccaacgaaggaagaactttccgaagaggttgtgttgtatctcaaagatactgaaaaatgaaagcaattcacaactaacccgagtgcgtcgagtttgagacgacggttgtgttgtatctcaaagatactgaaaaatgaaagcaattcacaactattctcattattttcttgcaaaagtaacggttgtgttgtatctcaaagatactgaaaaatgaaagcaattcacaacgaagttctccagttccctgactatcttttggttgtgttgtatctcaaagatactgaaaaatgaaagcaattcacaaccatccgtcaacggacacaggatagatattggttgtgttgtatctcaaagatactgaaaaatgaaagcaattcacaactatgcgccatctggactttggtcagttaacgttgtgttgtatctcaaagatactgaaaaatgaaagcaattcacaacatataattggattattgtttttggctgctagttgtgttgtatctcaaagatactgaaaaatgaaagcaattcacaaccgattgaggggtatcaaaaaacaattgatagttgtgttgtatctcaaagatactgaaaaatgaaagcaattcacaacataatgtagaaactcaggatttcattacttgttgtgttgtatctcaaagatactgaaaaatgaaagcaattcacaactccttttaaacaatcttctaataatttcttgttgtgttgtatctcaaagatactgaaaaatgaaagcaattcacaacttagtacccagaatttcggggcgaaatgcggttgtgttgtatctcaaagatactgaaaaatgaaagcaattcacaactgctgttggtgctgggcaatcaccgagggggttgtgttgtatctcaaagatactgaaaaatgaaagcaattcacaactcagctctttctcatctggtggaaacatttgttgtgttgtatctcaaagatactgaaaaatgaaagcaattcacaactttaattgtgacttgccctgcctgcgtggtgttgtgttgtatctcaaagatactgaaaaatgaaagcaattcacaacgataaaatagatcgggatatgaaaaaaaatgttgtgttgtatctcaaagatactgaaaaatgaaagcaattcacaaccaatctcatcacgcaccgcgaagaaggtgcgttgtgttgtatctcaaagatactgaaaaatgaaagcaattcacaactaattacaatgctggaactgtaagtttcgagttgtgttgtatctcaaagatactgaaaaatgaaagcaattcacaacagtaaatcaaatggtaccattcaataataagttgtgttgtatctcaaagatactgaaaaatgaaagcaattcacaacacagctatgtaataaaacttttagatcatcgttgtgttgtatctcaaagatactgaaaaatgaaagcaattcacaacgactgtccggcttgcaactttaccagaatcgttgtgttgtatctcaaagatactgaaaaatgaaagcaattcacaacagcataagcgacaaacactttttgtcctttgttgtgttgtatctcaaagatactgaaaaatgaaagcaattcacaacaaagtcctccgtagcgttaatccaagtaaggttgtgttgtatctcaaagatactgaaaaatgaaagcaattcacaacccttttgtaatagcatctaatgcaacagtcgttgtgttgtatctcaaagatactgaaaaatgaaagcaattcacaacgagaaactctttttcaagatgagaaattatgttgtgttgtatctcaaagatactgaaaaatgaaagcaattcacaacaggcaaaacaaataggagaagttcgcagttgttgtgttgtatctcaaagatactgaaaaatgaaagcaattcacaacggcaattgctttgtttgtatcatccgtgctgttgtgttgtatctcaaagatactgaaaaatgaaagcaattcacaacaaactatacaccaatcaatattcggcagatgttgtgttgtatctcaaagatactgaaaaatgaaagcgaatattgaaacatgcttttttgaactttattttgaataaaatagaaaaatagatgactctaagacaaccccaaaacatcatttttctaacctcaaaactaccggaaaatgatcactatatccacccatgtaccgtgagccggagtaggtgcgatgaggatatttgttattcttttggtctttatttctaagtcggggacagttgtagatttctgcttggatattgcttaatttgaactgttctatcagcgattgttcagtgtaaataatctggtcaaaacaaacccctttcttaccgtgataagtagagaattgattgtttttgaagaatgtttcaaaaggattactcaggattttctctccgttattcttgtaaagcagtccttgcaaagcttcattatcaggattttcattgaagtcgcccattagaattacactttcatttttatcggataatttttgaattgtttctttcaacttatcgatgatataatctcgttgtgcttttttagcatcttgatttcttttggagggtagatgaacaaccaaaatatgtagcttttttccttgatataaaaactctgtgtgtaatatatctctcgtatcaaattccttctcttcatccacctgaaacttcaaagtttgatagctttctaaaatcaatttcgtcttatcaaaaagcaaagccacacttaagtttcgagaatcattggatggttcatagatgatttcgtaatcattaataggagaatcttctttaatcaaatcctctaatacagacctcgcgccaatctcagccaaaccaatgacagaaggcaattgtccaaaatcttcctcaacaaaacgaaagacattagtaatctttttgattttcagatagtatttgtaatcgtcccaattattaaat
